United States Patent Application Publication US 2014/0259212 A1 - sequence listing, part 9

SEQ ID NO: 28250 - DNA, 1644 bp, Bradyrhizobium sp. ORS278
  CDS (1)..(1644): transl_table=11
atgagcacgaaccagtaccagctcggcctcgacaagaaccccgccaattacgtgccgctgaccccgctcagcttcctggcgcgcagcgcggccgtctaccccgatcacgtcagcacggtctacgagggtcgcagcttcacctggcgccagacctatgagcgctgccgccgcttcgcgtcctatctcgccggccgcggcatcggcaccggcgacaccgtggcggcgatgctgccgaacatcccggcgatgaacgaggcgcatttcgccgtgccgatgacaggcgcggtgctcaacacgctcaacatccgcctcgatgcgccgtcgatcgcgttccagcttgatcacgcccaggccaagatcatcctggtcgatccggaattctccggcgtgatcagcgaggcgctgaagctgatgagcggcgcaaagccgttcgtgatcgacgtcgatgacgcgtcctacgccggcggcagccgtatcggcgaaatcgagtatgaggccgccgtcgccactggtgatccctccttcgagccgcgccgtcccactgatgagtgggacgcgattgcgatgagctacacctcgggcacgaccggcaatcccaagggcgtcgtgacgcatcatcgcggcgcctatcttaacgcggtcagcaacatcctcgccggcgggctcggccagcatccggtctatctctggaccctgccgatgttccactgcaacggctggtgctttccctggaccatggcggcggcggctggcgtcaacgtctgcctgcgcaaggtcgagccgacgaagatcttcgagctgatcaagacccacggcgtcacccatatgtgcggcgcaccgatcgtctacaacgtgctgatcaatgctccggacgcgcccaagggcaagcgcgacagaccggtggtcggcctgatcgccggcgccgcgccgccggtcgccgtgctcgaaggcgccgagagcatcggcatcaagctgacccatgtctacggcctcaccgaggtctacggccccgcctccgtctgcgccgagcagcccggctgggacgatttgccggcgcccgagcgcgcgcggatgaagcgccgccagggcgtgccctatccgctgcaggaagccgtcaccgtgctgaatccggagacgatgcaggaggtgccgcgcgacggcgagaccatcggcgaggtcatgttccgcggcaacatcgtcatgaagggctatctcaagaacgagaaggccacgcaggacgccttcgccggcggctggtttcacaccggcgatctcggcgtgctcgacgagcacggctacgtcatcatcaaggaccgttccaaggacatcatcatctccggcggcgagaacatctcctcggtcgaggtcgaggacatcctctacaagcaccccgccgtgctgttcgccgccgtcgtcgccaagcccgacccgaaatggggcgaggtcccctgcgccttcatcgagctgaaggacggcgcccaggccaaggaagccgagatcatcgcctattgccgcagccacatgtccggcttcaagacgccgaaggtcgtggtgttcggcccgatcccgaagacgtcgacgggcaagatccagaagttcctgctgaggaacgaggtaaactcggcgaaggcgatttcggcgtag

SEQ ID NO: 28251 - protein, 547 aa, Bradyrhizobium sp. ORS278
MSTNQYQLGLDKNPANYVPLTPLSFLARSAAVYPDHVSTVYEGRSFTWRQTYERCRRFASYLAGRGIGTGDTVAAMLPNIPAMNEAHFAVPMTGAVLNTLNIRLDAPSIAFQLDHAQAKIILVDPEFSGVISEALKLMSGAKPFVIDVDDASYAGGSRIGEIEYEAAVATGDPSFEPRRPTDEWDAIAMSYTSGTTGNPKGVVTHHRGAYLNAVSNILAGGLGQHPVYLWTLPMFHCNGWCFPWTMAAAAGVNVCLRKVEPTKIFELIKTHGVTHMCGAPIVYNVLINAPDAPKGKRDRPVVGLIAGAAPPVAVLEGAESIGIKLTHVYGLTEVYGPASVCAEQPGWDDLPAPERARMKRRQGVPYPLQEAVTVLNPETMQEVPRDGETIGEVMFRGNIVMKGYLKNEKATQDAFAGGWFHTGDLGVLDEHGYVIIKDRSKDIIISGGENISSVEVEDILYKHPAVLFAAVVAKPDPKWGEVPCAFIELKDGAQAKEAEIIAYCRSHMSGFKTPKVVVFGPIPKTSTGKIQKFLLRNEVNSAKAISA

SEQ ID NO: 28252 - DNA, 1629 bp, Thermus thermophilus HB27
  CDS (1)..(1629): transl_table=11
atgatggagggggaaaggatgaacgggttcccgagcaccatgatggaggaggagctgaacctttgggacttcctggagcgggcggcggcgcttttcggcaggaaggaggtggtctcccgcctccacaccggggaggtccaccgcaccacctacgccgaggtctaccgaagggccaggaggctcatgggggggcttagggccctcggggtgggcgtgggggaccgggtggccaccctgggcttcaaccacttccgccacctcgaggcctacttcgccgtccccggcatggggtcggtcctccacaccgccaacccccgcctctcccccaaggagatcgcctacatcctgaaccacgccgaggacaaggtcctcctctttgaccccaacctcctgcccctggtggaggccatccggggcgagctgaagacggtgcggcacctcgtggtcatggacgagaaggccccggagggctacctggcctacgaggaggtcctgggggaggaggtggaccccgtgcgggtgccggagcgggccgcctgcggcatggcctacaccacggggaccacgggcctccccaagggggtggtctacagccaccgggccttggtcctccactccctggcggcgagcctcgttgacggcaccgccctctcggagaaggacgtggtcctgccggtggtgccgatgttccacgtcaacgcctggtgcctgccctacgccgccaccctggtgggggccaagcaggtcctgcccgggcccaggctggaccccgcctccctggtggagctctttgacggggagggggtgaccttcaccgccggggtgcccacggtctggctcgccctggcggaccacctggagagcacgggccaccgcctgaagaccctgaggcggctcgtggtggggggctcggccgcgcccaggagcctcattgagcgctttgagcggatgggcgtggaggtgcgccagggctacggcctcaccgagacctccccggtggtggtgcagaacttcatcaaaagccacctggaggccctccccgaggaggagaagctcaccctcaaggccaagacgggcctccccatccccctggtgcgcctaagggtggcggacgaggagggccgccccgtgcccaaggacgggaaggccctgggggaggtccagctcaaggggccctggatcaccgggggctactacaagaacgaggaggccacgcggagcgccctcaccccggacggcttcttccgcaccggggacatcgccgtctgggacgaggaggggtacattgagatcaaggaccggctcaaggacctgatcaagtcgggcggggagtggatctccagcgtggacctggagaacgccctcatgggccaccccaaggtgaaggaggcggcagtggtggccatcccccaccccaggtggcaggagaggcccctggcggtggtggtgcccaggggcgagaagcctgccccggaggagctgaacgcccacctcctaaaggccggcttcgccaagtggcagctccccgacgcctacgtcttcgtggaggagatcccgaggacatccgcgggcaagttcctcaagcgggccctaagggagcagtacaaggactactacggaggcgcctga

SEQ ID NO: 28253 - protein, 542 aa, Thermus thermophilus HB27
MMEGERMNGFPSTMMEEELNLWDFLERAAALFGRKEVVSRLHTGEVHRTTYAEVYRRARRLMGGLRALGVGVGDRVATLGFNHFRHLEAYFAVPGMGSVLHTANPRLSPKEIAYILNHAEDKVLLFDPNLLPLVEAIRGELKTVRHLVVMDEKAPEGYLAYEEVLGEEVDPVRVPERAACGMAYTTGTTGLPKGVVYSHRALVLHSLAASLVDGTALSEKDVVLPVVPMFHVNAWCLPYAATLVGAKQVLPGPRLDPASLVELFDGEGVTFTAGVPTVWLALADHLESTGHRLKTLRRLVVGGSAAPRSLIERFERMGVEVRQGYGLTETSPVVVQNFIKSHLEALPEEEKLTLKAKTGLPIPLVRLRVADEEGRPVPKDGKALGEVQLKGPWITGGYYKNEEATRSALTPDGFFRTGDIAVWDEEGYIEIKDRLKDLIKSGGEWISSVDLENALMGHPKVKEAAVVAIPHPRWQERPLAVVVPRGEKPAPEELNAHLLKAGFAKWQLPDAYVFVEEIPRTSAGKFLKRALREQYKDYYGGA

SEQ ID NO: 28254 - DNA, 1653 bp, Desulfovibrio vulgaris subsp. vulgaris str. Hildenborough
  CDS (1)..(1653): transl_table=11
atggatacgttcgccatacgcgagatgacactcggccgcatactggatgagaccgccgcgaagtttcccgataacgacgccgtggtctatgtcgaccgcgactaccggcagacctaccgcgagttcgtctcggtggtggacgacctcgcgcgcgggctcatggcccttggcgtgaagcggggcgacaaggtggcgctctgggccaccaacgtgccgtactgggtggcgctgcagttcgccacggcgaaaatcggcgcggtgctgctcacggtcaacaccaactatcgcgagagtgaactgcgctacctgctcgagcagtccgagtgcgagaacctgttcatcatggacggcttccgcgaccacgacttcgtgcagaccatctatcaggtcattcccgaactcaggatgcagccccgcggccagttgcgctgcgaggggctgccgcacctcaagcgcgtgatgttcctcggtgcggagaagcaccggggcatgtactccgtgcccgagatcgtcagccttggcgtcatggtctccgatgaggagttccgccagcggcaggatgagctcgacccctacgacgtggtgaacatgcagtacacctcgggcacgacgggctttcccaagggcgtgatgctcacccatgtgggcatcggcaacaacggttactggataggccgcaatcagggcttcaccgaaaaggacagggtctgcctgcccgtgccgctgttccactgcttcgggtgtgttctgggtgtcatggccgccatcaaccacggtgccgcgctggtcatccttgagaacttcaaccccatgcatgtcatggcgtcggtcgaccaggagaagtgcaccgccctgtacggcgtgccgaccatgttccttgccgtgctggagcacaagctcttcgaccgcttcgacttcagttcgctgcgcacgggcatcatggcgggttcggtatgccccgaaccgctcatgcgccgggtcatcgagaagatgaacatgcgtgaaatcaccatctgctacggccttaccgaggggtcgcccgtcatgacccagacgctggtggacgattcactcgaacggcgtgtgcagaccgtggggcgcgccatgcccggcatcgaggtgcgcatcgtcgaccccgagaccaacgaggaggtgccgcacggtacccccggagaggtggtctgccgcggctacaacgtgatgaagggctactacaacatgcccgaggccacggccaaggccgtggacggcgacgggtggcttcattcgggcgacctcggcatcatggacgagcatggctacgtgcgcatcacagggcgcatcaaggacatgatcatccgtggcggcgagaacatctacccacgggaaatcgaagagttcctctatggcatggagggcgttcaggacgtacaggtggtcggcgtgcccagccgcaagtacggcgaggaggtgggagcgttcatcatccccaaggaggggtacgacctcgcccccgaggatgtccgtgaccactgccgcgggcgcatctcgtggtacaaggtgcctcgccacatcgcgttcgtctccgaattccccatgaccgccagcgccaagatacagaagtacaagctgcgcgagatggctgcggagttgttccccgacgccatgaagtag

SEQ ID NO: 28255 - protein, 550 aa, Desulfovibrio vulgaris subsp. vulgaris str. Hildenborough
MDTFAIREMTLGRILDETAAKFPDNDAVVYVDRDYRQTYREFVSVVDDLARGLMALGVKRGDKVALWATNVPYWVALQFATAKIGAVLLTVNTNYRESELRYLLEQSECENLFIMDGFRDHDFVQTIYQVIPELRMQPRGQLRCEGLPHLKRVMFLGAEKHRGMYSVPEIVSLGVMVSDEEFRQRQDELDPYDVVNMQYTSGTTGFPKGVMLTHVGIGNNGYWIGRNQGFTEKDRVCLPVPLFHCFGCVLGVMAAINHGAALVILENFNPMHVMASVDQEKCTALYGVPTMFLAVLEHKLFDRFDFSSLRTGIMAGSVCPEPLMRRVIEKMNMREITICYGLTEGSPVMTQTLVDDSLERRVQTVGRAMPGIEVRIVDPETNEEVPHGTPGEVVCRGYNVMKGYYNMPEATAKAVDGDGWLHSGDLGIMDEHGYVRITGRIKDMIIRGGENIYPREIEEFLYGMEGVQDVQVVGVPSRKYGEEVGAFIIPKEGYDLAPEDVRDHCRGRISWYKVPRHIAFVSEFPMTASAKIQKYKLREMAAELFPDAMK

SEQ ID NO: 28256 - DNA, 1644 bp, Acinetobacter sp. ADP1
  CDS (1)..(1644): transl_table=11
atggtgagtgcttatgatgaacttcctcgcacacctgccaattttgttgcattatcaccattacgttatttagaacgcgcagcttatatttaccctcaacaagccgcaattattcacggcacacgtgtcatcacatggcaggaaacctatacgcgctgtcgtcagtttgcgtcacaactcaaacaacttggcattcaaaagaacgatactgtttcagtgcttttgccaaatgtgcctgccatgattgaagctcattttgcagtgccaatgagtggtgcagtactcaataccatcaatacccgactcgatgccaaaactgtagcctttatgctggagcatgcagagaccaaagtattactagtcgatcaggaattttctgaattagccaaagcagcgttatctttgatcaatcaggatatctttgtgattgatgtcgatgatgccgagtatgaaaaatgttttaccccacccattggtgcaattgaatatgaggactggatttctgagggtgatgaatattttgaatggattcttcccaacgacgagtgggatgcgattagcttaaactatacttcggggaccacaggaaaccccaaaggtgtagtgtatcaccaccgcggtgcatatattaatgcagccagtaatattattgcctgtggtatgaccccacgtgccaagtatctctggacgctaccgctatttcactgtaatggctggtgttttgcttggacggttgctgcaaatggcggcaccaatatttgtttgcgcaaagtcgatcctgccctggtttttaaactcattgaacaacataaaatcgattatttctgtggagcaccgattgttttatcaatgctgattaatgcacctaaacaacatcaaatcaaatttaatcatcgtgttgaagtgatggtagcgggtgccgccccacctgctgccattattgaaggtatgcgtcatctaggggtcaatgtgacccatgtatacggcttaaccgaaacctatgggccttctggcctgtgtgcggcacaggcaggctggagtgatctttctattcaggaacaagcacaactgcatgcacgtcaaggggttccatatcccttgcaggacagtatgcgggtactcgatcccaagaccatgcaacctgtgcctgcagatggacaaacattgggggaaattatgtttcgtggcaatatcgtgatgaagggttatctcaaaaatccgaaggcgacagaagaagcgtttgctgatgggtggttccacagtggcgatctggcagtttgccaacctgatggctatgcaaaaattacagatcgtgccaaagatgtcattatttcaggtggtgaaaatatttcttctcttgaggttgaggaggtgctataccgtcatcctgccgtgctgactgcggcagtagttgctaaacctgatccgcaatggcaggaagtcccatgtgctttcattgagttaaaagcaggcgtaaatatcaccacggaagagcttattgaacattgcaaaaaggatttggctcgctttaaggttcctaaagatattgtaatcaccgaaattcccaaaacctcaacaggtaaattacaaaaatttattttacgagattgggcaaaagagcgcgctacaggccaattcacttag

SEQ ID NO: 28257 - protein, 547 aa, Acinetobacter sp. ADP1
MVSAYDELPRTPANFVALSPLRYLERAAYIYPQQAAIIHGTRVITWQETYTRCRQFASQLKQLGIQKNDTVSVLLPNVPAMIEAHFAVPMSGAVLNTINTRLDAKTVAFMLEHAETKVLLVDQEFSELAKAALSLINQDIFVIDVDDAEYEKCFTPPIGAIEYEDWISEGDEYFEWILPNDEWDAISLNYTSGTTGNPKGVVYHHRGAYINAASNIIACGMTPRAKYLWTLPLFHCNGWCFAWTVAANGGTNICLRKVDPALVFKLIEQHKIDYFCGAPIVLSMLINAPKQHQIKFNHRVEVMVAGAAPPAAIIEGMRHLGVNVTHVYGLTETYGPSGLCAAQAGWSDLSIQEQAQLHARQGVPYPLQDSMRVLDPKTMQPVPADGQTLGEIMFRGNIVMKGYLKNPKATEEAFADGWFHSGDLAVCQPDGYAKITDRAKDVIISGGENISSLEVEEVLYRHPAVLTAAVVAKPDPQWQEVPCAFIELKAGVNITTEELIEHCKKDLARFKVPKDIVITEIPKTSTGKLQKFILRDWAKERATGQFT

SEQ ID NO: 28258 - DNA, 1668 bp, Symbiobacterium thermophilum IAM 14863
  CDS (1)..(1668): transl_table=11
gtgtccagcccatatgccgccaagccctggctgaaggcctatccgccgcaggtgccgcctcagctggtctacgaggacagggcgctctacgacctgctggtccgggccgcgcagaggcacggtgacgcgacggcgacggtgttctacggagcccggctcacctaccggcaactccacgagcaggcccggcgcgtcgcctcggggctgatccgcctcggcgtccgcaagggcgatcgggtagccgtcatgctgcccaactgtccgcaggcggtcatcgcctactacggggctctgatggccggcgccgtcgtcgtcatggtcaacccgctctacatgccccgcgagctccggcaccaggtggacgacagcggcgcccgggtcatgatcgccatcgacctggcgtacccgaaggtgaaccagctgaacctggaacacgtggtgtacacggggatgcaggactacatgccggcgccggtcaggtggatcgccccgctgaagctgaagccgccccggatcgcttaccgcaagggggtgctgccgtgggccagcctcgtgggcgccgaaccgatcgcggagcccgtgcccgtgaacccggccgacgatctggccctgctccagtacaccggcgccacctccggcctgcccaaggggtgcatgctgacccaccgcaacctggtggccaacgtgctccagaccgaggcgtggctgtacagagcgcggcgcggtcccgcgctggtcacgttggccgcgctgcccttcttccacgtctacggcatgaccacgctgatgaacttcacaatccacgtgggcggcaccatggtcctgcagcccaagttcgaggcccgcgaagcggtgaagctcatccagaagtaccgtccttccattttccccggcgcgcccaccatgtacgtcgccctcaacaacctgccagatgtgcagaagtaccggctggattccatcgaggcctgtatctcgggggccgcaccgctgccggtggaggtccaggccgagttcgagcggctgaccggcggccggctggtggaggggtacggactcaccgaggcatcgccggtgacccacgccaaccccatctgggaccggcgcaaggaagggtccatcggcctgccgtggcctgacacggagtgccgcatcgtggaccccgagaccggcgaggacgtgccggtgggcgaggtgggcgaactcctggtccgcggcccccaggtcatgaaggggtactggaacctgccggaggcgacggcggagaccctgcgggacggctggctccacaccggcgacatggcccgcatggacgaggagggctacttctacatcgtcgaccggaagaaggacctgatcatcgccggcggctttaacatctatccccgcgaggtggaggaggtgctctacctgcaccggggcgtcaaggaggccgcggtggtcggggtgcccgatccctaccggggggagacggtgaaggccttcatcgtgccgcgcgagggggtgaccctcgaccctgaggagatcaagcagttctgccggcagcacctggcggcgtacaagattccgcgcatcatcgagttccgggacgagctgcccaagtccctggtcggcaaggtgctgcggcgggtgctcctcgaggaggaacagagccggaagggggtcgtgtag

SEQ ID NO: 28259 - protein, 555 aa, Symbiobacterium thermophilum IAM 14863
MSSPYAAKPWLKAYPPQVPPQLVYEDRALYDLLVRAAQRHGDATATVFYGARLTYRQLHEQARRVASGLIRLGVRKGDRVAVMLPNCPQAVIAYYGALMAGAVVVMVNPLYMPRELRHQVDDSGARVMIAIDLAYPKVNQLNLEHVVYTGMQDYMPAPVRWIAPLKLKPPRIAYRKGVLPWASLVGAEPIAEPVPVNPADDLALLQYTGATSGLPKGCMLTHRNLVANVLQTEAWLYRARRGPALVTLAALPFFHVYGMTTLMNFTIHVGGTMVLQPKFEAREAVKLIQKYRPSIFPGAPTMYVALNNLPDVQKYRLDSIEACISGAAPLPVEVQAEFERLTGGRLVEGYGLTEASPVTHANPIWDRRKEGSIGLPWPDTECRIVDPETGEDVPVGEVGELLVRGPQVMKGYWNLPEATAETLRDGWLHTGDMARMDEEGYFYIVDRKKDLIIAGGFNIYPREVEEVLYLHRGVKEAAVVGVPDPYRGETVKAFIVPREGVTLDPEEIKQFCRQHLAAYKIPRIIEFRDELPKSLVGKVLRRVLLEEEQSRKGVV

SEQ ID NO: 28260 - DNA, 1620 bp, Bacillus licheniformis ATCC 14580
  CDS (1)..(1620): transl_table=11
atggttacattaaaaaaacaaacgatcggcgggcttttaaaatcaaccgccggccggtttccgaatcatgaagcggttgtatattctgagctcgatttaagatactcgtatcaggagcttgttgaagaaacttctaaaattgcaaaagggctgctcgcgctcggcattcaaaaaggggagcatgtcgccatctgggcatccaatattccggaatggattctgctccagtttgctacggcaagaatcggcgctgtgctcgtcaccgtcaatacgagctatcaggcgagagaactcgagtacttattggaacattccgattccaccaccctctttctgatggacggctacaaaggaacatcctatatcaatatgatcgatgagatcatgaaaaatcctgaaaagctgccgaagctgaaaaatctcgtctaccttggcaagaacgagacccctgaacatatgacggcttttgccgagatcgctaaaatgggcgaaacggtctctgatgccgacctttttgaacgagagcagtcactcacacacgatgatgtgattaatatgcagtatacgtcgggaacgaccggctttccaaaaggtgttatgctgactcactacaatatcgtcaacaatgcggcgatcgttgccgacagaatggggctgacgagcgaagacaggctgtgcatcccggttcctctttttcattgcttcggctgtgtgttaagcacgcttgcctgcgtcgcgtcaggcgcggccatgctgccaatcatcgaattcaagccggacatcgtcctgcaaacggtcgaaaaagaaagatgtacagggctgcagggtgtaccgacaatgtttatcgccgagctcacccaccccgatttcgcaaactatgacctctcttctctgcggaccgggatcatggcaggctccccgtgccctagagaagtcatgaaaaaagtgatgaagcaaatgaatatgacggatatcacaatcgcatacggacagacggagtcttcacccgtgattacgcagacaaccgtcaccgacacgatcgaacgccgcgtcgagaccgtcggaaaagtgcatccgcatgtagaaatgaaaatcgtcgatcctgacaccggggaaacgctcggcccggatgagcagggcgaactgtgcacaagaggatacctcgtcatgaaaggctactataaaatggatgaagccacaaaaaaggccatcgatgaagacggctggctccataccggagatttggcagaaatggaccgggacggatacgtgaggattaccgggcgcttaaaagatatgatcgtccgcggcggggaaaacatttacccgcgtgaaatagaggaattcctttatgaacatgaggatattgtcgatgtacaggttgtcggcgttccggatgaaaagtacggggaaaaaacggctgcctttattaaatgcaggccgggcaaaaagctgacgctcgaagacgtcagagatttttgcaaaggacagctttcgtattataaaattccggagtacgtatttctgatcgacgaatacccgctgaccgcatccggaaaagttcaaaaatatgtgctgcgcgaccgcgcagcagaactgcttgcgagcccggtgcagtaa

SEQ ID NO: 28261 - protein, 539 aa, Bacillus licheniformis ATCC 14580
MVTLKKQTIGGLLKSTAGRFPNHEAVVYSELDLRYSYQELVEETSKIAKGLLALGIQKGEHVAIWASNIPEWILLQFATARIGAVLVTVNTSYQARELEYLLEHSDSTTLFLMDGYKGTSYINMIDEIMKNPEKLPKLKNLVYLGKNETPEHMTAFAEIAKMGETVSDADLFEREQSLTHDDVINMQYTSGTTGFPKGVMLTHYNIVNNAAIVADRMGLTSEDRLCIPVPLFHCFGCVLSTLACVASGAAMLPIIEFKPDIVLQTVEKERCTGLQGVPTMFIAELTHPDFANYDLSSLRTGIMAGSPCPREVMKKVMKQMNMTDITIAYGQTESSPVITQTTVTDTIERRVETVGKVHPHVEMKIVDPDTGETLGPDEQGELCTRGYLVMKGYYKMDEATKKAIDEDGWLHTGDLAEMDRDGYVRITGRLKDMIVRGGENIYPREIEEFLYEHEDIVDVQVVGVPDEKYGEKTAAFIKCRPGKKLTLEDVRDFCKGQLSYYKIPEYVFLIDEYPLTASGKVQKYVLRDRAAELLASPVQ

SEQ ID NO: 28262 - DNA, 1662 bp, Burkholderia mallei ATCC 23344
  CDS (1)..(1662): transl_table=11
atgacgcagaagttcgaggaggggctcggcaggcgcgaggccaactacgtgccgctcacgccgatcgatttcatcgcgcgcgcggcggaggtgtacggcgagcgcctcgccgtcgtgcacggcgagatccgccgcacgtggagcgagacctacgcgcgcgcgcgacggctcgcgagcgcgctcgagcgcgcgggcgtcgggcggggcgacaccgtcgccgcgctgctgccgaacattccggcgatgatcgaggcgcacttcggcgtgccgatggcgggcgccgtcctcaacgcgctgaacacgcggctcgacgtcgcgtcgatgctgttcatgctgcgtcacggcgaggcgaaggtgctgatcgtcgataccgagtacgcggagttcgcgcaccgcgcggcgctcgaggttccggggctcgcgatcgtcagcgtggccgacgcgatgcccgccgatcccgcgcgctttcccgcggcgctcgattacgaggcgttcctcgccggcggcgatcccgcgtacgcctggacgccgccgtccgacgaatgggaggcgatcgcgctgaattacacgtcggggacgacgggcgatccgaagggcgtcgtctaccatcatcgcggcgcgtatctcgccgcgatcagcaacctcctcgaatgggacatgccgaagcacgcggtctacctgtggacgctgccgatgttccactgcaacggctggtgctttccgtgggcggtggccgcgcgcgcgggcgtgaacgtgtgcctgcgcaagttcgacgcgaagcgcgtgctcgagctgatccgccgcgagcgtgtcacgcactacagcggcgcgccgatcgtgcagagcgcgatcgcgaacgcgccggccgaatggcgcgcggggatcgcgcacgaggtgcatgcgttcgtcgcgggcgccgcgcccgcgccggccgtgatcgcgaagatgaaggagatcggcttcgacctcacgcatgtctacgggctcaccgaagtctacgggcccgcgacggtctgcgcgaagcaggcgcactgggcgtcgctgcccgacgacgagctcgcgcagctcaacgcgcggcagggcgtgcgctaccacctgcaggcgggcgcgaccgtgcttgatcccgacacgatggcgcccgtgccggcggacggcgagacgctcggcgagatcatgttccgcggcaacctctgcatgaagggctacctgaagaacccgcacgcgaccgacgaggcgttcgcgggcggctggttccacacgggggacctcggcgtgctgacgcccgacggctacatccgcatcaaggatcgccgcaaggacatcatcatctcgggcggcgagaacatctccagcatcgaggtcgaggacgcgctgtaccggcatccggccgtcgaggtcgcggccgtcgtcgcgctgccggacccgaagtggggcgaggtgccgtgcgcgttcgtcgagctgcgcgacgggatgagcgcgaccgaggaggagatcatcgcgcactgccggctgctgctcgccgcgtacaagattccgaagacggtgcgcttcggtgagctgccgaagacatcgaccgggaagatccagaaatttcaattgcgcgcgcaggtcgggtcgagctcggcgatcgatctggtggcggcggccaggaagccagggtag

SEQ ID NO: 28263 - protein, 553 aa, Burkholderia mallei ATCC 23344
MTQKFEEGLGRREANYVPLTPIDFIARAAEVYGERLAVVHGEIRRTWSETYARARRLASALERAGVGRGDTVAALLPNIPAMIEAHFGVPMAGAVLNALNTRLDVASMLFMLRHGEAKVLIVDTEYAEFAHRAALEVPGLAIVSVADAMPADPARFPAALDYEAFLAGGDPAYAWTPPSDEWEAIALNYTSGTTGDPKGVVYHHRGAYLAAISNLLEWDMPKHAVYLWTLPMFHCNGWCFPWAVAARAGVNVCLRKFDAKRVLELIRRERVTHYSGAPIVQSAIANAPAEWRAGIAHEVHAFVAGAAPAPAVIAKMKEIGFDLTHVYGLTEVYGPATVCAKQAHWASLPDDELAQLNARQGVRYHLQAGATVLDPDTMAPVPADGETLGEIMFRGNLCMKGYLKNPHATDEAFAGGWFHTGDLGVLTPDGYIRIKDRRKDIIISGGENISSIEVEDALYRHPAVEVAAVVALPDPKWGEVPCAFVELRDGMSATEEEIIAHCRLLLAAYKIPKTVRFGELPKTSTGKIQKFQLRAQVGSSSAIDLVAAARKPG

SEQ ID NO: 28264 - DNA, 1662 bp, Burkholderia pseudomallei K96243
  CDS (1)..(1662): transl_table=11
atgacgcagaagttcgaggaggggctcggcaggcgcgaggccaactacgtgccgctcacgccgatcgatttcatcgcgcgcgcggcggaggtgtacggcgagcgcctcgccgtcgtgcacggcgagatccgccgcacgtggagcgagacctacgcgcgcgcgcgacggctcgcgagcgcgctcgagcgcgcgggcgtcgggcggggcgacaccgtcgccgcgctgctgccgaacattccggcgatgatcgaggcgcacttcggcgtgccgatggcgggcgccgtcctcaacgcgctgaacacgcggctcgacgtcgcgtcgatgctgttcatgctgcgtcacggcgaggcgaaggtgctgatcgtcgataccgagtacgcggagttcgcgcaccgcgcggcgctcgaggtgccggggctcgcgatcgtcagcgtggccgacgcgatgcccgccgatcccgcgcgctttcccgcggcgctcgattacgaggcgttcctcgccggcggcgatcccgcgtacgcctggacgccgccgtccgacgaatgggaggcgatcgcgctgaattacacgtcggggacgacgggcgatccgaagggcgtcgtctaccatcatcgcggcgcgtatctcgccgcgatcagcaacctcctcgaatgggacatgccgaagcacgcggtctacctgtggacgctgccgatgttccactgcaacggctggtgctttccgtgggcggtggccgcgcgcgcgggcgtgaacgtgtgcctgcgcaagttcgacgcgaagcgcgtgctcgagctgatccgccgcgagcgtgtcacgcactacagcggcgcgccgatcgtgcagagcgcgatcgcgaacgcgccggccgaatggcgcgcggggatcgcgcacgaggtgcatgcgttcgtcgcgggcgccgcgcccgcgccggccgtgatcgcgaagatgaaggagatcggcttcgacctcacgcatgtctacgggctcaccgaagtctacgggcccgcgacggtctgcgcgaagcaggcgcactgggcgtcgctgcccgacgacgagctcgcgcagctcaacgcgcggcagggcgtgcgctaccacctgcaggcgggcgcgaccgtgctcgatcccgacacgatggcgcccgtgccggcggacggcgagacgctcggcgagatcatgtttcgcggcaacctctgcatgaagggctacctgaagaacccgcacgcgaccgacgaggcgttcgcgggcggctggttccacacgggggacctcggcgtgctgacgcccgacggctacatccgcatcaaggatcgccgcaaggacatcatcatctcgggcggcgagaacatctccagcatcgaggtcgaggacgcgctgtaccggcatccggccgtcgcggtcgcggccgtcgtcgcgctgccggacccgaagtggggcgaggtgccgtgcgcgttcgtcgagctgcgcgacgggatgagcgcgaccgaggaggagatcatcgcgcactgccggctgctgctcgccgcgtacaagattccgaagacggtgcgcttcggcgagctgccgaagacatcgaccgggaagatccagaaatttcaattgcgcgcgcaggtcgggtcgagctcggcgatcgatctggtggcggcggccaggaagccagggtag

SEQ ID NO: 28265 - protein, 553 aa, Burkholderia pseudomallei K96243
MTQKFEEGLGRREANYVPLTPIDFIARAAEVYGERLAVVHGEIRRTWSETYARARRLASALERAGVGRGDTVAALLPNIPAMIEAHFGVPMAGAVLNALNTRLDVASMLFMLRHGEAKVLIVDTEYAEFAHRAALEVPGLAIVSVADAMPADPARFPAALDYEAFLAGGDPAYAWTPPSDEWEAIALNYTSGTTGDPKGVVYHHRGAYLAAISNLLEWDMPKHAVYLWTLPMFHCNGWCFPWAVAARAGVNVCLRKFDAKRVLELIRRERVTHYSGAPIVQSAIANAPAEWRAGIAHEVHAFVAGAAPAPAVIAKMKEIGFDLTHVYGLTEVYGPATVCAKQAHWASLPDDELAQLNARQGVRYHLQAGATVLDPDTMAPVPADGETLGEIMFRGNLCMKGYLKNPHATDEAFAGGWFHTGDLGVLTPDGYIRIKDRRKDIIISGGENISSIEVEDALYRHPAVAVAAVVALPDPKWGEVPCAFVELRDGMSATEEEIIAHCRLLLAAYKIPKTVRFGELPKTSTGKIQKFQLRAQVGSSSAIDLVAAARKPG

SEQ ID NO: 28266 - DNA, 1641 bp, Azoarcus sp. EbN1
  CDS (1)..(1641): transl_table=11
ttgtcgaatagcccgtatgcccaaggtctggcaaagaacaccgcgaactacgtcccgctgtcgccgctgagcttcatcgaacgcacggcccaggtgtacccgcagcgcaccgcggtgatccacggcgcctgtcgcttcacctggcaggaaacctatgcgcgctgccgccgtctcgcgagcgcgctggtgcagcacggcgtcggctgcggcgatacggtcgcggtgatgctgccgaacgtcccggcgatgttcgaagcgcacttcggcgtgccgatgatcggcgcggtgctcaacaccctgaacacccgcctcgacccggaagccatcgccttcatgctcgcgcacggcgaagcgaaagtgctgatcaccgaccccgagttcgcgtcgctcgtcggaccggcgctggagcggctcgacgggccgaagccgctcgtcatcgatgccctcgacgacgaatacccgggcagcgaccggctcggcgcgatcgagtacgaagaattcctcgccgccggtgaccccgagttcgcgtggagcctgccgcccgacgaatgggatgcgatcgcgctgaactacacgtccggcaccaccggcaacccgaagggcgtcgtctatcaccaccgcggcgcgtacctcaacgcggcatcgaacatcatcagctggggcatgccgcagcacgcggtgtatctgtggacgctgccgatgttccactgcaacggctggtgcttcccgtggacgatggccgccaacgccggcatcaacgtgtgcctgcgcaagatcgatgtcgcgctgatctacgagctgatccgcacgcacaaggtgagccatttctgcggcgcaccgatcgtgcatggcatgctgatcaacgcgcccgaaggcatgcgcgacggcatcacgcacaaggtctcggcgctgatcgccggcgctgcgccaccggccgcgatcatcgaaggcatggagcgcatcggcttcgacatcactcacgtctatgggctgaccgagacctatggcccggcctcggtatgcgcgaagcatccgtcgtgggacgagttgccgatcgaccgccgcgccgagcgcaacggccgccagggcgtgcgttaccacatgcaggaagcgatcgcggtgctcgacccggaaacgatggtgccggtgccggccgacggcgagacgatgggcgagatcatgttccgcggcaacctcgtcatgaaaggctacctgaagaacgagaaggcgagcgacgaagctttcgccggaggctggttccacaccggcgacctcgcggtgatgcacccggacggctacgtcaagatcaaggaccgctccaaggacgtcatcatctcgggcggcgagaacatctcgtccctcgaagtcgaggaagcgctgtaccgccacccggcagtgatgacggccgcggtcgtcgcgaagcccgacgagaagtggggcgaagtgccggcggcgtacatcgaggtcaaggacggcacagcggtcaccgtcgacgacatcatcgcccactgccgcgagcacctcgcccgctacaaggtgcccaagcatatcgagttctgcgtgctgccgaagacctcgaccggcaagatccagaaattcgtgctgcgcgagcaggccaaatcagccctggcgatcgactga

SEQ ID NO: 28267 - protein, 546 aa, Azoarcus sp. EbN1
MSNSPYAQGLAKNTANYVPLSPLSFIERTAQVYPQRTAVIHGACRFTWQETYARCRRLASALVQHGVGCGDTVAVMLPNVPAMFEAHFGVPMIGAVLNTLNTRLDPEAIAFMLAHGEAKVLITDPEFASLVGPALERLDGPKPLVIDALDDEYPGSDRLGAIEYEEFLAAGDPEFAWSLPPDEWDAIALNYTSGTTGNPKGVVYHHRGAYLNAASNIISWGMPQHAVYLWTLPMFHCNGWCFPWTMAANAGINVCLRKIDVALIYELIRTHKVSHFCGAPIVHGMLINAPEGMRDGITHKVSALIAGAAPPAAIIEGMERIGFDITHVYGLTETYGPASVCAKHPSWDELPIDRRAERNGRQGVRYHMQEAIAVLDPETMVPVPADGETMGEIMFRGNLVMKGYLKNEKASDEAFAGGWFHTGDLAVMHPDGYVKIKDRSKDVIISGGENISSLEVEEALYRHPAVMTAAVVAKPDEKWGEVPAAYIEVKDGTAVTVDDIIAHCREHLARYKVPKHIEFCVLPKTSTGKIQKFVLREQAKSALAID

SEQ ID NO: 28268 - DNA, 1653 bp, Azoarcus sp. EbN1
  CDS (1)..(1653): transl_table=11
atgaccgaacgcgaatcgtcaccctacgagattggtctggagaagaatgccgccaattacgtcccgctcacgccgctgacgttcatcgagcgcagcgcctacgtttatccggaccggatcgccgtcatccacggcgcacgtcgctacacgtggctggaaagctatacgcgcagccgtcgtctggcatcggcgctgaagcaactcggcgtcgggaagaacgatactgtcgcggtcgtcctcaacaacactccggaaatgttcgaatgccatttcggtgtcccggcgacgggtgcggtgctcaacacgatcaacacgcgcctcgagcccgaaaccgtcgcgttcatgctcaaccatgccgaagcgaaggtgctgatcacggaccgcgagttcgcccgggtcatggcgaaggcaattgaactcgcgaaccggccggacctgatcgtcatcgatgtcgatgacccggaatacagcgggccgggcgaccgcgtcggcacgctcgaatacgaggcgctgctcgagacgggcagccccgatttcgccttcgaacagcctgccgacgaatgggacgcgatttcgctgaactacacgtccggcacgaccggcaatccgaaaggcgtcgtctatcatcaccgcggcgcgtacctcaatgcgatgagcaacatcgtcagctggggcatgccgccgcattcggtgtacctgtggacgttgccgatgttccactgcaacggctggtgcttcgcgtggacgatggcggccaacgccggcaccaacgtctgtctgcgccgcgtcgatccgcgcctgatcttcgaagcgatccgcgagcatggcgtcacgcactattgcggcgcaccgatcgtccattcgatgctcgcgaacgcgcccgaatcctggcgcgaaggcatcgatcacaagatgtatggccttgtcgccgcggcgccgccgcctgccgcggtgatcgaagggatggcgaaaatcggcatcgacctgactcacgtgtacggcctcaccgaaacctacggccccgccgcagtctgcgcgaaacatgacgagtggaaggatctcccgctcgccgagcagatcgcactgaacgggcgccagggcgtgcgctaccacgcgcaagagggcatcacggtgctggatccgcagacgatggagccggtgccctgggacaaccagacgatgggcgagatcatgttccgcggcaacctcgtgatgaaggggtatctgaagaaccccgacgcgaccgaggagtcgtttcgcggcggctggtaccacactggcgacctggcggtgatgcaggccgacggctacgtcaagatcaaggaccgctcgaaggacgtgatcatctccgggggcgagaacatctcgtcgatcgaagtcgaggacgcgctgtacaagcacccggccgtgatggcggcagcggtcgtcgcgctgcccgatccgaagtggggcgaagtgccggcagctttcgtcgagctgcgcgaagggacgacggtgaccgaagcagagctggtcgcgcactgccgcgagcatctcgccggcttcaagtcgccgaagaaaatcatcttcgggccgttgccgaagacttcgaccggcaagatccagaagttcgtgctgcgtgagcaggcgaaatcgactcagtccttcgaataa

SEQ ID NO: 28269 - protein, 550 aa, Azoarcus sp. EbN1
MTERESSPYEIGLEKNAANYVPLTPLTFIERSAYVYPDRIAVIHGARRYTWLESYTRSRRLASALKQLGVGKNDTVAVVLNNTPEMFECHFGVPATGAVLNTINTRLEPETVAFMLNHAEAKVLITDREFARVMAKAIELANRPDLIVIDVDDPEYSGPGDRVGTLEYEALLETGSPDFAFEQPADEWDAISLNYTSGTTGNPKGVVYHHRGAYLNAMSNIVSWGMPPHSVYLWTLPMFHCNGWCFAWTMAANAGTNVCLRRVDPRLIFEAIREHGVTHYCGAPIVHSMLANAPESWREGIDHKMYGLVAAAPPPAAVIEGMAKIGIDLTHVYGLTETYGPAAVCAKHDEWKDLPLAEQIALNGRQGVRYHAQEGITVLDPQTMEPVPWDNQTMGEIMFRGNLVMKGYLKNPDATEESFRGGWYHTGDLAVMQADGYVKIKDRSKDVIISGGENISSIEVEDALYKHPAVMAAAVVALPDPKWGEVPAAFVELREGTTVTEAELVAHCREHLAGFKSPKKIIFGPLPKTSTGKIQKFVLREQAKSTQSFE

SEQ ID NO: 28270 - DNA, 1629 bp, Silicibacter pomeroyi DSS-3
  CDS (1)..(1629): transl_table=11
atgaccggcagcactatctatgaccagcatctggaccggacgccggccaatttcacgcccctctcgccgctcagctatatcgagcggaccgcggcggtctaccccgactatccttccgtcgtttatggcgatcgtcgctatacctgggccgaaacctatacgcgctgccgacggctggcgagtgctctggccgggcgcggcctgggcaagggcgataccgtttcgatcatcgccgccaatatccccgaaatgtacgaggcgcatttcggcgtgccgatggcgggggcggtgctgaacgcgatcaacactcggctggatgcgcccatcatcgccttcatcctgtcccatgccgaggccagggtactgatcgtcgaccccgaattttccgaggtggtgcgcgacgccttggcacagatcgaccggcccgacctgttggtcgtggatatcgaggacccaagctttgccggcggcgcgccggtgggcacgctgagctatgatgcgcttttggcagagggagacccggatttcgactggtcgctgccgggggacgaatgggatgccatcgcgctcaactatacctcgggcaccacgggcaaccccaagggtgtggtctatcaccatcgcggcgcggcgctgaacgcgacctcgaacatcctgacctggggcatgccgcaacacgcggtctatctgtggacgctgccgatgtttcactgcaacggctggtgtttcccctggaccatggcggccaatgccggggtatcggtctgcctgcgtgcggtgcgcgacgagccgatctatcgcgccttccgcgaggagaaggtgacccatttctgcggcgcgcccatcgtgctgaacatgctggccaacgcgcccgatcacatgaaggactttgaccatcagatcaaggtgatgaccgcaggcgcgccgccgccggctgcggtgatcgagaagatggaggcgatgggcgtcgacgtcacccatgtctatgggctgaccgagacctatggcccctcggtggtctgtgcctggaaagaggagtgggatggtcggcccggggccgagcgcgcggcgctgaaggtgcgccagggggtgcgttatgtggcgctgtcggggctgatggtggccgatcccgaaacgcttgagccggtgcccgccgatggcgagacgatgggcgagatcttcatgcagggcaatatcgtcatgaagggctatctgaagaaccccgatgccaccgacagggcgtttcgcggcggctggttcgcctcgggcgatctgggggtgatgcatcccgatggctatatcgcgctcaaggaccggtccaaggatatcattatctcggggggcgagaacatctcgtcggtcgaggtcgaggatgtgctctataaacatcccgcagtgatggaggcggcggtggtggcgcgcccggacgagaaatggggcgagacaccctgcgcctttgtcgagctgaagccggggcaatcggtggaggccgccgacctgatcgcgcattgccgggcgaacatggcacatttcaaggcacccaagacggtggtgtttggcgaattgcccaagacctcgaccggcaagatacagaaattcctgctgcgcgagcgtgcccgcgcgctctga

SEQ ID NO: 28271 - protein, 542 aa, Silicibacter pomeroyi DSS-3
MTGSTIYDQHLDRTPANFTPLSPLSYIERTAAVYPDYPSVVYGDRRYTWAETYTRCRRLASALAGRGLGKGDTVSIIAANIPEMYEAHFGVPMAGAVLNAINTRLDAPIIAFILSHAEARVLIVDPEFSEVVRDALAQIDRPDLLVVDIEDPSFAGGAPVGTLSYDALLAEGDPDFDWSLPGDEWDAIALNYTSGTTGNPKGVVYHHRGAALNATSNILTWGMPQHAVYLWTLPMFHCNGWCFPWTMAANAGVSVCLRAVRDEPIYRAFREEKVTHFCGAPIVLNMLANAPDHMKDFDHQIKVMTAGAPPPAAVIEKMEAMGVDVTHVYGLTETYGPSVVCAWKEEWDGRPGAERAALKVRQGVRYVALSGLMVADPETLEPVPADGETMGEIFMQGNIVMKGYLKNPDATDRAFRGGWFASGDLGVMHPDGYIALKDRSKDIIISGGENISSVEVEDVLYKHPAVMEAAVVARPDEKWGETPCAFVELKPGQSVEAADLIAHCRANMAHFKAPKTVVFGELPKTSTGKIQKFLLRERARAL

SEQ ID NO: 28272 - DNA, 1611 bp, Bacillus clausii KSM-K16
  CDS (1)..(1611): transl_table=11
atgatgaacacgcctttaacgatttcgtcgatgttggaacgggcagagcgctattttccaaacaaaacagtggtatcacgaacgcatgacaacatctaccggtatacgtatgaggaaatcggcaaacgcacaagagcacttgcgagcgcattgacgaaactagggttaaaacggggggaacgggtggggacgatcgcttggaaccaccatcgccatttggaagcatattttgctgcacctggtatagggagcgtcctccacatgattaatatgcgtttgccgcctgatcatctcgcctttgtgattaaccatgcaagcgaccggattttgctgattgatgaagatgtgctgccgctcgtagaagcgatttggcctcaactggagacggtgcatacgtttgtagtgatgactgacaaagatcagttgccttcgtccacactggaaccgctctattcttatgaagcgttgcttgcagagggggatgactgttttgcgttttacgatgacattgatgaaaatgaacaggcagcgatgtgttacacatcggcaacaacggggatgcctaaaggggtcgagtattcccatcgtggcattgttcttcatagtttagtgcaggggcatgtagacacgacggcaattagcgaaaatgacgtgtgcatgcccgtagtgccaatgtttcatgtaaatgcttggggcttgccgtttagtgctacgttctatggagcgacacaagtgttgccaggtccagcatttacccctcagctccttgctgagttgatcgaaaaagaacgggttacctttaccggcggcgtgccgactgtctggctcggcctcttgcaagtacttgaacatcatcattatgatttaagcagcttgcgtgctgtcatttgtggtggttctgcggcaccgcaaagcatgatcgagcgatttgaacgtaagttgaacgtcccgttttaccatgcctatggcttaacggaaacggccccgctcgtatcgttttcccgtttaaaaagccaccagaaaaaggggggcaaaggcgagcaatatcaagcgaaggcaaaacaaggaatggccgttccgttaatcgacatcaaaggcgtgaacgccaatggggagatcccttggaatggagaagaaatgggcgagttgctcatccgaggcccttgggttgccgaccgttattttcacgatgaacggagtacagaagcattcaaagacggttggttccatactggagatgtagtcacgattgacgaggagggagccattaagatcgttgatcgcacgaaggatttaatcaaaagtggcggggaatggatctcttccgttgatttggaaaatgcgattatgtctcacgaagctgtactcgaagcagcagtggtcgctgtgccccatgataagtggcaagaacgcccagtcgcttgcgttgtattaaaaaaagacaaacaggcgactaaagaagaaattgtcgactacttgaaaccacaatttgccaaatggtggctgcctgacgaagtcgtcttcatggaggcattgccgaaaacatcggtcggcaaatttctaaaacgtgctttgcggaaggaactgttcaatcaaagccgttttttatag

SEQ ID NO: 28273 - protein, 536 aa, Bacillus clausii KSM-K16
MMNTPLTISSMLERAERYFPNKTVVSRTHDNIYRYTYEEIGKRTRALASALTKLGLKRGERVGTIAWNHHRHLEAYFAAPGIGSVLHMINMRLPPDHLAFVINHASDRILLIDEDVLPLVEAIWPQLETVHTFVVMTDKDQLPSSTLEPLYSYEALLAEGDDCFAFYDDIDENEQAAMCYTSATTGMPKGVEYSHRGIVLHSLVQGHVDTTAISENDVCMPVVPMFHVNAWGLPFSATFYGATQVLPGPAFTPQLLAELIEKERVTFTGGVPTVWLGLLQVLEHHHYDLSSLRAVICGGSAAPQSMIERFERKLNVPFYHAYGLTETAPLVSFSRLKSHQKKGGKGEQYQAKAKQGMAVPLIDIKGVNANGEIPWNGEEMGELLIRGPWVADRYFHDERSTEAFKDGWFHTGDVVTIDEEGAIKIVDRTKDLIKSGGEWISSVDLENAIMSHEAVLEAAVVAVPHDKWQERPVACVVLKKDKQATKEEIVDYLKPQFAKWWLPDEVVFMEALPKTSVGKFLKRALRKELFNQSRFL

SEQ ID NO: 28274 - DNA, 1533 bp, Corynebacterium glutamicum ATCC 13032
  CDS (1)..(1533): transl_table=11
gtgaacctcggaataggaagctacccacgacgcagggcaactgttcgaccagagtccactgcaatcgaattcgaaggcaccagcatcacctacggagaattcagcaaacgagtcaatcggcttggacatgctcttctagacctcggcgttgcgcaccaagatcgagtagcttatgtcggattcaaccaccctgccctgctagaagtgttcttttcaacgaacctcattggggcaacacccgtgcttgttaaccctcgcctatcggcaaacgaaatcgattacatcatccaagacagcggtgcgagcatcgtgttttacggaatcgacctcatcgagcacgccacttacctccaagaactccatccagagatcatcatggtggccgttgaaggcgatgagggtccaggtttgcgtcgaaaagcgcttattgaagcggcgagcgacgccgacatcgacctagaagtcagcgatgatgacatcgcgctgctcatgtacacctccggaaccactggccgcccaaagggcgccatgttatcccaccgaaacctcttctttaactacttcaatgccctgctcagccaggaaattgaacaaggcgcggtacttttatccactgcgccgttattccacatcgcgggcctcaacatgaccaccatcccggtgatgatgaagggcggaaaggtgatcatccaccgcgaattccgggcagagcacgtcctcgacgaaatcgaacgctccaaggtatccgaatccttcatggtgccagcgatgatcgacatgttgtccaaccacccatcatttgccgaacgcgacctttcttcccttcgcgccatcatggtgggcggctctccccttagcgaacgtgcgctgcgaatctggcaaggacgcgacgtaaaaattgtccaaggcttcggcatgacagaaaccgcaccgggcgcctgtatcctcgaggcaacagacacaagcacacaccttggaaccgcaggtcgagcccacttcttcaccgacatcaaactagtggacccgaaaaccggcgaagaagtccccaccggagaggccggcgaagttctcatccgcggaccacatgtgatgaccggatactggaaccgaccagaagacaccgccagcgcactacaaaatggctggtaccactccggagatatcgccatcaaagatgaagacggctactacaccatcaaagaccgcatcaaagacatgtacatctccggcggcgaaaacatttaccccgcagaagtcgaacaagcactccaggaactggaagcagtccttgatgccgcagtcatcggagtccccgatgaacgatggggcgaaactggcatcgcctttgtctccatccgagaaagctacctgaccaacccaccaaccggaccggaactacgagaactactaggcagtgtcctagccagatacaaacttccacgagaaatccacatcatcgaagaactcccccgcaacgccacaggcaaaatccaaaagaacatcctgcgagacttcaccatccccgtttcataa

SEQ ID NO: 28275 - protein, 510 aa, Corynebacterium glutamicum ATCC 13032
MNLGIGSYPRRRATVRPESTAIEFEGTSITYGEFSKRVNRLGHALLDLGVAHQDRVAYVGFNHPALLEVFFSTNLIGATPVLVNPRLSANEIDYIIQDSGASIVFYGIDLIEHATYLQELHPEIIMVAVEGDEGPGLRRKALIEAASDADIDLEVSDDDIALLMYTSGTTGRPKGAMLSHRNLFFNYFNALLSQEIEQGAVLLSTAPLFHIAGLNMTTIPVMMKGGKVIIHREFRAEHVLDEIERSKVSESFMVPAMIDMLSNHPSFAERDLSSLRAIMVGGSPLSERALRIWQGRDVKIVQGFGMTETAPGACILEATDTSTHLGTAGRAHFFTDIKLVDPKTGEEVPTGEAGEVLIRGPHVMTGYWNRPEDTASALQNGWYHSGDIAIKDEDGYYTIKDRIKDMYISGGENIYPAEVEQALQELEAVLDAAVIGVPDERWGETGIAFVSIRESYLTNPPTGPELRELLGSVLARYKLPREIHIIEELPRNATGKIQKNILRDFTIPVS

SEQ ID NO: 28276 - DNA, 1728 bp, Corynebacterium glutamicum ATCC 13032
  CDS (1)..(1728): transl_table=11
atgctcagcacgatgcaggacgtcccactgtcattaaccagaatcctcgagtacgggtccactgttcacggtgatactttgatcaccacgtggggcggtgccgatggcattgaacaagcacagcaaacttttagtgctgtgggggctagagctgcggctttggctcatgcgctgcatgattctttaggtattactggggatcagcgagtggcgtcgatgctctataactgcgcggaacacatggaaactatgtttgcagtcgcatgcatgggtgccgtgtttaatccgctgaacaagcagttgatgaatgatcagattgtgttcattctcaatcactctgaagctgaagtggttatcgctgatccgcgcatggctgaacaattgggtgagatcttaaaagaaacaccaaaagttcgtgccgtggtgtttattggaccgaatgatttctctagcgcggcggcccacatgccggagggaatgaagctgtattcctatgaagcgctccttgacggccgttccactgtttacaactggcccgagcaggatgaacgcactgctgctgcaatttgctattccaccggtacatcgggaccgccgaagggtgtggtgtattcccaccgctcgctttatttacagtcgttgagcttgcgcaccacggattccctcgcagtggaacacggcgaaacgttcctgtgctgtgtgccgatttaccacgtcctcagctggggcgtgccgatcgcagcgtttatgtccggcactcccctggtgcttcctggaccggatctttctgcgccgacattggcaaagatcatttccaccacgctgcctcgcgtggcgcatggcgtgcctactctctggattcagctgatggttcactacctgaaaaatcccccagagcgtatgtctctgcgtgagctatacgtgggcggttctgcggtgcctccaatcgtgatcaccatgtgggagcagcgctatggcgtggatgttgtccacgtgtggggtatgacggaaacctccaccgtgggtactgtgtctcgcccaccatcaggtgtttctggtgaaagccggtggaattatcgagtctcccagggccgattccccgcctccctgcagtaccgcattgtcaacgacggccaggtcatggcgtccaccgaccgcaacgagggcgagattcaggtccgcggtccgtgggtgactgcaagttacttccaccccgatgtggaaaaagaaggtggcaccgcctcaacattccgcgaccatgacgttgaagaggaaaacgatgagctcttcaccgccgacggctggctgcgcaccggggacgttggatctgtcaccagcgatggattcctcaccatccaagaccgcgcccgcgatgtcatccgttctggcggcgagtggatttactccgctcagctggaaaacctcatcgtggctacggaagaggttgtcgaatgcgccgtcattggcttccccgatgacaagtgggtggaacgtcccctcgcagtcaccatgctctaccccggcattgaacgcacccgggaaaccgccgagcgcctccgcgatcaacttcgcgaccgcctacccaactggatgctgccagaatattggacatttgttgatgaggtggataaaacctccgtcggtaaatatgacaagaaggacctccgcaaccacctgcgcaacggcgatttcgaagtaattaagcttaaagggccaggtgaaaaataa

SEQ ID NO: 28277 - protein, 575 aa, Corynebacterium glutamicum ATCC 13032
MLSTMQDVPLSLTRILEYGSTVHGDTLITTWGGADGIEQAQQTFSAVGARAAALAHALHDSLGITGDQRVASMLYNCAEHMETMFAVACMGAVFNPLNKQLMNDQIVFILNHSEAEVVIADPRMAEQLGEILKETPKVRAVVFIGPNDFSSAAAHMPEGMKLYSYEALLDGRSTVYNWPEQDERTAAAICYSTGTSGPPKGVVYSHRSLYLQSLSLRTTDSLAVEHGETFLCCVPIYHVLSWGVPIAAFMSGTPLVLPGPDLSAPTLAKIISTTLPRVAHGVPTLWIQLMVHYLKNPPERMSLRELYVGGSAVPPIVITMWEQRYGVDVVHVWGMTETSTVGTVSRPPSGVSGESRWNYRVSQGRFPASLQYRIVNDGQVMASTDRNEGEIQVRGPWVTASYFHPDVEKEGGTASTFRDHDVEEENDELFTADGWLRTGDVGSVTSDGFLTIQDRARDVIRSGGEWIYSAQLENLIVATEEVVECAVIGFPDDKWVERPLAVTMLYPGIERTRETAERLRDQLRDRLPNWMLPEYWTFVDEVDKTSVGKYDKKDLRNHLRNGDFEVIKLKGPGEK

SEQ ID NO: 28278 - DNA, 1800 bp, Pseudomonas fluorescens Pf-5
  CDS (1)..(1800): transl_table=11
gtgtgctgcgtacctgtaagcaacgccgaacgtaggagctggcttgccagcgaagaggcccgtgggatcgctttcgccggcaagccggctcctacagtcagtgcccccaggtacacagcacacgccacccaagcctcggccaatagagctaataatcagccaccgggtacccgaaccatgtccatctacgagcaaggcctggcgccgactgccgtcaaccatatcgccctctcccccttgagcttcatcgagcgtaccgctgcggtttaccccgattacccggcggtgatccacggttcgatccgtcgcacctgggcccagacctacagccgctgccggcgcctggcctcggccctggccgggcgcggcatcggcaagaacgacacggtggcggtgatgctgcccaacatcccggcaatgctcgaagcacacttcggcgtgccgatgatcggcgccgtgctcaatgccctcaatgtgcgcctggacgccgaggccatcgccttcatgctggcccacggcgaagccaaggtgctgatcgccgaccgcgagttccatgaggtgatccacgccgccgtggccatgctcgatcacccgcccctggtgatcgacctcgacgacccggaatacggcgaaggccagccggtcagcgatctggattacgaggcctttctcgccgagggcgatcccgagtttgcctggcagtggccggatgacgagtggcaggccatcgccctgaactacacctcgggcaccaccggcaaccccaagggcgtggtctatcaccaccgcggcgcctacctcaatgccctgggcaaccagatgacctgggccatgggcaaccacccggtgtacctgtggaccctgccaatgttccactgcaacggctggtgctacccctggaccgtcaccgccctggccggagtgcatgtgtttttgcgccgggtcgacccgcagaagatcctcgacctgatccgcgagcatcaggtcacgcacctgtgcggcgcgcccatcgtgctcaatgccctggtgaacatgcccgacaccgccaaggcggccatcgaccacccggtcaacgccatggtggccggggccgcgccgccggccaaggtgatcggcgcagtggaggaaatgggcatcaaggtgacccacgtctacggcctgaccgaggtctatggcccggtgaccctgtgcgcctggcacgccgcctgggatgaactgcccctggaacagcgggcgcagatcaagtcgcgccagggcgtgcgctacccgaccctggaaggggtgatggtggccgacccgaaaaccctcgaacccacgccccgggacggccagaccatcggcgagatcttcatgcgcggcaacaccgtgatgaagggctacctgaagaaccccacggccaccgccgaagccttcgagggcggctggttccacaccggcgacctgggggtaacccacccggacggctacgtggagatccgcgaccggctcaaggacatcatcatttccggcggcgagaacatttccaccatcgaactggaaggcgtgctctatcgccacccggcggtgctggaagcggcggtggtggcccggcccgatgaaaaatggggtgagacgccctgtgccttcatcaccctcaaggccgatcatcaggacgtgcgcgaagccgagatcatcgccttctgtcgcgaacacctggcaggcttcaaggtgccgcgtaccgtggtcttcagcccgttgcccaagacctccaccggcaagatccagaagttcgtcctgcgcgacatggcgaaaaacctctag

SEQ ID NO: 28279 - protein, 599 aa, Pseudomonas fluorescens Pf-5
MCCVPVSNAERRSWLASEEARGIAFAGKPAPTVSAPRYTAHATQASANRANNQPPGTRTMSIYEQGLAPTAVNHIALSPLSFIERTAAVYPDYPAVIHGSIRRTWAQTYSRCRRLASALAGRGIGKNDTVAVMLPNIPAMLEAHFGVPMIGAVLNALNVRLDAEAIAFMLAHGEAKVLIADREFHEVIHAAVAMLDHPPLVIDLDDPEYGEGQPVSDLDYEAFLAEGDPEFAWQWPDDEWQAIALNYTSGTTGNPKGVVYHHRGAYLNALGNQMTWAMGNHPVYLWTLPMFHCNGWCYPWTVTALAGVHVFLRRVDPQKILDLIREHQVTHLCGAPIVLNALVNMPDTAKAAIDHPVNAMVAGAAPPAKVIGAVEEMGIKVTHVYGLTEVYGPVTLCAWHAAWDELPLEQRAQIKSRQGVRYPTLEGVMVADPKTLEPTPRDGQTIGEIFMRGNTVMKGYLKNPTATAEAFEGGWFHTGDLGVTHPDGYVEIRDRLKDIIISGGENISTIELEGVLYRHPAVLEAAVVARPDEKWGETPCAFITLKADHQDVREAEIIAFCREHLAGFKVPRTVVFSPLPKTSTGKIQKFVLRDMAKNL

SEQ ID NO: 28280 - DNA, 1665 bp, Psychrobacter arcticus 273-4
  CDS (1)..(1665): transl_table=11
atgaccgactttcacacaggtctcggcaaaaatgctgctaaccatcaaccgcttacccctattgacttcatcattcgtagcgctcaggtctatcctgacagaacggctatcatctatgacgacctagaacataataatctcacgcaaacgtggcaacagacttacgatcgttgcagacaactggctgatggtctacgtaaattgggtgttgataaaaatgacacggttgcggtcatgatgccgaatacgccagcaatggtcgaatgtgcctttggggtgcccatgtcaggtggcgtgctatgtacgttaaacactcgtctcgatatcaatgcgctcagcttttgcttacaacactcagaagccaaagtattgattttagacagcgagtttgctgagcatgctgagatgatcgacgaaacgtttcccaaccttatcgttattcatgcgacagatgcagcggtcgatatcgagcgttttggacaaatgagttatgaagaattaatcgccagcgctgatagtttggataattgggaaaaaccaacagatgaatgggatgcaattgctctgaactatacgtctggcaccactggtaagcccaaaggtgtggtttatcatcaccgcggtgcgacacttaatgccgtgtccaatattttagattgggatatgccaaagcacccaatgtatctatggacgctgccattatttcattgtaatggttggtgttttccttggacgatcgctgagcgagctggtgtcaacgtctgcttgcgcaagattgacgctgatttgattttgcagctgattgccaaacataaagtctcacattattgctcagcgcctgtggtgcataatatgattgccggtggcaagcctgaatacaaagaagccatcaatcatgaagttaagggctgggtcgctggtgcgccgccgtctgaaaccatgctggcagccatggaagccatgggctttcatatctctcatgtttatggtctcaccgaagtttacggacctgtcaccatctgcgctgagcaacaagaatgggctacgcttgatgtcgctgggcgcgcgcagaaaaaatcacgtcaaggcgtgacctcacatttgatgagcggatttgagctgtttaaacaaggtaccactgaaccggttgccgctgatggtaaagaaatgggcgagctggcactgcgcggcaatatggtgatgaaaggttatctaaaaagccgtaaggccaccgaagaagcctttactgatggttggttccgcaccggtgatttgggtgttaaatatcctgacggctatatcaaaatcatggacaggcttaaagacatcatcatctcaggtggcgaaaacatctctagtatcgaagtcgaaaacgtcctatataaaatgccagaaatccaaagctgtgctgtagtcgctgcgccgcatgataaatggggtgaagtaccggtggcatttatcgagattcatgctggcagcactttacagcgcgataatgtgatggcgcattgtaaacagcaccttgctagttttaaaatgcctaaatatattatttttgctgaaatcccaaagaccagcaccggtaaggtacaaaagtttgaactgcgccaagcggccaaatccttggcacacgaaacgcctaaagtaacggcaagtgccaagtag

SEQ ID NO: 28281 - protein, 554 aa, Psychrobacter arcticus 273-4
MTDFHTGLGKNAANHQPLTPIDFIIRSAQVYPDRTAIIYDDLEHNNLTQTWQQTYDRCRQLADGLRKLGVDKNDTVAVMMPNTPAMVECAFGVPMSGGVLCTLNTRLDINALSFCLQHSEAKVLILDSEFAEHAEMIDETFPNLIVIHATDAAVDIERFGQMSYEELIASADSLDNWEKPTDEWDAIALNYTSGTTGKPKGVVYHHRGATLNAVSNILDWDMPKHPMYLWTLPLFHCNGWCFPWTIAERAGVNVCLRKIDADLILQLIAKHKVSHYCSAPVVHNMIAGGKPEYKEAINHEVKGWVAGAPPSETMLAAMEAMGFHISHVYGLTEVYGPVTICAEQQEWATLDVAGRAQKKSRQGVTSHLMSGFELFKQGTTEPVAADGKEMGELALRGNMVMKGYLKSRKATEEAFTDGWFRTGDLGVKYPDGYIKIMDRLKDIIISGGENISSIEVENVLYKMPEIQSCAVVAAPHDKWGEVPVAFIEIHAGSTLQRDNVMAHCKQHLASFKMPKYIIFAEIPKTSTGKVQKFELRQAAKSLAHETPKVTASAK

SEQ ID NO: 28282 - DNA, 1626 bp, Colwellia psychrerythraea 34H
  CDS (1)..(1626): transl_table=11
atgactactataaacatttttgagcaatatttagagccaaacgaagctaactatatggccctgactcccatttcgtttttagagcgtgcagcctttgtttatccagacaaaacagcaaccgttaatggtgatattcgtcatacttggttagaagtttttcaacgttgttcacgctttgctagtgctttagcaaaacgaggcattggcagaggcgatacggtttcagttatagcaccaaatattagcgaacactttgaagttcacttcggtgtacctatgagcggtgcagtactcaattctattaatactcgtcttgatgctgaagctattgcttttatactagtgcatgcagaaactaaagtattaatcaccgataaagaatttagcccaatagtaaaaaaagcattgcgcatgatcccacataaacctttagtcattgatattgatgatcctaattttaacgaaggtcaattaatcggctcgttaacctatgatcagttgttagaagaaggtgatagtgactttgaatcaatacgtcctaagaatgaatgggatgctatctctttaaattatacttctggtacaaccggcgatcctaaaggcgtggtttaccactatcgtggtgcctaccttaacgccgtaagtaatgttatgtcatggagtatgggcgagcatccagtctatttatggacgttacctatgtttcattgtaacggctggtgttttccttggtcgattgcagcaactgcaggtaccagtgtaagtttacgtcatgtgcgtgcagagcctatattcaatttaattagatctgaaaaagtgggctacttttgtggtgctcctattgtattgaatatgcttaacggcgcagagccttcattaaaagccgacattaatcacccagtgaaagtaatgactgctggtgctccacctccagcttcagtgatagaaggcatggaagcgtctggtttcaaagtaactcatacctatggcttaaccgaaacttatggtccttctgttgtttgtgcctggcatgacgaatggaatgaagaaagccctgagaagcaggctaaattaaaatctcgccaaggggttcgatctccgatgcttgatcaattgatggtagccgatcctgaaactttagagcctatgccaaaagatggtgaatcagtcggtgaaatctttatgcgaggtaaccttgtgatgaagggctatctaaaaaacccttcaaccacgcaagctgcttttgatggcggttggcttcattcaggtgacatcgcggtttggcacagtgatggttatattgaaataaaagatcgctctaaagatgtcattatttcaggcggtgaaaacatttctagcgttgaagtggaagatattttgtatcgccatcccaaagttcaagaagtggcagtggtcgcgaaaaaagatgataaatggggagaaacaccttgtgcgtttattacaccaatgccaaatgtggaaataaccgaacaggaaatgatcagcttttgccgtgataatatggcgcactttaaagcaccaaaaaccataatatttggtgagttaccaaaaacatcaacgggtaaaatacaaaaatttgttttgcgtcaacaagcaaatgaataa

SEQ ID NO: 28283 - protein, 541 aa, Colwellia psychrerythraea 34H
MTTINIFEQYLEPNEANYMALTPISFLERAAFVYPDKTATVNGDIRHTWLEVFQRCSRFASALAKRGIGRGDTVSVIAPNISEHFEVHFGVPMSGAVLNSINTRLDAEAIAFILVHAETKVLITDKEFSPIVKKALRMIPHKPLVIDIDDPNFNEGQLIGSLTYDQLLEEGDSDFESIRPKNEWDAISLNYTSGTTGDPKGVVYHYRGAYLNAVSNVMSWSMGEHPVYLWTLPMFHCNGWCFPWSIAATAGTSVSLRHVRAEPIFNLIRSEKVGYFCGAPIVLNMLNGAEPSLKADINHPVKVMTAGAPPPASVIEGMEASGFKVTHTYGLTETYGPSVVCAWHDEWNEESPEKQAKLKSRQGVRSPMLDQLMVADPETLEPMPKDGESVGEIFMRGNLVMKGYLKNPSTTQAAFDGGWLHSGDIAVWHSDGYIEIKDRSKDVIISGGENISSVEVEDILYRHPKVQEVAVVAKKDDKWGETPCAFITPMPNVEITEQEMISFCRDNMAHFKAPKTIIFGELPKTSTGKIQKFVLRQQANE

SEQ ID NO: 28284 - DNA, 1638 bp, Dechloromonas aromatica RCB
  CDS (1)..(1638): transl_table=11
gtggtaaatccgtataccgttgggctggagcgtaatccggccaactatgttccgctgtcgccgctgtcgttccttgaacgctcggcattcatctatcccaagcgtatttcggttatccagggtgcccgccaatatacctggaaggaaagctacgaccgcgctcgccagctggcttcagcgctgaagagtcgtggcattggcaagggcgatacggtggccgtgatgttgccgaatacggcttcgatgttcgagtgtcacttcggcatcccgatgatcggcgccgtgctcaatacgctgaatacccgccttgacgccgaagccattgccttcatgctggcccacggcgaagccaaagtattgatcaccgatcccgagttttccaaggtggtgaagcccgcgctggaactgcttgaagggccgaagccactggtcatcgatagcctcgatcccgactacaccgaaggcgagtccctgggtgaaaaggactacgagtccttcctcaacgaaggcgagcctgactttgcctggcaactgccggaagacgagtgggatgccatcgcgctgaactacacctccggcaccaccggcaacccgaaaggtgtcgtttatcaccatcgcggcgcctacctgaattcggcgtcgaacatcatttcctggggcatgccgccgcactcggtttatctgtggacgctgccgatgttccactgcaacggctggtgcttcccatggacgctggcggccaatgccgggaccagcgtttgtctgcgccgcgtcgacccggtgctgatcttcggtctgatcaaggagcacaaggtcagtcacatgtgcggtgcgccaattgtgtacggcatgatgatcaacgcgccggaaacgctgcgcgaaggcatcgcccacaccgtcaatggcctgatcgccggtgctgcgcctccggctgccattatcgaaggcgcccagcgcatgggcttcaacattacccacgtttatggcctgaccgaaacctacggcccggcctcggtctgtgccaagcaaccggaatgggatcgtttgccgattgacctgcaggctgcccgcaacggccgtcagggtgtgcgctatcacatgcaggaagccatcgccgtgctcgatccggtttccatggagccagtgccctgggacggtgaaaccatgggcgaaatcatgttccgcggcaacctggtcatgaagggctacctgaagaacgagaaggcttccgaagaggcctttgcgggagggtggttccatactggcgacctggccgtcgtgcatagcgatggctacgtcaagatcaaggatcgctccaaggatgtgatcatctccggtggcgagaacatttcttcgctggaggtcgaggacgtgctctaccgacacccggccgtgatcgccgctgccgtggtggccaagcccgacgagaaatggggagaggtgccggcggccttcatcgaattgaagaccgatgccaagtgcaccgaagccgagatcattgagcactgccgcgctcacctggctcgcttcaaggtgcccaagcaggtggtgttcggtgaactgccgaagacctcgaccggtaaaatccagaagtacgtcctgcgtcagcacgccaattcggcgctggccatcgagtaa

SEQ ID NO: 28285 - protein, 545 aa, Dechloromonas aromatica RCB
MVNPYTVGLERNPANYVPLSPLSFLERSAFIYPKRISVIQGARQYTWKESYDRARQLASALKSRGIGKGDTVAVMLPNTASMFECHFGIPMIGAVLNTLNTRLDAEAIAFMLAHGEAKVLITDPEFSKVVKPALELLEGPKPLVIDSLDPDYTEGESLGEKDYESFLNEGEPDFAWQLPEDEWDAIALNYTSGTTGNPKGVVYHHRGAYLNSASNIISWGMPPHSVYLWTLPMFHCNGWCFPWTLAANAGTSVCLRRVDPVLIFGLIKEHKVSHMCGAPIVYGMMINAPETLREGIAHTVNGLIAGAAPPAAIIEGAQRMGFNITHVYGLTETYGPASVCAKQPEWDRLPIDLQAARNGRQGVRYHMQEAIAVLDPVSMEPVPWDGETMGEIMFRGNLVMKGYLKNEKASEEAFAGGWFHTGDLAVVHSDGYVKIKDRSKDVIISGGENISSLEVEDVLYRHPAVIAAAVVAKPDEKWGEVPAAFIELKTDAKCTEAEIIEHCRAHLARFKVPKQVVFGELPKTSTGKIQKYVLRQHANSALAIE

SEQ ID NO: 28286 - DNA, 1680 bp, Ralstonia eutropha JMP134
  CDS (1)..(1680): transl_table=11
gtgagcaagaacatttacgagatcggcctggaacgaaccaacgcaaaccatgtaccgttgacaccgttgcacttcctggatcggtgtgcggagcaatacccggacagggatgccatcattcacggccacttgacgcagtcctggagcacgaccagggaacgctgtcggcgtctggctagcgcgctggtcaagcgggggatcggcaaaggtgacaccgtgtccatcctggcccccaacactcccgcgatggtggaggctcatcatggtattccgctcagtggcgcggtcctgaatgccatcaattgtcgccttgatgccgacggggtgcgattcatcctcaggcacggcgaagccaaagtcctgtttgtggaccgcgagttttccgcgctggcggcggcggcgatcgatggactggatagccctccgctggttattgatatcctcgaccccctggctccggcgggagagttgattggcgagttcgaatacgagcagttccttcaacaaggcgatccggcttttccgggtctctatcccgaggatgaatgggacgccatcgccctgaactacacctcgggcacaacctccgaccccaaaggcgttgttcccagccatcgcggcgcgtacctgatgagtctgctgcagcttaccgactggggaatgccgcgcggcccgaagtatctctggacgctaccgctgttccacgcgaacggatggtgcttcgcctgggcggtcaccgcggcagcgggtacccatgtgtgcctgcgaaaggtgaacgccgcaaacatcttccacgccattgaagcgcacagcgtggaccacttctgcgcagcgccaatcgtgctggcttctctggctaccgcaaccgattacgagcgtcgctcgttctcacatcctgtgcgtattcgtactgccggatcgcctcctccggccagtgttctcaaggctgtgagcgaactcggatttgacgtcgagcatgtgtacgggattacggaggcctcgggcacgcccgtcagttcgtttgtgaacccggcatggaacgacatgtcgtcggacgaaaaggctcgcttgatggcgcgccaaggcaatcgtgcggccgcgctggaaggactatatgtcgcggatcctgacacgatgagtgctgtgccgcgggacggcaagactcagggcgaactcatgctacgtggcaatatcgtgatgaaggggtacctgaagaaccccgaagccacccagcgcgcgttcagtggcgggtggttccgcaccggcgacgtggcagtggtgcatccggacggatacatccagatcaccgatcgatccaaggacgtcattatctcgggtggcgagaacatctcgtccgtcgaggtcgaagatgtcttgcaccaacacccgtcggtgctgattgccgcggttgtggcgcaacctcatcccaaatggggagaatcgccctgcgcgttcatcgaactcaaagatggcgtgagcgaacctgccgaggaggaaatcattgccttttgtcgggcacggctggcgcactacaaatgccccgtgcgcgttgtatatgggccgctacccaaaaccggaaccggaaagattcagaagtaccggctacgcgaaatcgcttgcagccgcgatgcaatcacagaggtggcttcgcttgttcggacagggatccggaatttttaa

SEQ ID NO: 28287 - protein, 559 aa, Ralstonia eutropha JMP134
MSKNIYEIGLERTNANHVPLTPLHFLDRCAEQYPDRDAIIHGHLTQSWSTTRERCRRLASALVKRGIGKGDTVSILAPNTPAMVEAHHGIPLSGAVLNAINCRLDADGVRFILRHGEAKVLFVDREFSALAAAAIDGLDSPPLVIDILDPLAPAGELIGEFEYEQFLQQGDPAFPGLYPEDEWDAIALNYTSGTTSDPKGVVPSHRGAYLMSLLQLTDWGMPRGPKYLWTLPLFHANGWCFAWAVTAAAGTHVCLRKVNAANIFHAIEAHSVDHFCAAPIVLASLATATDYERRSFSHPVRIRTAGSPPPASVLKAVSELGFDVEHVYGITEASGTPVSSFVNPAWNDMSSDEKARLMARQGNRAAALEGLYVADPDTMSAVPRDGKTQGELMLRGNIVMKGYLKNPEATQRAFSGGWFRTGDVAVVHPDGYIQITDRSKDVIISGGENISSVEVEDVLHQHPSVLIAAVVAQPHPKWGESPCAFIELKDGVSEPAEEEIIAFCRARLAHYKCPVRVVYGPLPKTGTGKIQKYRLREIACSRDAITEVASLVRTGIRNF

SEQ ID NO: 28288 - DNA, 1677 bp, Ralstonia eutropha JMP134
  CDS (1)..(1677): transl_table=11
atggtgacaaaatttgatctggggctcgatcagcgcgcggcaaactaccagccgctgacgccgctccatttcctgaatcgggccgaggatgtatacccgcatcggattgccattatccatggcgaccgctcatacacgtggaaggaatatgccggacgctgccgcaagctggctggcgcgttgatcgatcacggcatcgaacgtggcgatacggttgccatcctggcgcccaacacgccagccatgctcgaagcgcagtttggtgtgccgatggcaggcgccgtgctgaactgcatcaacattcgccttgatgccgcggccgtcagcttcattctccggcattccgagacccgcctgctgtttgtcgatcaacagttcgccgaggttgcgcgcgcggccatcgccgtgcttggcgagccgatcaccgttgtggatatcacggacccggaggtggcgggcagccggccggttgggcgtatcgagtatgagtcgttcctcgccagcgcgccggacacgccggatattcgcctgccgctgagcgaatgggacgcgattgcgctcaactacacgtcgggaaccactggcaatccgaagggtgtcgtgtatcaccaccggggcgcatatctcaatgcgctggggcaacttgtcaatgccgagctgagcggcgacgcacccgtctacctgtggaccttgccgctgttccactgcaatggctggtgctatgcctgggcgctcgccgcagtcggcgcgacacagatctgtctgcgcaaggtgagcggagccacaatctatgacgcgatagccaaccacgacgtcacgcatttctgctgcgccccgacagtcctttccttcctgatcgagagtgtgccgccgtcgtgggtgccgccggccaggccgatccgtgtgctgtcgggaggagcatcaccgccgccggcggtctttcgcaggctgatcgagctcggcttccgcgtgcagcatgtctatggtatgaccgagatgcacggggttgccacgatctgccaaagccaagaggcatggcaggcgctgccggaagaagagcatctggttcaccttacccggcaaggggtcagaactgtcgtcatgaacgaaatgatggtggcggatcccaaaacgctatcgccggtttcgcgggatggcagtgcgatgggggaaatcctgctcaggggcaacctggcgatgaaaggctatttcaagaatgcctctgcaacagaggaggcgttcgcaggtgggtggtaccacaccggagatctcgccgtggttcatgccgacggatatatcgaaatcaaggatcgctcaaaggacatcatcatctcggggggagaaaacatttcctcggtagaggtcgaggacgtcctttacgagcatccggccgtagcaggcgcggctgtagttgcggtgccggatccacgttggggagaggtgccatgcgccatcgtcgaactcaaggcggatctcgcggggggcgtcaatgccagtgaaatcatcagcttctgtcgcgccagactgcctggcttcaaggcgccgcagcacgtgatctttgacagtctggcgagaaccgccacgggaaaacttcagaaattcaagctacgcgagtccgcgttacagcacctggtgggcaacggtgcgatcgggcccgattcaggtacgacggagtaa

SEQ ID NO: 28289 - protein, 558 aa, Ralstonia eutropha JMP134
MVTKFDLGLDQRAANYQPLTPLHFLNRAEDVYPHRIAIIHGDRSYTWKEYAGRCRKLAGALIDHGIERGDTVAILAPNTPAMLEAQFGVPMAGAVLNCINIRLDAAAVSFILRHSETRLLFVDQQFAEVARAAIAVLGEPITVVDITDPEVAGSRPVGRIEYESFLASAPDTPDIRLPLSEWDAIALNYTSGTTGNPKGVVYHHRGAYLNALGQLVNAELSGDAPVYLWTLPLFHCNGWCYAWALAAVGATQICLRKVSGATIYDAIANHDVTHFCCAPTVLSFLIESVPPSWVPPARPIRVLSGGASPPPAVFRRLIELGFRVQHVYGMTEMHGVATICQSQEAWQALPEEEHLVHLTRQGVRTVVMNEMMVADPKTLSPVSRDGSAMGEILLRGNLAMKGYFKNASATEEAFAGGWYHTGDLAVVHADGYIEIKDRSKDIIISGGENISSVEVEDVLYEHPAVAGAAVVAVPDPRWGEVPCAIVELKADLAGGVNASEIISFCRARLPGFKAPQHVIFDSLARTATGKLQKFKLRESALQHLVGNGAIGPDSGTTE

SEQ ID NO: 28290 - DNA, 1656 bp, Ralstonia eutropha JMP134
  CDS (1)..(1656): transl_table=11
atggaacaggtcgaacacaacgcggatgggttggagcgcagcccggtcaacttcgtgcccctgacgccgatctccttcctgcgcaggacggccgaggtctaccctgagcgtacagccatcgcctacggcgagcgccgcacgagttggcgggcaatgctggaccgcagccgccgcctcgcgtcggcgcttgtggccgccggcgtcaggactggcgatacggtggccgtgatggccgccaacacgccggagatgctggagatgcatttcggcgtgcccatgagcggcgccatgctgaacacgctgaacgtgcgcctggacgcggccgccatcgcctttatgctcaggcacgcggatgcgaaggtgctggtcaccgacacggagtacgctgacgtagtccaagccgcactggcactgctcgacgacaagccgctggtgattgacatcatcgatcccgccgtcgaaggaggccgcaggctggcggagatcgaatacgagggcttcctggccgggggcgatccgcactgggagggcggcgagcccgtcgacgaatggcaggccatcgccctcaactatacgtccggcaccacgggcaaccccaagggcgtggtctaccaccatcgcggcgcctatctggctgcgctgtcgaacatgctcgactggggcatgccccggcacgccgtcttcctgtggacgctgccgctgttccactgcaatggctggtgcttcgcctggacgctggcggccaacgccggtaccagtatctgcctgcggcgggtggatgctgccgccgtgctcgatgcgattcgcgagcaccaggtcacgcattactgcggagcgccgatcgtgcatgcgatgcttgcccacgcacctgaagcgtggaaggcgggcatcgaccatccggtccacggactcatcggcggcgcgccgccgccgatgccggtgatcgagggcctgttgcgcatggggatcaggatcactcagatctacgggctgaccgaggtctacggccctgcggcggtttgcgtggagcagcccgaatgggacgacctcggcatcgatgcgctggcggaacggaaaggacggcagggcgtccgctacactgcgcaggaaggcatggccgtgctggatcccgaaacccttgtgccggtgccgtgggacgcgaagaccatcggcgaagtcatgttccgcggcaacatgacgatgaagggctacctgaagaacccggaggccacggcggaagcttttgccggcggctggttccactcgggagacctcgcagtcgtctgcccggatggctatgtacagatccgggaccgttccaaggacgtcatcatttccggcggagagaatatcaactcgctggaggtggaggaggtgctctaccggcaccccgcggtgcgcgtggcagccgtcgtcgcccagccggacgagcgttggggagagacgccatgcgcctttgtcgaagtcgtcgatggcgccagggtcggcgagcgcgaactgatcgaacattgccgtgcccacttggcgcacttcaaggcgccgaagaaggtggtcatcggccaccttcccaggacgtcgaccggcaagatccagaagttcctcctcaggcaacgagcaagctccggcgctccctggcccggccacataccggcgtga

SEQ ID NO: 28291 - protein, 551 aa, Ralstonia eutropha JMP134
MEQVEHNADGLERSPVNFVPLTPISFLRRTAEVYPERTAIAYGERRTSWRAMLDRSRRLASALVAAGVRTGDTVAVMAANTPEMLEMHFGVPMSGAMLNTLNVRLDAAAIAFMLRHADAKVLVTDTEYADVVQAALALLDDKPLVIDIIDPAVEGGRRLAEIEYEGFLAGGDPHWEGGEPVDEWQAIALNYTSGTTGNPKGVVYHHRGAYLAALSNMLDWGMPRHAVFLWTLPLFHCNGWCFAWTLAANAGTSICLRRVDAAAVLDAIREHQVTHYCGAPIVHAMLAHAPEAWKAGIDHPVHGLIGGAPPPMPVIEGLLRMGIRITQIYGLTEVYGPAAVCVEQPEWDDLGIDALAERKGRQGVRYTAQEGMAVLDPETLVPVPWDAKTIGEVMFRGNMTMKGYLKNPEATAEAFAGGWFHSGDLAVVCPDGYVQIRDRSKDVIISGGENINSLEVEEVLYRHPAVRVAAVVAQPDERWGETPCAFVEVVDGARVGERELIEHCRAHLAHFKAPKKVVIGHLPRTSTGKIQKFLLRQRASSGAPWPGHIPA

SEQ ID NO: 28292 - DNA, 1635 bp, Ralstonia eutropha JMP134
  CDS (1)..(1635): transl_table=11
atgcccaccgatttcgacagcggcctcggccgcaacgcggccaatttcgtgccgatcaccccgattgatttcctggtccgcgccgccgaggtatacggcgaccggccagctatcgtgcacggcccggtgcgccagaactggcgcgacacctatgtgcgggcgcgccgcctggccagtgcgctcgcgcgagcgggcgtgggcaagggcgataccgtcgcagcgctgctgcccaatacgccagccatggtggaggcgcacttcggtgtgccgatggccggcgcggtgctcaatgcgctcaatattcgactggacgctgcgaacctggtgttcatgctgcgccatggcgaggcgcgcgtgctgctggccgataccgagttcgccgacctcgcacgccagatggcgctggaaatcccgggcctgaaggtcatcgccgtggaagatgcgctgggcccgcaggcggagcgtttcggcgataccgactacgagtcgttcctcgcttcgggcgatcctgagtacgcgtggaagatgcctgacgacgaatgggatgcgattgcgctgaactacacatcgggcacgacgggtgacccgaagggcgtggtgtaccatcaccgcggcgcggccatgaatgcgatctcgaacatcctcgagtgggacctgcccaagcatccggtctacctgtggacgctgccgttattccactgcaatggctggtgctttccgtggaccattgcggcacgtgcgggcgtcaacgtgtgcctgcgcaagttcgagccgcggctcgtgttcgatcttatgcgcgacgaaggcgtgacccactactgcgcggcgccgatcgtgcataccgcgctcgtcaatgcaccaccgtcgtggcgcgaaggcctgcgcggccccgtgcgcggcatggtggccggcgcgccgccgcccgccgcggtgctcgctcagatggaggcgatggggttcgagctgacgcacgtgtacggcctcacggaggtgtacgggccggctgccgtatgcgccgagcaggacggctgggacagtctgtcgcaggaagagcgtgcggtgaagaaggcacggcagggcgtgcgctatcacctgcagtcgggcgtggccgtgctcgatcccgattcgatgcagccggtgccggccgatggcgagaccatcggcgaaatcatgttccgcggcaacatctgcatgaagggttacctcaagaatgagaaggcgacgcgcgaggcctttgcgggcggctggttccacaccggcgatctcggcgtatgcatggcggacggctacatcaagatcaaggaccgcagcaaggacatcatcatttcgggcggcgagaacatttcgagcgtcgaggtggaggatgcgctctaccgccatccggccgtgcttgcggcagcagtcgtggcgcagccggatgccaaatggggcgaaacgccgtgcgcgttcgtcgagctgaaagatggggcgagtgcgacggcagaggaactgatggcccattgccgcacgctgctggcgggcttcaaggtgccgaaggctgtgtatttcggaccgctgccgaagacctcgaccggcaagatccagaagttcgagctgcgccgcaaggtcaagtcggattcggcgatcgacgtctga

SEQ ID NO: 28293 - protein, 544 aa, Ralstonia eutropha JMP134
MPTDFDSGLGRNAANFVPITPIDFLVRAAEVYGDRPAIVHGPVRQNWRDTYVRARRLASALARAGVGKGDTVAALLPNTPAMVEAHFGVPMAGAVLNALNIRLDAANLVFMLRHGEARVLLADTEFADLARQMALEIPGLKVIAVEDALGPQAERFGDTDYESFLASGDPEYAWKMPDDEWDAIALNYTSGTTGDPKGVVYHHRGAAMNAISNILEWDLPKHPVYLWTLPLFHCNGWCFPWTIAARAGVNVCLRKFEPRLVFDLMRDEGVTHYCAAPIVHTALVNAPPSWREGLRGPVRGMVAGAPPPAAVLAQMEAMGFELTHVYGLTEVYGPAAVCAEQDGWDSLSQEERAVKKARQGVRYHLQSGVAVLDPDSMQPVPADGETIGEIMFRGNICMKGYLKNEKATREAFAGGWFHTGDLGVCMADGYIKIKDRSKDIIISGGENISSVEVEDALYRHPAVLAAAVVAQPDAKWGETPCAFVELKDGASATAEELMAHCRTLLAGFKVPKAVYFGPLPKTSTGKIQKFELRRKVKSDSAIDV

SEQ ID NO: 28294 - DNA, 1659 bp, Methanosarcina barkeri str. Fusaro
  CDS (1)..(1659): transl_table=11
atgcatcttatagaagagtccctcggtaattactttgaaaaacaggtggctgtagaccctgaccacgagtttataatctatcctgaccgcaaccttcgttttacctatgggcagttcaacgaacgggtcaataaccttgcaaaagggctgctagctatagggataacaaaaggggatcatgtaggaatctgggcaaaaaatgttcctgattggcttaccttcatgtttgccacggcaaagataggagcagtacttgttactgtgaatactgcctacaagagccatgaggtcgaatatgtattaaaacagtccgatatgaaggctctggctatgattgatagttacagagacgttgattatctcgaaataattaatgaactggtccctgagctcaaaacctctgagagggggagactgaaaagcaaaaactttccctatcttaagagtataatttatgtaggacaggaaaagcaccggggtatgtataacacaaatgagcttatgcttcttggcagtcattatcccgatgacaagctccgcgagattatgaccagcgtcgactgtgacgatgttgtcaatatgcagtatacatcaggtactaccgggtttcctaaaggagtcatgctgacccataaaaatatcctgaataacgggctttctattggagaccgccagaggtttacctatgtagacaaactctgttttcccgtgccactttttcactgttttgggatagtactaggagttatggccgttctgactcacagagcaacgcttgttatgctcgaagtttttgatcctctattagtacttgccgctgtccataaagagaaatgtacagcgctttacggcgtgccaacaatgtttattgccgagtatacacatcccatgttcgacatgtttgacctatcatctctcaggacaggaattatggcgggttcgacctgccccgtggaagccatgaaaaaggtcgtaaacgatatgcactgctatcagattaccagtgtttacgggcttacggaagcatcccctggtatgacccaaactgctgtagacgatcctctagaactcagggtcgaaactgttggtaagcatttcccgagcgtagaggtcagggttgttgatcccgataccaatgagcctgtgcccctaaatactgtaggagagatatgttgtcgcgggtataacgtaatgaaaggttactataagatgcctgaagaaacgaaaaaagttatcgatgaagacggttggcttcacagtggagaccttggaacctgtgacgaaaacggttactacagaatcacaggcaggattaaggacatgattatccggggaggagaaaacatatatccaagggaaattgaggaactcctgcttaccatgcccgaaattacagacgttcaggttgtgggcatccctgacaaaaaatacggggaaattgtaggtgcctttgtgattctcaaaaaaggtgcagactttacagaagtcgatatcagagattatgctttaagcaaggtcgctcgctataaggttccaaaacacatattcattgtagatgaattcccactgacagcaagcggtaagattcaaaaatacaggctaagggaactggctgtggagcttcttaatgagcaaggtgaaaaaatagcaattgagtaa

SEQ ID NO: 28295 - protein, 552 aa, Methanosarcina barkeri str. Fusaro
MHLIEESLGNYFEKQVAVDPDHEFIIYPDRNLRFTYGQFNERVNNLAKGLLAIGITKGDHVGIWAKNVPDWLTFMFATAKIGAVLVTVNTAYKSHEVEYVLKQSDMKALAMIDSYRDVDYLEIINELVPELKTSERGRLKSKNFPYLKSIIYVGQEKHRGMYNTNELMLLGSHYPDDKLREIMTSVDCDDVVNMQYTSGTTGFPKGVMLTHKNILNNGLSIGDRQRFTYVDKLCFPVPLFHCFGIVLGVMAVLTHRATLVMLEVFDPLLVLAAVHKEKCTALYGVPTMFIAEYTHPMFDMFDLSSLRTGIMAGSTCPVEAMKKVVNDMHCYQITSVYGLTEASPGMTQTAVDDPLELRVETVGKHFPSVEVRVVDPDTNEPVPLNTVGEICCRGYNVMKGYYKMPEETKKVIDEDGWLHSGDLGTCDENGYYRITGRIKDMIIRGGENIYPREIEELLLTMPEITDVQVVGIPDKKYGEIVGAFVILKKGADFTEVDIRDYALSKVARYKVPKHIFIVDEFPLTASGKIQKYRLRELAVELLNEQGEKIAIE

SEQ ID NO: 28296 - DNA, 1650 bp, Rhodobacter sphaeroides 2.4.1
  CDS (1)..(1650): transl_table=11
atgggttggctggcggacgagcgcgggctggaaaaatgcgcggcgaattacgcggcgcttacgcccctgtcgcacctcaagcgcgccgcggaggttcataccgaccgcaccgctctcgtgaatggctcgatccggctgacctacggcgaatatcacgcccgcgtcagccgcctcgcctcggcgctggcgggcatgggcatccagtcgggcgacgtggtggcgacgctcctgcccaatatcgccgcccatgccgaggctcatttcggggtgcccgcctgcggcgcgatcctgaacgcgatcaacacgcgcctcgatctggataccgtgtcctatatcctcgagcatggcggggcgaagctcctgctctgcgatacggccttcctgaagctcgcgaaggatgcctgcgcccggctggaaggaaaggcgccgatcctcgtcgaggtctgcgaccgcgaggcgggcttctctccttcgggcgaggtgctggaatatgaggacctcatggaccgcggcaacccgtgggcgccctgggtgatgcccgaggacgagtgggagagcatcgcgctcaactatacctccggcacgacggggcggccgaagggcgtggtctaccaccaccgcggcgcctatctctcgacctacggcaatgccatcgcctggcggatgcagctctacccggtctacctgaccatcgtgccgctctttcactgcaacggctggtgtcacacctggatggtgccgatgctgggcggtaccgtcgtctgctgccgcgacatcaccgcgacggcgatctatgcggccatcgccgacgagggcgtgacccatttcggcggcgcgcccatcgtgctcaatacgctcatcaatgcagctcccgaagaccggcgcagcttcgatcaggtggtggaggtcttcaccgcgggcgccccgcccccggccgcaacgctggcggccatcgaaccgctcggcttcaacgtgacccaggtctacgggctgaccgaagtctatggcccggccaccgaatgcatctggaagcccgagtgggacgagacggcgggcgaggagcgttcggcgctgaaggcgcgcaccggcgtcgccatggcgaccctcgaaggggccgaggtgcacgacacccacggccagccaatcccgcgcgacacggtccatctgggcgagatcgcgatgcgcggcaacatggtgatgaagggctattacaagaaccccgaggccacggccgaagccttccgcgacggctggttccgctcgggcgacatcgccttccagcatcccgacggctatatcaagatcaccgaccgcgcaaaggacatcatcatctcgggcggcgagaacgtctcgtccgtcgaggtggaaggcgtgatcgcccaccatccggccgtcagcctctgcgccgtggtggccaagcccgacgagcgctggggcgaggtgccctgcgccttcgtcgagctgaagcgcggccggcaggccaccgaggaggagatcatcgccttcgcgcgcgagcgtctggcgggcttcaagacgcccaagcaggtcatcttctgcgaattgcccaagacctcgaccggcaagatccagaagttcgaactgcgcgccgtggccaagctcgccgtgacggagacggaagacgcccgttga

SEQ ID NO: 28297 - protein, 549 aa, Rhodobacter sphaeroides 2.4.1
MGWLADERGLEKCAANYAALTPLSHLKRAAEVHTDRTALVNGSIRLTYGEYHARVSRLASALAGMGIQSGDVVATLLPNIAAHAEAHFGVPACGAILNAINTRLDLDTVSYILEHGGAKLLLCDTAFLKLAKDACARLEGKAPILVEVCDREAGFSPSGEVLEYEDLMDRGNPWAPWVMPEDEWESIALNYTSGTTGRPKGVVYHHRGAYLSTYGNAIAWRMQLYPVYLTIVPLFHCNGWCHTWMVPMLGGTVVCCRDITATAIYAAIADEGVTHFGGAPIVLNTLINAAPEDRRSFDQVVEVFTAGAPPPAATLAAIEPLGFNVTQVYGLTEVYGPATECIWKPEWDETAGEERSALKARTGVAMATLEGAEVHDTHGQPIPRDTVHLGEIAMRGNMVMKGYYKNPEATAEAFRDGWFRSGDIAFQHPDGYIKITDRAKDIIISGGENVSSVEVEGVIAHHPAVSLCAVVAKPDERWGEVPCAFVELKRGRQATEEEIIAFARERLAGFKTPKQVIFCELPKTSTGKIQKFELRAVAKLAVTETEDAR

SEQ ID NO: 28298 - DNA, 1608 bp, Carboxydothermus hydrogenoformans Z-2901
  CDS (1)..(1608): transl_table=11
atggctattgaagttaatcgacaacttttaacaccgctctggtttttaaaaagagcagcttatgtgtttccggagaaaactgctgttgtagatggggagaggagatttacctaccgggagtttaaggaaagggtaaatcgcctggcctctgctttgaaaaaatatggtattggcaagtgggacaaggtagcctatcttgccccgaatattcatccctttttggaagggcattatggggtgccgctggcacgtggggtattggtgagcattaatacccggcttaaatccaatgaaatcctgtatattttaaatcactccgaaagtaaaatcttgattgtggattcggagcttgcatctttaattgaacctatttacgaccagttggaaacggtgcaaaagattgtaatgataaatcaggttcccagggaaactaaacttccggcggtggattatgaagaatttttgcaggagggagagccggaagatttaccaatacctattgaagatgagtttgagcctataactttaaactacacttccgggaccaccggatttcccaaaggagtacagtatacccatcggggggcttatttaaacagtctttcagaagtaattgagatggggttaaatcagtattctaaatacctctggattttaccgatgtttcactgcaatggctggtgttttacctgggccgtaactgcagtaggtgctactcattactgctttagaaaatttgaaccggaagcagccctggaaattatcgaaaaggaaaaaataactaatttctgcggggcgccggttgtttttaatgctatgactgctgcgaaaaaagcggaaggtttaaaatttaaccacccaattcgggcctttattgctggtgcagctccttcacctacaattattagtaaaatggaacgcctcggggttgaggttgtccacgtctatggtttaactgaggtgtatggaccctttaccgtgtgcgaatggcatcccgagtgggataatttatccgccgaggaaaaggctatttacaaagcaaggcagggagtacctatggttactaccggtgaagtaagagttgtggatgcagaaatgaatgatgtaccagctgatggcaaaaccatgggagaaattgttatgcgaggaaacggtgtgatggcgggatattataaagcacccgaagatacggctaaagcttttgctggcggctggttccacagtggtgatttagcagtaatgcatcctaacgggtatattgaaataatggatcgctccaaggatattatcatttctggtggagaaaatatctcttcagttgaagttgaaaacgttttatattcccatcctgcggtatatgaagtagcagtggtagcatctcctgatgagcgctggggtgaagttcctaaagcgtttatagttttaagggaaggggcttcggttactcccgaagaattaatagcttattgtcgcgagaaaatggctggatttaaggttccaaagaaaattgagtttgttgatgcgttacccaaaacccctacaggtaagatccaaaaatttgttctaagaaacttagaatggaaaggggagaaaaaagtaaaaggctaa

SEQ ID NO: 28299 - protein, 535 aa, Carboxydothermus hydrogenoformans Z-2901
MAIEVNRQLLTPLWFLKRAAYVFPEKTAVVDGERRFTYREFKERVNRLASALKKYGIGKWDKVAYLAPNIHPFLEGHYGVPLARGVLVSINTRLKSNEILYILNHSESKILIVDSELASLIEPIYDQLETVQKIVMINQVPRETKLPAVDYEEFLQEGEPEDLPIPIEDEFEPITLNYTSGTTGFPKGVQYTHRGAYLNSLSEVIEMGLNQYSKYLWILPMFHCNGWCFTWAVTAVGATHYCFRKFEPEAALEIIEKEKITNFCGAPVVFNAMTAAKKAEGLKFNHPIRAFIAGAAPSPTIISKMERLGVEVVHVYGLTEVYGPFTVCEWHPEWDNLSAEEKAIYKARQGVPMVTTGEVRVVDAEMNDVPADGKTMGEIVMRGNGVMAGYYKAPEDTAKAFAGGWFHSGDLAVMHPNGYIEIMDRSKDIIISGGENISSVEVENVLYSHPAVYEVAVVASPDERWGEVPKAFIVLREGASVTPEELIAYCREKMAGFKVPKKIEFVDALPKTPTGKIQKFVLRNLEWKGEKKVKG

SEQ ID NO: 28300 - DNA, 1671 bp, Burkholderia sp. 383
  CDS (1)..(1671): transl_table=11
atgacgcagatgttcgaggccggactcggccgccgcgacgcgaattacgtgccgctcaccccgatcgacttcctggtcaggacggccgaagtctatggcgatcgccttgcgatcgtacacggcgacgtgcggcgcacttggggcgagacctgcacgcgcgcgaagcaactggcgagcgcgctcgcgcggctcggcatcgaacgtggcgacacggtcgcggcgatgctgccgaacatcccggcgatggtcgaggcgcacttcggcgtgccgatggccggcgcggtgctgaacacgatcaacacgcggctcgacgtgtcgtcggtgctgttcatgctgcgtcatggcgaggcgaaggtgctgatcgtcgacaccgagtatgcggagttcgcgcatcgcgcggcgctcgaggtgccgggcctgaagatcgtcagcgtggccgatgcgatgccggccgatcccgcgcgcttcgcgggcgcgaccgactacgaggcgctcgtcgcaagcggcgacgccggctacgcatggacgccgcccgccgacgaatgggaggcgatcgcgctgaactatacgtccggcacgaccggcgacccgaagggggtggtctatcaccatcgcggcgcgtatctcgcggcaatcagcaacatcctcgaatgggacatgccgaagcacgccgtctacctgtggacgctgccgatgttccactgcaacggctggtgcttcccgtgggccgtcgcggcgcgcgcgggcgtgaacgtctgcctgcgcaagttcgatgcgaagacggtgttcgacctgatccgtcgcgaacgcatcacgcactactgcggtgcgccgatcgtgcagagcgcgatcgcgaacgcaccggccgaattccgtgaaggcatcgaccacacggtacatgcgatggtcgcgggcgcggcgcccgcgccggccgtgatcgcgaagatgaaggaaatcggcttcgacctgctgcacgtgtacgggctgaccgaggtgtatggcccggcgaccgtctgcgcgaagcagtcgcactgggaagaactgagcgacgaggatcgtgcgcggctcaatgcgcgccagggcgtgcgctatcacctcgaagcgggcgcgacggtgctcgatcccgacacgatggcgccggtgccggccgacggcgagacgctcggcgagatcatgttccgcggcaacatctgcatgaagggttacctgaagaacccgaaggcgaccgacgaggcgttccacggcggctggttccataccggcgatctcgcggtgctgatgccggacggctatatccggatcaaggatcgcaagaaggacatcatcatctcgggtggcgagaacatctcgagcatcgaggtcgaggatgcgctgtaccggcacccggcagtggcggtggcggcggtcgtcgcgatgcccgatccgaagtggggcgaggtgccgtgcgcgttcgtcgagctgcgcgaaggcgcaagcgtgaccgaggaggagatcgtcgcgcattgcaaggcgctgcttgcgggcttcaaggtgccgaaggccgtgcggttcggcgagctgccgaagacgtcgaccggcaagatccagaaattccagctgcgcaatgcggtcggatcggacaaggcgatcgatctggcaggcgacaacgtgccgggcaagaaggcgcagtaa

SEQ ID NO: 28301 - protein, 556 aa, Burkholderia sp. 383
MTQMFEAGLGRRDANYVPLTPIDFLVRTAEVYGDRLAIVHGDVRRTWGETCTRAKQLASALARLGIERGDTVAAMLPNIPAMVEAHFGVPMAGAVLNTINTRLDVSSVLFMLRHGEAKVLIVDTEYAEFAHRAALEVPGLKIVSVADAMPADPARFAGATDYEALVASGDAGYAWTPPADEWEAIALNYTSGTTGDPKGVVYHHRGAYLAAISNILEWDMPKHAVYLWTLPMFHCNGWCFPWAVAARAGVNVCLRKFDAKTVFDLIRRERITHYCGAPIVQSAIANAPAEFREGIDHTVHAMVAGAAPAPAVIAKMKEIGFDLLHVYGLTEVYGPATVCAKQSHWEELSDEDRARLNARQGVRYHLEAGATVLDPDTMAPVPADGETLGEIMFRGNICMKGYLKNPKATDEAFHGGWFHTGDLAVLMPDGYIRIKDRKKDIIISGGENISSIEVEDALYRHPAVAVAAVVAMPDPKWGEVPCAFVELREGASVTEEEIVAHCKALLAGFKVPKAVRFGELPKTSTGKIQKFQLRNAVGSDKAIDLAGDNVPGKKAQ

SEQ ID NO: 28302 - DNA, 1629 bp, Rhodospirillum rubrum ATCC 11170
  CDS (1)..(1629): transl_table=11
atgccgtctccctacagcaccggacttgatcgcacacccgccaaccatgttcccctgacgccgctggccttccttgacagggcggcgcaggttttcccagaccgtccttcccttgtccacggcaaacgccgctatacctgggccgaaacggcccagcgcgcccgccggctggcttcggccctgcgggcgcgcggcatcggccccgaggatacggtggcggtgatgggcgccaatacccccgagctttacgaggcccatttcggcgtgccgatggccggggcggtgctcaacgcccttaacgttcgcctcaacgccgaggagatcgcctttatcctggagcatggcgaggcgcgcgttctgctgaccgataccgagttttcgccgatcatcgccgacgccctcgcccgcatcgatcggccgatcacggtgatcgacatcgtcgatcccgaatacgacggccccggcgcttgcgtcggcgagatggagtacgaggcctttctggccgagggcgatccaaccgccgattggcgctggccggccgacgaatgggaatcgatcacgctcaactatacctcgggaaccaccggcaatcccaagggcgtggtttaccaccaccgcggcgcctatttgaacgcgctttcgaacatcatcacctgggggatgccccaccatgccgtttatctgtggaccttgccgatgttccactgcaacggttggtgtttcccctggacgatggcggccaatgcgggaaccaacgtctgcctgcgccgggtgacggcggcgggcatcttccaggccatcgccgaggaaaaggtcagccacttctgcggcgcgccgatcgtgctgagctttctgatcaacgcccgccccgaagaacggcggtcctttgatcatcaggtcaacgtgatgaccgccgccgccccgccgccggcctcggtcctggaaaaaatgcagcgcgagggcttctgcgtgacccatgtgtacggtctgacggaaacctatggcccggccaccgtttgcgcctggaaggaaccgtggaacgacctgccgatggacgaacaggcgcggctgaaatcgcgccaaggagtgcgctatctggttcaggaaggcttgatggtcggcgatccggaaaccatggaggcggttcccgccgacggcgaaagcatgggcgaggtgtttttccgcggcaatatcaccatgaaaggctatctgaagaatcccgaggccaccgccgaggcctttcgcggcggctggttccacaccggggatcttggggttcttcatcccgatggctatcttcagctcaaggatcgctccaaggacatcatcatctcggggggcgagaatatctcgtcgatcgaggtcgagggcgtgctccatcgtcaccctgacgttgtcgccgccgccgttgtcgccaaacccgatgagaaatggggagaaacccctaaagcttatgtggagttacgcgacggcgctacggtaacagaggatgaacttgtggccttttgtcggctccatctggcacattataaatgccctcgggatgttgaggtggggccgctgccaaaaacatcgacgggtaagatccagaagttcgttctgcgccggcaggtgcgagcggaaggataa

SEQ ID NO: 28303 - protein, 542 aa, Rhodospirillum rubrum ATCC 11170
MPSPYSTGLDRTPANHVPLTPLAFLDRAAQVFPDRPSLVHGKRRYTWAETAQRARRLASALRARGIGPEDTVAVMGANTPELYEAHFGVPMAGAVLNALNVRLNAEEIAFILEHGEARVLLTDTEFSPIIADALARIDRPITVIDIVDPEYDGPGACVGEMEYEAFLAEGDPTADWRWPADEWESITLNYTSGTTGNPKGVVYHHRGAYLNALSNIITWGMPHHAVYLWTLPMFHCNGWCFPWTMAANAGTNVCLRRVTAAGIFQAIAEEKVSHFCGAPIVLSFLINARPEERRSFDHQVNVMTAAAPPPASVLEKMQREGFCVTHVYGLTETYGPATVCAWKEPWNDLPMDEQARLKSRQGVRYLVQEGLMVGDPETMEAVPADGESMGEVFFRGNITMKGYLKNPEATAEAFRGGWFHTGDLGVLHPDGYLQLKDRSKDIIISGGENISSIEVEGVLHRHPDVVAAAVVAKPDEKWGETPKAYVELRDGATVTEDELVAFCRLHLAHYKCPRDVEVGPLPKTSTGKIQKFVLRRQVRAEG

SEQ ID NO: 28304 - DNA, 1662 bp, Burkholderia thailandensis E264
  CDS (1)..(1662): transl_table=11
atgacgcagaagttcgaggaggggctcggcaagcgcgaggccaactacgtgccgctcacgccgatcgatttcatcgcgcgcgcggccgaggtgtacggcgagcgcctcgccgtcgtgcacggcgacatccgccgcacgtggggcgagacctatgcgcgcgcgcggcgtctcgcgagcgcgctcgaacgcgcgggcgtcgagcggggggacaccgtcgccgcgctgctgccgaacattccgccgatgatcgaggcgcacttcggcgtgccgatggcgggtgccgtgctcgacgcgctgaacacgcggctcgacatcgcgtcgatgctgttcatgctgcgtcacggcgaggcgaaggtgctgatcgtcgacaccgaatacgcggagttcgcgcaccgcgcggcgctcgaggtgccggggctcgcgatcgtgagcgtggccgacgcgatgcccgccgatcccgcgcgctttcccgccgcgatcgactacgaggcgttcctcgcgggcggcgacccgacgtacacgtggacgccgccgtcagacgaatgggaggcgatcgcgctgaactacacgtcggggacgacgggcgacccgaagggcgtcgtctaccatcatcgcggcgcgtacctcgccgcgatcagcaacatcctcgaatgggacatgccgaagcacgcggtctacctgtggacgctgccgatgttccattgcaacggctggtgcttcccgtgggcggtcgcggcgcgtgcgggcgtgaacgtgtgcctgcgcaagttcgatgcgaagctcgtgctcgatctgattcggcgcgagcgcgtcacgcattacagcggcgcgccgatcgtgcagagcgcgatcgcgaacgcgccggccgaatggcgcgcggggatcgagcacgaggtgcatgcgttcgtcgcgggcgccgcgcccgcgccggctgtgatcgcgaagatgaaggagatcggcttcgacctcacgcatgtctacgggctcaccgaggtgtacggcccggcgaccgtctgcgcgaagcaggcgcactgggcgtcgctgcccgacgacgagctcgcgcaactgaacgctcggcaaggcgtgcgctatcacctgcaggcgggcgcgaccgtgctcgatcccgacacgatggcgcccgtgccggccgacggcgagacgctcggcgagatcatgtttcgcggcaacatctgcatgaagggctacctgaagaacccgcacgcgaccgacgaggcgttcgcgggcggctggttccacacgggcgatctcggcgtgttgacgccggacggctacatccggatcaaggaccgccgcaaggacatcatcatctccggcggcgagaacatttcgagcatcgaggtcgaggacgcgctgtaccggcatccggccgtcgcggtcgcggccgtcgtcgcgctgccggacccgaagtggggcgaggtgccgtgcgcgttcgtcgagctgcgcgaagggatgagcgcgaccgaggaagagatcatcgcgcactgccggctgctgctcgccgcgtacaagatcccgaagacggtgcggttcggcgagctgccgaagacatcgaccgggaagatccagaaattccagttgcgcgcgcaggtcggctcgcgctcggcgatcgatctggtggcggacgccgcgaagaaagggtag

SEQ ID NO: 28305 - protein, 553 aa, Burkholderia thailandensis E264
MTQKFEEGLGKREANYVPLTPIDFIARAAEVYGERLAVVHGDIRRTWGETYARARRLASALERAGVERGDTVAALLPNIPPMIEAHFGVPMAGAVLDALNTRLDIASMLFMLRHGEAKVLIVDTEYAEFAHRAALEVPGLAIVSVADAMPADPARFPAAIDYEAFLAGGDPTYTWTPPSDEWEAIALNYTSGTTGDPKGVVYHHRGAYLAAISNILEWDMPKHAVYLWTLPMFHCNGWCFPWAVAARAGVNVCLRKFDAKLVLDLIRRERVTHYSGAPIVQSAIANAPAEWRAGIEHEVHAFVAGAAPAPAVIAKMKEIGFDLTHVYGLTEVYGPATVCAKQAHWASLPDDELAQLNARQGVRYHLQAGATVLDPDTMAPVPADGETLGEIMFRGNICMKGYLKNPHATDEAFAGGWFHTGDLGVLTPDGYIRIKDRRKDIIISGGENISSIEVEDALYRHPAVAVAAVVALPDPKWGEVPCAFVELREGMSATEEEIIAHCRLLLAAYKIPKTVRFGELPKTSTGKIQKFQLRAQVGSRSAIDLVADAAKKG

SEQ ID NO: 28306 - DNA, 1536 bp, Frankia sp. CcI3
  CDS (1)..(1536): transl_table=11
atgttggtgcctttcggcgcacgtgatttccttgatcgagcggtcacggtgtatggcagacgtgtcggtgtcgtggacgaaccggaccagcccgcccagccgtggccggacctgacctacgcccgcctgggtgagaccgcccgtgcgcaggcggcgggcctggacgccttaggcgtgggccacggtgagcgcgtcgcgatcgtgtcgcataacagtgcccgcctgctcgcgtcgttcttcggtgtcagcgggtacggccgggtgctcgtcccggtgaacttccgtctctcgccggaggaggtcagctacatcgtcgagcactccggctccgaggtgctgctcatcgaccccgagctggaggagaagctctccggcgtgaccgcgaagcagaagttcgtgctgggcgccgagagtgacgccgagctctaccgcttcgacgccgagcccacgccgtgggagccggatgagaacgccaccgccacggtcaactacaccagcggtacgaccgcgcgccccaagggcgtgcagatcacccaccgcaacatctgggtcaacgcggtcaccttcgcgctgcacgccggtgtcaccgatcgcgacgtctacctgcacacgctgccgatgttccacgccaatggctggggcatgccgttcggcatgaccggtctcggcgtccagcaggtggtgctgcgcaagatcgacggcccggagatcctgcgccgcgtggagcagcacggcgtcaccgtgatgtgcgccgcgccggctgtggtcaacgccgtgctcgacgccgtccgggactgggacggcgaggtccccggccgcgaccgcgtgcgggtcatctgcgcgggtgctccgccgcccaccaagacgatccaacgggtcgaggaggagctcggctgggagttcatccagatttacggcctcaccgagacctcgccgctgctcacgatcaaccgttcccgcgtggagtgggacgacctgccgcccgaggatcgcgcgggcaagctcgtccgtgcgggtgcgcccgctctgggtgtcacgctcaagctctcagactccggtgaggtgctggctcgctccaacgtgatcttggcgggctactgggagcggccgcaggagtcggccggggccctggcgggcggctggttccacaccggtgacggcggcgtgatcgacgacgagggctacctgacgatcagtgaccgcaagaaggatgtgatcattaccggcggtgagaacgtctcgtcgatccaggtcgaggactgcctgttcggccacccggcagtggccgaggtcgcggtgatcggcgtgcccgacgagaagtggggtgaggcgatcaaagcgctggtcgtgctcgccgagggccggacggcgaccgaggcggagctgatcaagcactgcaaggagcggctcgcctcctacaaggcgcccacctcggtggagttccgcgaccagcttgcccgcaccgccaccggcaagctgcagaagttcaagctgcgcgccccgtactgggagggccacgagcgccaggtcgactga

SEQ ID NO: 28307 - protein, 511 aa, Frankia sp. CcI3
MLVPFGARDFLDRAVTVYGRRVGVVDEPDQPAQPWPDLTYARLGETARAQAAGLDALGVGHGERVAIVSHNSARLLASFFGVSGYGRVLVPVNFRLSPEEVSYIVEHSGSEVLLIDPELEEKLSGVTAKQKFVLGAESDAELYRFDAEPTPWEPDENATATVNYTSGTTARPKGVQITHRNIWVNAVTFALHAGVTDRDVYLHTLPMFHANGWGMPFGMTGLGVQQVVLRKIDGPEILRRVEQHGVTVMCAAPAVVNAVLDAVRDWDGEVPGRDRVRVICAGAPPPTKTIQRVEEELGWEFIQIYGLTETSPLLTINRSRVEWDDLPPEDRAGKLVRAGAPALGVTLKLSDSGEVLARSNVILAGYWERPQESAGALAGGWFHTGDGGVIDDEGYLTISDRKKDVIITGGENVSSIQVEDCLFGHPAVAEVAVIGVPDEKWGEAIKALVVLAEGRTATEAELIKHCKERLASYKAPTSVEFRDQLARTATGKLQKFKLRAPYWEGHERQVD

SEQ ID NO: 28308 - DNA, 1635 bp, Ralstonia metallidurans CH34
  CDS (1)..(1635): transl_table=11
atgccgaccgactacgacaccggactggcccgcaaccccgccaactacgttccgatcaccccgctcgacttcatcgcccgcgcggccgaggtctacggcgatcgcctggccatcgtgcatggcacggtgcgccagaactggcgcgacacctacgcgcgctgccggcgcctggccagcgcgctgacccgcgcgggcgtgggcaagggcgataccgtggcggcgctgctgcccaacaccccggcgatggtcgaggcgcacttcggcgtgccgatggccggtgcggtgctgaatgcactcaacatccgcctggacgccgccaacctggtcttcatgctgcgccacggcgaagccaaggtgctgctggcggacaccgagttcgccgatgccgcccgtcagatggcgcgcgaggtgcgtggactcaaggtgatcgcggtggaagacgtgctcgggcccgacgccgagcggttcggtgacaccgattacgagtccttcctggccagcggcgatccggaattcgactggaagatgcccggcgacgagtgggacgccattgccctgaactacacgtcgggcactaccggcgacccgaagggcgtggtctatcaccatcgcggcgcggccatgaacgccatctccaacatcctggagtgggacatggccaagcatccggtctacctgtggacgctgccgatgttccactgcaacggctggtgcttcccgtggacagtcgcggcccgcgccggcgtgaacgtctgcctgcgcaagttcgagccgaagctcgtcttcgacctgatgcgcgacgaaggtgtgacgcactactgcgccgcgccgatcgtccacaccgcgctggtcaacgcgccgccgtcgtggcgcgaagggctgcgcgggccggtgcgcggcatggtggcgggcgccccgcccccggcggcggtgctggcgcagatggaagcgatgggtttcgacctgtcgcatgtctacggcctgaccgaggtctacggcccggccgcggtctgcgcggagcaggacgcctggcacacggtgtcgcaggaagaacgcgcggtgctgaaggcgcgccagggcgtgcgctatcacctgcagtccggcgtcacggtgctggacccggatacgatgcagcccgtaccgcgcgacggcgagaccatcggcgaaatcatgttccgcggcaacatctgcatgaagggttacctcaagaacgacaaggccacgcgcgaggcgttcgcgggcggctggttccatacgggcgaccttggcgtgtgcatgcctgacggctacatcaagatcaaggaccgcagcaaggacatcatcatctccggcggggagaacatttccagcgtcgaggtggaagacgcgctctaccgccaccccgcggtgctggccgccgccgtggtggcgcagccggatgccaagtggggcgagacgccgtgcgcgttcgtcgaactgaaggatggcgcaagcgtcacggccgaagaactgattgcacattgccgcacgctgctggccggcttcaaggtgccgaaggcggtctacttcgggccgctgcccaagacctctaccggcaagatccagaagttcgaactgcgcaagaagatgcagtcgaacgctgccatcgacgtctga

SEQ ID NO: 28309 - protein, 544 aa, Ralstonia metallidurans CH34
MPTDYDTGLARNPANYVPITPLDFIARAAEVYGDRLAIVHGTVRQNWRDTYARCRRLASALTRAGVGKGDTVAALLPNTPAMVEAHFGVPMAGAVLNALNIRLDAANLVFMLRHGEAKVLLADTEFADAARQMAREVRGLKVIAVEDVLGPDAERFGDTDYESFLASGDPEFDWKMPGDEWDAIALNYTSGTTGDPKGVVYHHRGAAMNAISNILEWDMAKHPVYLWTLPMFHCNGWCFPWTVAARAGVNVCLRKFEPKLVFDLMRDEGVTHYCAAPIVHTALVNAPPSWREGLRGPVRGMVAGAPPPAAVLAQMEAMGFDLSHVYGLTEVYGPAAVCAEQDAWHTVSQEERAVLKARQGVRYHLQSGVTVLDPDTMQPVPRDGETIGEIMFRGNICMKGYLKNDKATREAFAGGWFHTGDLGVCMPDGYIKIKDRSKDIIISGGENISSVEVEDALYRHPAVLAAAVVAQPDAKWGETPCAFVELKDGASVTAEELIAHCRTLLAGFKVPKAVYFGPLPKTSTGKIQKFELRKKMQSNAAIDV

SEQ ID NO: 28310 - DNA, 1632 bp, Silicibacter sp. TM1040
  CDS (1)..(1632): transl_table=11
atgagcgccaacccctacaataccgatctggatcgcaccccggccaactatcagcccctgaccccgctcatgtttctggagcgggccgcaacggtatttccagagcacacggcaatcattcacggcccccttcgacgcagctacgccgctttttatgcacgcgcgcgccagcttggctcggcactgtcgcataggggcatcacgcggggcgatacggtctcggccctgctgccaaacacgtccgcgatgcttgagtgtcactatggcgtccccatgtgcggtgcggtgctgcattcgatcaacacccggcttgatgctgcgatcatcgcctttcagctggatcacgcgatgtccaaggtcgtcatcgtcgactctgaattcatgcccttgatgcaggaggcgctggcgctttgctcggtgcagcccctgctgatcgaggtcgacgatcccgtctacgagggcgcgcggatcaaaaccgaagccgtggactacgatagctttattgcggatggtgacgccgagtttgcctggctcatgcccgaagacgaatgggacgcgatctcgatcaactacacctcgggcaccaccggagaccccaagggggtcgtttcgcatcatcgcggggcctatcttttggcgcagggcaatgcgctcacgacaacgatgggcaaacatgcggtctatctctggaccctgccgatgtttcactgcaacggctggtgttttccctggacgctctcggcgatcattggcacccatgtctgcctgcgccaggtgcgggcggatcagatctggaacgcgctcgccgacgagggcgtcacgcatctctgtggcgcgcccatcgtgatgtcgctgatgatctcggcccccgccgacgtgcagcgccccctcgatcagaccgttcagttttttacagccgctgccccgccgccggaaaagctgctggcggacatgaaaaccgcaggctttgaagtcacgcatctttatggactcacagaaacctatggccctgccgtggtcaacgactggcatcaaagctggtccgagctgccgcacgacgaacagtcccgcctgaaatcccggcagggcgtgcgctatcttccgctcgagggactcaacgttctggaccccgaaaccctagagcccgtgccccatgatggcgaaaccatgggcgaggtcatgtttcgcggcaatgtcgtgatgaagggctattttcgcaatcctgacgccacccgaaaagcctttgaggggggctggtttcattccggcgatctgggtgttgttcatcctgacggctatatccagctcaaggaccgctcgaaggatgtcattatttccggcggagagaatatctcctccatcgaggtcgaagaggcgctgtatcgccatcccgcgattgccgtcaccgccgttgtcgccatgcccgacgagaaatggggcgaaacaccatgcgccttcatcgagctggccgaaggtgcagagatcgacaccgatgcgctcaggcaatggtgtcgtgaccaactcgccccctacaaggtgccgcgcaaatttgtcctgaccgaaatcccgcgcacctcaaccgggaaaatccagaaattcgccctgcgggaacaggcgaagtcgctctgctga

SEQ ID NO: 28311 - protein, 543 aa, Silicibacter sp. TM1040
MSANPYNTDLDRTPANYQPLTPLMFLERAATVFPEHTAIIHGPLRRSYAAFYARARQLGSALSHRGITRGDTVSALLPNTSAMLECHYGVPMCGAVLHSINTRLDAAIIAFQLDHAMSKVVIVDSEFMPLMQEALALCSVQPLLIEVDDPVYEGARIKTEAVDYDSFIADGDAEFAWLMPEDEWDAISINYTSGTTGDPKGVVSHHRGAYLLAQGNALTTTMGKHAVYLWTLPMFHCNGWCFPWTLSAIIGTHVCLRQVRADQIWNALADEGVTHLCGAPIVMSLMISAPADVQRPLDQTVQFFTAAAPPPEKLLADMKTAGFEVTHLYGLTETYGPAVVNDWHQSWSELPHDEQSRLKSRQGVRYLPLEGLNVLDPETLEPVPHDGETMGEVMFRGNVVMKGYFRNPDATRKAFEGGWFHSGDLGVVHPDGYIQLKDRSKDVIISGGENISSIEVEEALYRHPAIAVTAVVAMPDEKWGETPCAFIELAEGAEIDTDALRQWCRDQLAPYKVPRKFVLTEIPRTSTGKIQKFALREQAKSLC

SEQ ID NO: 28312 - DNA, 1632 bp, Silicibacter sp. TM1040
  CDS (1)..(1632): transl_table=11
atggggtggttggccgatgaaaccgggttggagcgcagggctgcaaattatgtcgcgctgacgccgctgtcccatttgcagcgggcggcgcatgtctttgccgacgaacccgccttggtctacggtcagactcggcgcagctatgcccagtatcatgatcgctgcacgcggttggcgtcggcattggccgggatgggggttgctccgggcgatgtggtggcaacattgctgcccaacatccccgcacaggcggaggcacattttggcgtgccagcctgcggggcggtgctcaatacgatcaacattcggctggatgtggatacggtggcctatatctttgatcacggtcaggccaaagtcgtgcttgtggacagtgaattcttgcctcttgccgaagccgccaaagaaagactgcagggcgcaggccctaccctcattgaagtgccggacacagaggctggccatgcggccagcggtcgctacaccacctatgaagacctgatcgcgcatggtgcaactgattttgactggatcatgcccgaggatgaatgggagagcctcgcgctcaattacacctctggcaccaccgggcgcccgaaaggcgtggtctaccatcaccgcggcgcctacctgatgaccatgggcacggtggtgtcgtggcggttgcaactgcgcccggtctacctgaccatcgtgccgctgtttcattgcaacggctggaaccacacttggatgatgccggtcctgggcggcaccgtggtttgctgtcgcaacaccaccgccgaagccatctataacgccatcgcggatgagggtgtcacccattttggcggcgcgcccatcgtgctcaacatgatcgtgaacgccaaggacaccgagcgccgcgcctttgaccacacggtcgaagtctttaccgccggtgcgccccctgccccggccacgctcgagaaaatcgaacgcctgggctttcatgtcacgcaagtctacgggcttacagagacctatggtcatgtgacggaatgcctctggaaaggcgacagctgggacgagctggatcaacaagggcgcgccgcaatcaaggcacgtcagggcgtggcctttccaatgatggaccacatcacggtcatggacgccgacatgcaacaggtccccatgaatggcagcgatcagggggaaatcgtgatgcggggcaactccgtcatgaaaggttacctaaagaacccggaagccactgaagaggcgtttgcgggcggctatttccactctggcgacatcgcgattcagcacccggatggctacatccagatcgcggaccgcgccaaggacatcattatctcgggcggggagaacatctcttccgttgaagtcgagggggtcctgatgggccatccggatgtgaaccttgcggcggtcgtggcaaaaccggacgagaaatggggcgaagtgccctgcgcctttgtggaactcaaagaaggcgcagatgtcgatgaggcatccctaattgcctttgcccgccaaacgcttgcgggctttaagacacccaaggcagtggtcttctgcgagctccccaagacctcgaccggaaagatccagaagtttgaactgaggaagagcttcgcaggggggagttga

SEQ ID NO: 28313 - protein, 543 aa, Silicibacter sp. TM1040
MGWLADETGLERRAANYVALTPLSHLQRAAHVFADEPALVYGQTRRSYAQYHDRCTRLASALAGMGVAPGDVVATLLPNIPAQAEAHFGVPACGAVLNTINIRLDVDTVAYIFDHGQAKVVLVDSEFLPLAEAAKERLQGAGPTLIEVPDTEAGHAASGRYTTYEDLIAHGATDFDWIMPEDEWESLALNYTSGTTGRPKGVVYHHRGAYLMTMGTVVSWRLQLRPVYLTIVPLFHCNGWNHTWMMPVLGGTVVCCRNTTAEAIYNAIADEGVTHFGGAPIVLNMIVNAKDTERRAFDHTVEVFTAGAPPAPATLEKIERLGFHVTQVYGLTETYGHVTECLWKGDSWDELDQQGRAAIKARQGVAFPMMDHITVMDADMQQVPMNGSDQGEIVMRGNSVMKGYLKNPEATEEAFAGGYFHSGDIAIQHPDGYIQIADRAKDIIISGGENISSVEVEGVLMGHPDVNLAAVVAKPDEKWGEVPCAFVELKEGADVDEASLIAFARQTLAGFKTPKAVVFCELPKTSTGKIQKFELRKSFAGGS

SEQ ID NO: 28314 - DNA, 1644 bp, Myxococcus xanthus DK 1622
  CDS (1)..(1644): transl_table=11
atgctgccaggccgcatgatggatttcccgctcacgctgagccacttgatggagcgcgcacggacattctacccgcgctcggaaatcgtcagccgcaacccggacaagtcgctgcaccgctacacgtacgcggacttctacgcgcgcacgtgccggctggccaacgcgctgacgcggctgggcgtgaaggcgggggaccgggtggccacgctgagctggaatcactaccggcacctggaggtgtattacggcgtgccgtgcatgggcgcggtggtgcacacgctcaacctgcgcttgcaccccaatgacctgggctacatcgcgcggcacgcggaagactccgtggtggtggtggaccgctcgctgctgccgctgttcgagaagttcaaggacgcggtgcccagcatccgccacgtcatcgtggtgccggacgcgggccccgcgccggaggggacgctcgactacgaagcactgctggcggccgagtccccggacttcgactttccccagctcgatgagaactccgcgtcgatgctctgctacacgtcgggcaccacgggcaatccgaagggcgtgctctacagccaccgctccaccgtgctgcacgccctggcgtgttgcatgacggacgtgacgggcatgcgcgaggcggacgcggtgatgccggtggtgcccatgttccacgccgccgcgtggggcctggccttcgacgccgtcctcaccggcgcgaagctggtgcttcccgggccgcacctggacccgccctccctgctggacttgatggcggcggagaaggtcaccctggcgggcggcgtgcccaccatctggattggaatcctcgcgttgctggaccaggcaccgaacaagtgggacctgagcagcatgcggtccatgctgattggtggctcggcggcgcctccgtcgctgattgagggcttccagcagcggcatggattggaagtggttcacgcgtggggcatgacggagatgagccccgtcggaacgatggcgaaggtcaaggggccgctgcggcaggcggcgcatgaggcgaagtcctcggcgcgggcgtcacaggggttcgcgctgcctttcgtggagacgcgcgtcgccagcgacgacggcacgctgctgccctgggatggggagacgatgggcgaactggaggtccgggggccctgggtcgcgtcgtcctacttcagcgatgagggcgcggaccgctacacgaaggacggctggttcaagacgggcgacgtggtgaccatcgactcgcacggttacgtgcgcatctgcgaccgcagcaaggacgtcatcaagtcgggcggtgagtggatctcctccgtggcgctggagaacgcgctgatggcgcacccggccgtgctggaggcggccgtcttcgccgggaaacatccgaagtgggatgagcgcccgctggccgcggtggcactgaaggaggggcagcaggtcacgaaggaggagctgaccgcgcacctggcgggccagttcgcgaagatgtggctgccggatgactatgtcttcgtcccgcaggtgccgcggacgtccaccggcaagttcctcaagacgaagctgcgtgaggactacggcgaccacctgctgaagaatccgaaggcagacgcggcgacgtag

SEQ ID NO: 28315 - protein, 547 aa, Myxococcus xanthus DK 1622
MLPGRMMDFPLTLSHLMERARTFYPRSEIVSRNPDKSLHRYTYADFYARTCRLANALTRLGVKAGDRVATLSWNHYRHLEVYYGVPCMGAVVHTLNLRLHPNDLGYIARHAEDSVVVVDRSLLPLFEKFKDAVPSIRHVIVVPDAGPAPEGTLDYEALLAAESPDFDFPQLDENSASMLCYTSGTTGNPKGVLYSHRSTVLHALACCMTDVTGMREADAVMPVVPMFHAAAWGLAFDAVLTGAKLVLPGPHLDPPSLLDLMAAEKVTLAGGVPTIWIGILALLDQAPNKWDLSSMRSMLIGGSAAPPSLIEGFQQRHGLEVVHAWGMTEMSPVGTMAKVKGPLRQAAHEAKSSARASQGFALPFVETRVASDDGTLLPWDGETMGELEVRGPWVASSYFSDEGADRYTKDGWFKTGDVVTIDSHGYVRICDRSKDVIKSGGEWISSVALENALMAHPAVLEAAVFAGKHPKWDERPLAAVALKEGQQVTKEELTAHLAGQFAKMWLPDDYVFVPQVPRTSTGKFLKTKLREDYGDHLLKNPKADAAT

SEQ ID NO: 28316 - DNA, 1641 bp, Mycobacterium sp. MCS
  CDS (1)..(1641): transl_table=11
atgtacagcaccatgcaggacgtcccgctgacagtcgccgcgattctgcggtacgccgccacagtccacggcgaccgaacggtgacgaccgcgacgggaaacggtggttaccggcacgccacctaccgtgaggtcggacagcaggcggcccgactggcccatgcgctgcgccggttcgggatcgagggtgacgaccgcgtcgggacgttcatgtggaacaaccaggagcatctggaggcctacgtcgcggtgccctcgatgggcgcggtgctgcacacgctgaacatccggctgttcccggagcagatcgagttcgtcgcctacgaggccgaggaccgcgtgctgatcgccgatctgtcgctggcgccggtgcttgctccggtgctgcgctcgctggagaccgtgcacacggtgatcgccgtcggtgagggtgacctggcgccgttcgaggagtcgggcaaacgagtggtgcgctaccacgaggtgaccgccgccgaatccgacgagtacgactggcccgacatcgacgagaactccgctgccgcaatgtgttacaccagcggaaccaccggccacccgaagggcgtcgtatacgggcaccggtcgagctacctgcactcgatggcggtctgcgggggcaacggactcgggatgagcttctccgacaaggcgctgccgatcgtgccgatgttccacgccaatgcctggggtctgccctacgccgccctgatggccggagctgacctggtgcttcccgaccgcttcatggacgccacgtccctcgtcgacctgatcgagacgcagcggccgactgtcgccggtgcggtacccacaatctggaacgacgtcatgcaccacctcgaccagaaccccggccacgacatctcctcgctgcggctcgtcggctgcggcgggtcggcggtgccggtgtcgctgatgaaggcgttcgaggagaagttcggcgtgcagatccggcagttgtgggggatgacggagacgtccccggttgcgacgatcgcgtggccgccgccggacacccccgcggagaagcactggcagatccgcagcacccagggccgtccgctctgcggtgtggaggcccgcatcgtcgacgacgacggtgcggtgctgcccaacgacggtgagtcagtcggtgaactcgaggtccgcgggccctggatcaccgggtcctattaccgcaacaccgacgactcgaagttccagtcgggttggctgcgcaccggcgacgtgggccgtatcgatccgcagggttacatcaccctgaccgaccgcgccaaggacgtcatcaagtccggcggtgagtggatctcgtcggtggagttggagaaccacctcatcgcgcatccggcggtgcgagaagccgccgtggtcggggtgcccgacgagcgttggcaggagcggccattggcggcggtcgtcgtccaggagggtgcccaggtggacgctgacgaactgcggaacttcctggccgacaaggttgtccggtggtggcttcccgagcgctggaccttcgtcgacgaaatcccacgcaccagcgtcggtaagtacgacaagaaggtgatccgggcgcgctacgcggacaacgcataccaggtcgccgacctgcgcgagcacacgtag

SEQ ID NO: 28317 - protein, 546 aa, Mycobacterium sp. MCS
MYSTMQDVPLTVAAILRYAATVHGDRTVTTATGNGGYRHATYREVGQQAARLAHALRRFGIEGDDRVGTFMWNNQEHLEAYVAVPSMGAVLHTLNIRLFPEQIEFVAYEAEDRVLIADLSLAPVLAPVLRSLETVHTVIAVGEGDLAPFEESGKRVVRYHEVTAAESDEYDWPDIDENSAAAMCYTSGTTGHPKGVVYGHRSSYLHSMAVCGGNGLGMSFSDKALPIVPMFHANAWGLPYAALMAGADLVLPDRFMDATSLVDLIETQRPTVAGAVPTIWNDVMHHLDQNPGHDISSLRLVGCGGSAVPVSLMKAFEEKFGVQIRQLWGMTETSPVATIAWPPPDTPAEKHWQIRSTQGRPLCGVEARIVDDDGAVLPNDGESVGELEVRGPWITGSYYRNTDDSKFQSGWLRTGDVGRIDPQGYITLTDRAKDVIKSGGEWISSVELENHLIAHPAVREAAVVGVPDERWQERPLAAVVVQEGAQVDADELRNFLADKVVRWWLPERWTFVDEIPRTSVGKYDKKVIRARYADNAYQVADLREHT

SEQ ID NO: 28318 - DNA, 1572 bp, Rubrobacter xylanophilus DSM 9941
  CDS (1)..(1572): transl_table=11
atgggcgagaaggtctaccgcacggagctcacgccggtgagctttctgcgccgcagcgcctttatgttcccggagaagaccgccgtggtctacggcgacaggcgctacacctaccgggagttcgaacggcgggtcgaccggctcgcctccggcctgagggaggcgggcctgcgcgggggcgaccgggtggcgttcatctgccccaacaccccgccgctgctcgaggcccactttgcggtccccgccgccgggggcgtgctcgtggccataaacacccgcctgagcccggaggaggtcgggtacatcctcgagcactcgggggcccggttcgtcttcgccgacgccgggctcgagcacctcgcctccggcgcggaggcgcagcgggtgcgcatagacgacaccggggcggagggcgacccctacgaggacttcctcgccgccgccccgccggagccgccggagagccccctcaaggacgaggaggagaccatctccctcaactacacctccggcaccaccggcaggcccaagggcgtgatgtacagccaccggggggcgtacctctgcgccctcggcaacgttatcgaggccgggatgggctacgagacccgctacctgtggaccctccccatgttccactgcaacgggtggacctacccctgggccgtaacggcggtggccgggacccacgtctgcctgcggcgggtggagcccgggcgcatctggaggctcttcaaagaggagggcataacccactactgcgccgcccccaccgtgcaggtcgggatcataaacgacgaggcggcgcaccggctgccgcgcccggtgcgggccatgatcgcgggggccccgccctcccccaccctgatagccggcctcggcgacctcaacatagacccggtgcacatctacggcctcaccgagacctacggccccatcaccacgagcgccccccgcaaggagtgggaggagctgccggcggaggagcgggcccgcctgctggcccgccagggcaacgcctacgtcaccgcggacatagtgcgcgtggtggacgagaacctgcaggacgtgccccgcgacggggagacgatgggcgagatcgtgatgcggggcaacatggtgatgaagggctacttcgagaacgaggaggccacccgcgaggccttcgagggcggctggttccactccggggacgtggccgtctggcaccccgacggctacgtggagatccgggaccgccgcaaggacatcatcatctccggcggggagaacatctccaccatcgaggtggagcaggcggtcgtgagccacccggcggtgctggagtgcgcggtggtcgccatccccgacgagaagtggggcgagcgcccgaaggcgttcgtgacgctcaagaaggggcataacgccacggaggaggagatcatcgagcactgcaaggccaagatagcccgcttcaaggcgccctcggcggtggagttcgtggaggagctgccgaagacctccaccggcaaggtgcagaagttcgtgctgcgcgagaaggagtgggcggggcaggagaagcgggtgcactga

SEQ ID NO: 28319 - protein, 523 aa, Rubrobacter xylanophilus DSM 9941
MGEKVYRTELTPVSFLRRSAFMFPEKTAVVYGDRRYTYREFERRVDRLASGLREAGLRGGDRVAFICPNTPPLLEAHFAVPAAGGVLVAINTRLSPEEVGYILEHSGARFVFADAGLEHLASGAEAQRVRIDDTGAEGDPYEDFLAAAPPEPPESPLKDEEETISLNYTSGTTGRPKGVMYSHRGAYLCALGNVIEAGMGYETRYLWTLPMFHCNGWTYPWAVTAVAGTHVCLRRVEPGRIWRLFKEEGITHYCAAPTVQVGIINDEAAHRLPRPVRAMIAGAPPSPTLIAGLGDLNIDPVHIYGLTETYGPITTSAPRKEWEELPAEERARLLARQGNAYVTADIVRVVDENLQDVPRDGETMGEIVMRGNMVMKGYFENEEATREAFEGGWFHSGDVAVWHPDGYVEIRDRRKDIIISGGENISTIEVEQAVVSHPAVLECAVVAIPDEKWGERPKAFVTLKKGHNATEEEIIEHCKAKIARFKAPSAVEFVEELPKTSTGKVQKFVLREKEWAGQEKRVH

SEQ ID NO: 28320 - DNA, 1629 bp, Rubrobacter xylanophilus DSM 9941
  CDS (1)..(1629): transl_table=11
atgcaggggctcaccatggactaccagctcaccctgccggccgtcctgaagcgggcggaccagctcttcgggcgcaaggagatcgtcacccgcaggccggacaagagcttccaccgctacacctacgcggacttcgtccgccgggccaagaagctcgcggtcgccctcggcgggctcggcctgcagaagagcgaccgggtcgccaccctcggctggaacacctaccagcacctggaggcgtacttcggggtcccctcagccggtctcgtgctgcacaccctaaacccccgcctccccgccgacgagctggcgtacatcatcgaccacgccggggacagggtgctcctggtcgacgagaccatggtccggctgctggacggcttcagggacaaggtaaacctggagcacgtcttcgtcttcacctactcccccgagggggaggtgccggaggggctgcggggctacgaggagctgctccaggaggccgacgagggcgacttcgcctacccggacctcgacgagcgggacgcggccgccatgtgctacacctccgggaccaccggcaggcccaagggcgtgctctacagccaccgctgcatctgcctgcactcgctcatcacctccgtggccgaggccttcggcctctccgaggcggactccgtgctccccgtggtccccatgttccacgtcaacgcctggggcatccccttcgcggccaccatgcacggggccaagcaggtcttcccgggcccccacctcgacccgcagagcctgctcgaggacttcgagcaggagaaggtcaccttcaccgccggggtccccaccgtcttcctcggcatcctgcgcgagctggacaggcagcccggcaggtacgacctctccagcctcaaggccatgggcatcggcggctcggcggcgccggaggggatgatccggggcttcagggagcgccacgggctcaccgtgctgcacgcctgggggatgaccgagatggcgcccgtggggaccgccgggcacctcaccagcgacctgctgcaggagccggaggacgtgcagtaccgctaccgggccaagcagggcatcccgctgccgttcatcgagatccgggcccgcggcgcggaggggctggtgccctgggacggcaggaccatgggcgagctggaggtccgcggcccgacggtcgcgagctcctactacgaggcccccgaggcggcggacaagttcaccgaggacggctggttccgcaccggggacatcgtcaccatagacgagcggggctacatcgagatccgcgaccgcgacaaggacctggtcaagagcgggggggagtggatctcctcggtcgagctggagaacgccctcatgggacacccggccgtcgccgaggccgcggtcatcgcggtcccccaccccaagtggcaggagcggccgctcgccgtggtggtgctcaaggagggcgagagcgcaacgcccgaggagctgatccagtccatcgcccccaggttcgagaagtggcagctgccggacgccgtggagttcgtggacgagatcccgaagacggcgaccggcaagttcctgaagacccgcctgcgcgagatgttcaaggactaccagctcgcaaagagctag

SEQ ID NO: 28321 - protein, 542 aa, Rubrobacter xylanophilus DSM 9941
MQGLTMDYQLTLPAVLKRADQLFGRKEIVTRRPDKSFHRYTYADFVRRAKKLAVALGGLGLQKSDRVATLGWNTYQHLEAYFGVPSAGLVLHTLNPRLPADELAYIIDHAGDRVLLVDETMVRLLDGFRDKVNLEHVFVFTYSPEGEVPEGLRGYEELLQEADEGDFAYPDLDERDAAAMCYTSGTTGRPKGVLYSHRCICLHSLITSVAEAFGLSEADSVLPVVPMFHVNAWGIPFAATMHGAKQVFPGPHLDPQSLLEDFEQEKVTFTAGVPTVFLGILRELDRQPGRYDLSSLKAMGIGGSAAPEGMIRGFRERHGLTVLHAWGMTEMAPVGTAGHLTSDLLQEPEDVQYRYRAKQGIPLPFIEIRARGAEGLVPWDGRTMGELEVRGPTVASSYYEAPEAADKFTEDGWFRTGDIVTIDERGYIEIRDRDKDLVKSGGEWISSVELENALMGHPAVAEAAVIAVPHPKWQERPLAVVVLKEGESATPEELIQSIAPRFEKWQLPDAVEFVDEIPKTATGKFLKTRLREMFKDYQLAKS

SEQ ID NO: 28322 - DNA, 1677 bp, Mesorhizobium sp. BNC1
  CDS (1)..(1677): transl_table=11
atggataagtacgacgatggattgccgcgttgcgcggccaattatcaacccatgacgcccatcagctttctggagcgggcggcactgacctatcctgaccatccggccgtcatccatggcagcaccaggatcacctatcgcgagttctgggaaaactgccgccggttggcatcggccttggtcaggctcggtatcaggcggggcgacaccgtgtcggtgctgctttccaatacgccgccgatgatcgaagcgcattacggcgtcccgatggcgaacggcgccgtgctgcattcgctgaactaccgtctagatgcgcaggcgatcgccttccagctcgagcattcggaaagcaaggtgctgatcgtcgatcgcgagttctccagccttgcgtcggacgcgcttgccttgctgaagaattcaccgatcgtgatcgactatgacgatcccgaatatccggacgatgctccgtatccgaaagggccatttatcggctctctggaatatgccgcgttcctgcgtagcggcaatccggatttcctgcctcctcctcccagggacgaatgggacgccatctcactcaactacacctcgggcacgaccggcaatccaaagggagtcgtatgccaccatcgcggcgcagcgctcatggcgttgaacaagacgatccatggcgagatgggaaagcatccggtctatttgtggactttgcccctgttccactgcaacggctggagtttttcctggaccgtcgcggttcaggcgggaacccatgtctgcctgcgttgggttcgggcacgcgtcgtctatgatttgatcgcggaccatggcgtgacgcatctttgcggcgctccgatcgtcatgtccactttgctgaatgcccccgacgaggataagcgccgcttctcccacgaggcgatcttcatcacggctgccgcgcctccgccggaggctgtgctggctgcgatgcgcgacgccggatttcgcgtcctgcacctctatgggctgaccgagacctatggccccgccatggtcaatgaatggaaagcggagtgggatgcccttccgccagccgagcaggcagcccacaaggcgcgccaaggcgtacgctatctttccctatcggaagttgccgttctggattcggagacgatgcagccggttcccgccgatggcgagaccatgggcgaggtcatgatgcgcggcaacgtggtgatgaagggctatctgaaaaatcagaaggcgaccgaagaggcattctcaggcggctggttccataccggcgatctcggcgtgatgcaccccgacggctatgttcagctcaaggaccgctcaaaagacatcatcatttcgggtggcgagaacatctcttccatagaagtggaggatgccctgtatcgtcatcccaaggttatgcagtgcgccgtagtcgccatgcccgatgagaaatggggggagcggccggtggcattcgtcgaacttcgcccgaatgttcatgcagatgaagcagaaatcctttcctattgcaaagcgacgctcgctcgcttcaagtgcccctcgaggatcatcttcgagaccttgcccaagacttctaccggcaagatacagaagttcgcgctgcgcgcccgagccaagcaactggcagcggatctcgccttccaaaggcaaggcgaggcgtga

SEQ ID NO: 28323 - protein, 558 aa, Mesorhizobium sp. BNC1
MDKYDDGLPRCAANYQPMTPISFLERAALTYPDHPAVIHGSTRITYREFWENCRRLASALVRLGIRRGDTVSVLLSNTPPMIEAHYGVPMANGAVLHSLNYRLDAQAIAFQLEHSESKVLIVDREFSSLASDALALLKNSPIVIDYDDPEYPDDAPYPKGPFIGSLEYAAFLRSGNPDFLPPPPRDEWDAISLNYTSGTTGNPKGVVCHHRGAALMALNKTIHGEMGKHPVYLWTLPLFHCNGWSFSWTVAVQAGTHVCLRWVRARVVYDLIADHGVTHLCGAPIVMSTLLNAPDEDKRRFSHEAIFITAAAPPPEAVLAAMRDAGFRVLHLYGLTETYGPAMVNEWKAEWDALPPAEQAAHKARQGVRYLSLSEVAVLDSETMQPVPADGETMGEVMMRGNVVMKGYLKNQKATEEAFSGGWFHTGDLGVMHPDGYVQLKDRSKDIIISGGENISSIEVEDALYRHPKVMQCAVVAMPDEKWGERPVAFVELRPNVHADEAEILSYCKATLARFKCPSRIIFETLPKTSTGKIQKFALRARAKQLAADLAFQRQGEA

SEQ ID NO: 28324 - DNA, 1605 bp, Rhodococcus sp. RHA1
  CDS (1)..(1605): transl_table=11
gtgtccggaccgaccctctcgaccgcgaaccacacaccgctcagcccgctgcgcttcctcgagcgctcggcgagcgtgttcccggaccggattgccgtcgttcacggcgaccgccgctacagctaccgcgagttcggcgacgaggtcgagcgactcgcccgggtcctgcggagccggatcgagcccggcgaccgcgttgcattcctgtgcccgaacacccccgagatgctgttcgcgcacttcgcggtgcccctcgcaggcggcgtcctcatcgcgctgaactcgcggctggcgggccgcgaactggagtacatcctcgagcactccggaacgagcctgctgttcgtcgactccgaactggtcggatccgtcgcgaccgcccgcgaggcggtcccgagtctgcgcgaggtgatcgagatccccgactcgacgatcgcgcggccgatggtcccggaggggatcgtgaccgggatgtacgccgacttcctcgccgccgcggacgacgtggacggcaccccgctgcactggggtgtcgacgacgaacagcaggtgatcgcgatcaactacacgtccggaaccaccgggaaaccgaagggcgtgatgtacacgcaccgcggtgcctacctcaactccctcggcgagacgttccacaacggcttcgccgggtccaccaagtacctgtggacgctgccgatgttccactgcaacggctggtgcaccccgtgggcggtcacgcaggccgccggcactcacatctgcctgcgggcggtgcgagccgatgcgatctgggacgccatcgacaccctcggtgtcactcacctgtgcggcgctcccgcggtgtgctccaccattgccgaagcgccccaggcacatccggtcgacgccctgcgaatcaccaccgccggggcaccgccgtcaccgacggtgattgcccagctggaggcgatcggcgtcaccgtcgtccacgtgtacgggctgaccgaggtctacgggccgtacacgatctgcgagtaccaggactcgtggagcgatcggaccgccgaggagcgtgcgtccctgctgtcccggcagggcgtgggcatggtgcaggcggagaacgcccgcgtggtcgacgcgcagatgaacgacgtgccggcagacggcgagaccatgggggagatcgtgctgcgcggcaacaacgtgatgctcggctactaccgcgatcctgaggcgactgcggaagcgttcgcgggtggctggttccacacgggcgatctcggcgtcatgcacgcggacggttacatccagctcaaggaccgcgcgaaggacatcgtcatctccggcggcgagaacatctcgaccgtcgaggtggagcaggcgatgatgacgcatcccgccgtactcgacgtcgcggtcgtcggtgtcccacatcccaagtggggtgagcggcccaaggcattcgtcatcgtgaagaagggggccaccgtcacggccgaggaactcgtcgagcacacccgtgggcgcattgcgaagttcaaggttcccgacgagatcgtctttcccctcgaactcccccgcactcccaccgggaaggtcctcaagttcgaacttcgaaattcgaactga

SEQ ID NO: 28325 - protein, 534 aa, Rhodococcus sp. RHA1
MSGPTLSTANHTPLSPLRFLERSASVFPDRIAVVHGDRRYSYREFGDEVERLARVLRSRIEPGDRVAFLCPNTPEMLFAHFAVPLAGGVLIALNSRLAGRELEYILEHSGTSLLFVDSELVGSVATAREAVPSLREVIEIPDSTIARPMVPEGIVTGMYADFLAAADDVDGTPLHWGVDDEQQVIAINYTSGTTGKPKGVMYTHRGAYLNSLGETFHNGFAGSTKYLWTLPMFHCNGWCTPWAVTQAAGTHICLRAVRADAIWDAIDTLGVTHLCGAPAVCSTIAEAPQAHPVDALRITTAGAPPSPTVIAQLEAIGVTVVHVYGLTEVYGPYTICEYQDSWSDRTAEERASLLSRQGVGMVQAENARVVDAQMNDVPADGETMGEIVLRGNNVMLGYYRDPEATAEAFAGGWFHTGDLGVMHADGYIQLKDRAKDIVISGGENISTVEVEQAMMTHPAVLDVAVVGVPHPKWGERPKAFVIVKKGATVTAEELVEHTRGRIAKFKVPDEIVFPLELPRTPTGKVLKFELRNSN

SEQ ID NO: 28326 - DNA, 1539 bp, Rhodococcus sp. RHA1
  CDS (1)..(1539): transl_table=11
atgcacatcccatttacggttacagactttctggagcggggagcggccggtttccctgacagcgtggccgtgatcgacgagccggaacaaccgggcgagtcggtcgggcaggtgacttttcgggaactcgcccaccgcgtgtgtgcctggcaagcaggattcgaccgtctgggcatcagggtcggcgaacgggtcgccgtcgtcagccacaattcggcccgactgctcgagctcttgtacgcggtgccggcgagcggccggatttgtgttccgatcaatttccgtctgtctccggcggaggtcgattacatcgtcggagattgcggcgcgtcagtgcttcttgtcgatcccgagctggaagaggcgttgtcgggtatcaaggttcggcaccggttcgtactcgggaagcacacagacgcggatctgatgcgcttcgatacggagccggccccctgggcgtcgcccacggaggagtcgacggcaacaatcaactacacctccggcaccaccgcgcgcccgaagggtgtcgagatgactcatcgtaatctttgggtcaatgccgtcacactcgcgatgcacacccgtgcgtgggaacgcgatgtgtacatgcacacgttgccgatgttccactgcaacggttgggggatgccgttcgggatggcaggactgggcgcgaagcagatcgtgttgcgcaaggtcgacggcaccgaaatcctccggcgggtggaggaacacggtgtgacgttgatgtgcggggctccggcggtgtggaacgcggtgctcgatgctgcccggtcctggcagggagagattcctggtcgcgatcgggtgcgggtggtgtgcgccggcgctcctccgcccagccgtaccatcgcgcgcctgagcagcgagttggggtgggaactgcagcagatctacgggctcacggaaacatcgccgctgctgactttcaaccggtcgctgcctgcggatgacggtcttgatcttgaggaacgagcgcacagactgacccgcgccggacttcccgccctcggtgcacggcttcatatctccaactcgggtgaagttctggcgcgttcgaacgtcgtgatgaacggatactggaacaaccccgaggcgaccgacgaggcgctgcgtgatggttggttccacacgggagacggcgggatgatcgacggcgagggccaactgacgatttccgaccgaaagaaggatgtgatcgtcaccggtggcgagaatgtgtcgtcgattgaggtggaggaatgcatcttcagccatcccggtgtgacccaggtcgcggtgatcggcgtaccggacgagaaatggggcgagaccgtcaaggcgctggtggtcaccacgggtccctccacagtctccgaggccgagatcatcgcacactgcaagcagcacctggcgggctacaaggcgccgacttcggtggagtttcgtgactcgattccacataccgcgacgggcaagatccagaagttcaagctccgagcgccgtattgggaagggtcgacgcgcggcgtgaattga

SEQ ID NO: 28327 - protein, 512 aa, Rhodococcus sp. RHA1
MHIPFTVTDFLERGAAGFPDSVAVIDEPEQPGESVGQVTFRELAHRVCAWQAGFDRLGIRVGERVAVVSHNSARLLELLYAVPASGRICVPINFRLSPAEVDYIVGDCGASVLLVDPELEEALSGIKVRHRFVLGKHTDADLMRFDTEPAPWASPTEESTATINYTSGTTARPKGVEMTHRNLWVNAVTLAMHTRAWERDVYMHTLPMFHCNGWGMPFGMAGLGAKQIVLRKVDGTEILRRVEEHGVTLMCGAPAVWNAVLDAARSWQGEIPGRDRVRVVCAGAPPPSRTIARLSSELGWELQQIYGLTETSPLLTFNRSLPADDGLDLEERAHRLTRAGLPALGARLHISNSGEVLARSNVVMNGYWNNPEATDEALRDGWFHTGDGGMIDGEGQLTISDRKKDVIVTGGENVSSIEVEECIFSHPGVTQVAVIGVPDEKWGETVKALVVTTGPSTVSEAEIIAHCKQHLAGYKAPTSVEFRDSIPHTATGKIQKFKLRAPYWEGSTRGVN

SEQ ID NO: 28328 - DNA, 1599 bp, Rhodococcus sp. RHA1
  CDS (1)..(1599): transl_table=11
atgacgcctttgaaattccttgagcgctcggctgaagtacatccgaacaagaccgcggtcgtagacggggggcggcgcatatcgtattccgacctcgcatccatagtcacacgtcttgcgcacggtcttcgccggtcaggagtcggacccggtgaccgagttgcctatctggcaaccaactcggctgagctattggcggcccactatgcggtcccacttatcggcgcggtactggtcgcaatcaacacgcgattgtcgccaccagaaatcgagtacatatgtaaccactctgaggctgttcttctcctcggcgaacccgtcttcctcgaacagttgcaggatacgtcgctgctgacagttcgggagaccgtacaactaccgcagcaggacggtggctacgtggacaccgcgcagtcacacctcacctatgacgcactcatggcacgcgggtcggaagagcgtttgccctgggaggtcgacgacgagacccgaaccatctcgatcaactacacgtcgggcaccaccggtcgcccgaagggggtgatgtacacccatcgtggcgcgtacctcaactctctcagccagattcaccatcagcacttcgacatcgacactaaatacctgtggacactgccgatgttccactgcaacggctggtgcggcccctgggcagtcactgccgcatccggaactcacgtatgcatccgtgtggttcgcggtgacgcgatgtggtcactcatcgacagcgaaaagatcgaccatatgagtggtgcaccgacggttctcacgacgctcgccactgccgatggagcgcatccgctcgaccgcagcatgaccatcaccacagcaggagctccacccagcccaaccaccatccgggcggtcagagcactcggagccgaaatcgtgcatgtgtacggcctcaccgagacgtacggcccatgtgcagtatgcgaacctcaggcagactgggccgcgctcgatgaggacacactggcgaggctgctggcgcgtcaaggagtgggaatgctcgcctccggcccagtgcgggtagtccgcactcaacgcggtccgcatggcgaactcgtcgacgtagccagcaacggcaccgagatcggcgagatcgtcatgcgcggaaatatagtcatgaaggggtacttcggcgacgattcggcaaccgcggaggccttctccgggggctggttccattccggcgacctgggagtcatgcacccagatggctacatacagctcatggaccgcgccaaagacatcgtcatatccggcggcgagaacatctcgacaatcgaggtcgagcaagttctcatgtcccacccatcggtgttggacgtcgcggtgatcggcgttccggacacgaaatggggagaacgacccaaagcgttcgtggttctgaagacgaattccaccgtctccgactgcgacctgacgcagttcgcgcgagagcacattgcggcgttcaaggcgccacgagaaatcgtgttcctacccgagctaccgaagacctcgaccggtaagactcgcaagaacgagttacgcgaccgcgaatggcatggagagcgcgagcggatccgaggctga

SEQ ID NO: 28329 - protein, 532 aa, Rhodococcus sp. RHA1
MTPLKFLERSAEVHPNKTAVVDGGRRISYSDLASIVTRLAHGLRRSGVGPGDRVAYLATNSAELLAAHYAVPLIGAVLVAINTRLSPPEIEYICNHSEAVLLLGEPVFLEQLQDTSLLTVRETVQLPQQDGGYVDTAQSHLTYDALMARGSEERLPWEVDDETRTISINYTSGTTGRPKGVMYTHRGAYLNSLSQIHHQHFDIDTKYLWTLPMFHCNGWCGPWAVTAASGTHVCIRVVRGDAMWSLIDSEKIDHMSGAPTVLTTLATADGAHPLDRSMTITTAGAPPSPTTIRAVRALGAEIVHVYGLTETYGPCAVCEPQADWAALDEDTLARLLARQGVGMLASGPVRVVRTQRGPHGELVDVASNGTEIGEIVMRGNIVMKGYFGDDSATAEAFSGGWFHSGDLGVMHPDGYIQLMDRAKDIVISGGENISTIEVEQVLMSHPSVLDVAVIGVPDTKWGERPKAFVVLKTNSTVSDCDLTQFAREHIAAFKAPREIVFLPELPKTSTGKTRKNELRDREWHGERERIRG

SEQ ID NO: 28330 - DNA, 1629 bp, Rhodococcus sp. RHA1
  CDS (1)..(1629): transl_table=11
atggaccctttcaccactcaattgacgccactgtcattcctacgtaggtcagccgatgtctatccggacaagaccgccgtcatctatggcgacgaggcgctcacctatcgggcattggccgaggcggtcgaacttcgcgtccgcgcactgcgcgccgccggggtgcgccctggcgaccgtgtggcgtatctgatgccgaacgtgccggagatgttgatcgcacatttcgcggtaccgctggccggtgcggtgctggtcgcaatcaacacccggttgtccggtgaggagatccgctacatcgtcgaccacagtcaatcgacattcctggtgatagacaccgcattgagctcttcgatcgtggatgtggcagagaagttcgagactgttgagacgatcgtgacggtaaccgacgatgccgcgtcggggactgccgctctcgccgaatgccgcgatttctccgacctactggccatggtgcacggcgtgaatctgcccgcaatcgagtgggcggtcgacgatgagaggtcgctgctttcaatcaactacacctccggtacgaccgggaagccaaagggggtgatgtactcacaccgcggcgcctatctcaacgccatcggtgaactgatccactcgaaacacgacgtcgacagcgtctatctctggacactaccgatgtttcattgcaacggttggtccaccggttgggcagtcgcggccgccggcggaacacaggtctgtctgcgagaggtccgaagcgagctgatctggaatctcatcgaccggcacggtgtcactcacctcaatggcgcccccaccgtcatcatcacaatcatgaacagcggtcgcgcgcacaagctcgaccggcccatcattgtcaccaccgccggggcgccgcccagcccgaccacgatcgagcgtatggccgatatcggcttcgaggtcgtccacgtgtacggactgaccgagacatacggtccctactcgatctgcgagcctcagagcagctggaagtctctggatgcggccacccgagccaggagaatggcccgacagggtgtcgggatgattcaggcagatcgaatgcgggtggtgtccacagagagcccggaaggactgctggtcgatgtcccggccgacggcgtgaccatcggtgaaattgtgatgcgcgggaacaacgtcatgagcggctactatcgcaatcccgaagcgacgcgatctgctttcggcggtgggtggttccactccggcgaccttggtgtcatgcaccctgacggctacgtcgaactgcgtgatcgcgccaaggacatcatcatatccggcggggagaacatttcgacggtcgaggtagagcaggctttgatgactcatcctgccgtgatcgaagcggcggtggtgggtgtgcccgacccacagtggggggagcgtcctaaggccttcgttgtggtcatcgagcccggggatgtaactgcagccgacctcctcgaacatgttcagacacgtatcgctcggtacaaggcacctcgcgagatcgttgtagtcccaaacctgcccaagacctctaccggcaagatccgcaagttcgagctccgggagagcgagtggggcgaccgcgacgcacggatcaattga

SEQ ID NO: 28331 - protein, 542 aa, Rhodococcus sp. RHA1
MDPFTTQLTPLSFLRRSADVYPDKTAVIYGDEALTYRALAEAVELRVRALRAAGVRPGDRVAYLMPNVPEMLIAHFAVPLAGAVLVAINTRLSGEEIRYIVDHSQSTFLVIDTALSSSIVDVAEKFETVETIVTVTDDAASGTAALAECRDFSDLLAMVHGVNLPAIEWAVDDERSLLSINYTSGTTGKPKGVMYSHRGAYLNAIGELIHSKHDVDSVYLWTLPMFHCNGWSTGWAVAAAGGTQVCLREVRSELIWNLIDRHGVTHLNGAPTVIITIMNSGRAHKLDRPIIVTTAGAPPSPTTIERMADIGFEVVHVYGLTETYGPYSICEPQSSWKSLDAATRARRMARQGVGMIQADRMRVVSTESPEGLLVDVPADGVTIGEIVMRGNNVMSGYYRNPEATRSAFGGGWFHSGDLGVMHPDGYVELRDRAKDIIISGGENISTVEVEQALMTHPAVIEAAVVGVPDPQWGERPKAFVVVIEPGDVTAADLLEHVQTRIARYKAPREIVVVPNLPKTSTGKIRKFELRESEWGDRDARIN

SEQ ID NO: 28332 - DNA, 1557 bp, Rhodococcus sp. RHA1
  CDS (1)..(1557): transl_table=11
atgactctgagcaatttcgcggttctgacaccgacccagtatctggatcgcgcagcggttaccgtcgcgcaccgcaatgccatcatcgatggtgacctgaccttcacctatcgggaattcgccgaacgctcgaacaggctcacgggcgtgctcgcggctcgggggataggcgtgggcgaccgcgtggccgtgttgtgcacgaacagccacatcatgctcgaactgcataacgcggtgcccctgcgaggtgcggtcctggtcccactcaacattcgactgtccgaacccgaactcgactacattctggagcattcaggtgcgacattgctggtcgccactcatgagttcgcagacatagccggatcgcttgccgcaagacgaaacatcccgctgctgcaggcggacgggagtgacagtgcctacgagacggaactcgtgtccgcggagccggccagagtcgagtccgacgacgataggacgcttctggcgatcaactacacgagcggcaccaccggtcgccccaaaggcgtgatgtaccaccatcgcggcgcctacttgcaggcactcgcgatgacctaccacatgggtctgggacccggctcacgctacctgtggaccctgccgatgttccactgcaacggatggtgcttcccctgggccgtcacggctgccggtggaacacacgtctgtctccgggccgtcgaccccagcgagatctggagacacatccgagaaggtgccacccacttcagtgcggctccaacggtcctgtcgatgatcgccgaacatgcggcggcggccgacggtcccacggcgaatccggtcaaggtgtcgaccggtggcgcaccaccgtctccgacactcctccggaggatggtgaagctgaatatgcagatcacccatctgtacggaatgaccgagacgttcgggccggcgatcatcaacctgtggcaacccgagtgggattcactcggtgatcaggccgcagccgagaagcaggcccgccagggtgtccccaacgtcatcacgggcggcgcccgggtggtggattcagccgggaaggacgtcgagcccgacgggcaagcgatcggcgagctcatcatcgagggcaacaacatcatgttgggctactaccgcgacgatgccgcgactgccgcggccaacgtcgacggatggctgcgcaccggcgatctggcagtcatgcatgccgacggctacgtggagatccgtgaccgtctcaaggacgtgatcatctccggtggagagaatatcgcctcggtggaggtcgagcgtgttctcgacagccatccagctgtcgtggaaagtgcggtggtggggatcccccacgaccggtggggggaggtgccaattgcattcgtcacggtccgccccggaacggaggtccacgaagaggagttggttgagttcgcacgtcaacacctggcacgcttcaaggtgcctaagaagatcatcttcgcaaacttaccccggacgtccacaggcaagattcaaaagaatgtccttcggaatgccactgtggacgtgatcgggcagtga

SEQ ID NO: 28333 - protein, 518 aa, Rhodococcus sp. RHA1
MTLSNFAVLTPTQYLDRAAVTVAHRNAIIDGDLTFTYREFAERSNRLTGVLAARGIGVGDRVAVLCTNSHIMLELHNAVPLRGAVLVPLNIRLSEPELDYILEHSGATLLVATHEFADIAGSLAARRNIPLLQADGSDSAYETELVSAEPARVESDDDRTLLAINYTSGTTGRPKGVMYHHRGAYLQALAMTYHMGLGPGSRYLWTLPMFHCNGWCFPWAVTAAGGTHVCLRAVDPSEIWRHIREGATHFSAAPTVLSMIAEHAAAADGPTANPVKVSTGGAPPSPTLLRRMVKLNMQITHLYGMTETFGPAIINLWQPEWDSLGDQAAAEKQARQGVPNVITGGARVVDSAGKDVEPDGQAIGELIIEGNNIMLGYYRDDAATAAANVDGWLRTGDLAVMHADGYVEIRDRLKDVIISGGENIASVEVERVLDSHPAVVESAVVGIPHDRWGEVPIAFVTVRPGTEVHEEELVEFARQHLARFKVPKKIIFANLPRTSTGKIQKNVLRNATVDVIGQ

SEQ ID NO: 28334 - DNA, 1698 bp, Hyphomonas neptunium ATCC 15444
  CDS (1)..(1698): transl_table=11
atgcattacgccgagcttttgaaggcacgtgatgagctgaccggaccgggcggcgccttcgagattgccgaagccgatgtgctgggaaaccgtatccgtaccttcaagaatgcccctgcgagcgtgcgggacgtatggctttcaacgctacagttcgccgaacggccttacctcgtctatcaggatgagcgcctgacttatgcgcaggcccatgagcaggtgaatgccgttgcggcatggctggcggcgcagggcgtgaagccgggtgaccgggtggccgtggcgatgcgcaactatcccgaatggatgctgatttactgggcatgcgtttccaccggcattgcggtggtcggcatgaatgcctggtggacgcccgaagagatggcgtatgcgctgtcggactcggcgccgaaatacctgttcctggatgccgaacgcctcgaccgggtgaaggaacgcccggacatggtggatggcatcaagctggtcggcgtgcgcctcaagggcgatgccggagatgtaacgccgtgggccgatgtgatcgcgcatggcggggacatgccggatgtagcgattgatccggattccgatgcctgcatcttctatacctccggcacgaccgggcaccccaagggggcgcagctgacgcatcgcgggtgtgtctcgaaccttttcaacatgctatatgcgggcgcttcttccgcgctggcggttgagcgcgcgaccggcgttgcgccgcccgcgacgccgcccatacccgtgaccctgatcaccacgccgctgttccatgtgacggcaaacaattgcggcgcctatgccacgacggcagcgggcggcacgatggtgctgatgtaccgctgggacgcgggcgaagcgctgcgcatcattgcgcaggagaaggtgagcagcatgagcggcgtgccggtcatggcgcgggagctgatcaaccatcccgattttgccatgacggatacctccagtctcgtttcgctggccgggggcggggcgcaggtgccgccggatctggtgcagaagatcgaagcgcaggtcagcaccgcgcggccgagcacgggctatggcatgaccgagacgtgcgggatcattacctctgtggcgggcgacttctttgtcgacaaacccgacagcgccgggccggcgatgccgagctttgaggccaaatgcgtggatgatgatggcaacacggttgcgcccggacaggtgggcgagctgtgggtgaagggctcgtccgtcatcaaaggctacatcaaccggccggatgcgacggcggcgtcgatcaccgatggctggctgcacaccggtgacattgcccgcattgatgaggatgggttcatcttcatcgtcgaccgcaagaaggacatggtgctgcgcggcggggagaatgtttactgcgccgaagtggagtcggcgatctatcgcaacgcggctgtggctgaatgctgcgtattcggggtgccggatgaacggctgggcgaggaagttggcgtggcggttgtgctgaaatccggcacaacgctgagcgcggacgagctgcgcgcccattgcgccaccatcatggcgaagcacaaggtgccgcgctacatctggttcctcgatgagcccctgccccgcaatgccagcggcaagttcctgaaacgcgacctgcgcgaccggctgaacccggaagcgctgtcggcctag

SEQ ID NO: 28335 - protein, 565 aa, Hyphomonas neptunium ATCC 15444
MHYAELLKARDELTGPGGAFEIAEADVLGNRIRTFKNAPASVRDVWLSTLQFAERPYLVYQDERLTYAQAHEQVNAVAAWLAAQGVKPGDRVAVAMRNYPEWMLIYWACVSTGIAVVGMNAWWTPEEMAYALSDSAPKYLFLDAERLDRVKERPDMVDGIKLVGVRLKGDAGDVTPWADVIAHGGDMPDVAIDPDSDACIFYTSGTTGHPKGAQLTHRGCVSNLFNMLYAGASSALAVERATGVAPPATPPIPVTLITTPLFHVTANNCGAYATTAAGGTMVLMYRWDAGEALRIIAQEKVSSMSGVPVMARELINHPDFAMTDTSSLVSLAGGGAQVPPDLVQKIEAQVSTARPSTGYGMTETCGIITSVAGDFFVDKPDSAGPAMPSFEAKCVDDDGNTVAPGQVGELWVKGSSVIKGYINRPDATAASITDGWLHTGDIARIDEDGFIFIVDRKKDMVLRGGENVYCAEVESAIYRNAAVAECCVFGVPDERLGEEVGVAVVLKSGTTLSADELRAHCATIMAKHKVPRYIWFLDEPLPRNASGKFLKRDLRDRLNPEALSA

SEQ ID NO: 28336 - DNA, 1569 bp, Hyphomonas neptunium ATCC 15444
  CDS (1)..(1569): transl_table=11
atgatcgacatcgaagcgatgccctacattgcggatattccgcccgttcaggcaaaactgcgcccggacgaaacggcactctggttcgaggggcgcgccacaagctttgccgaactcgaccggcgcagcaaccagattgccaacgggctgatccggctcggcctccagccgggcgaccgggtgggctatctggcgaagaataccgacgcctattacgagcttctctttggctgcgccaagtcgcgcacggtgatgacgggcgttaacacgcgccttgctccgcctgaggtgaagttcatcctgtcggacgccaaggcccgtgtgctgttcgtcggcaaggaattctacgcgatgatcgaccagatcaaggcggagctgcctgatcttgtccgcatcattaccctcgatggcgaccgggaagactgggactatttcccctcctggcgcgattccaaaccggcagagccaccgggcctggacgtgcaaggcgaggacgatgtgatccagctttacacatcgggcaccaccggcctgcccaaaggcgtgcagctgacgaatgacaattaccgcgccttcttcacccaggccggcatgctcgaatggtcgagctatgacgcgggcgaggcgatcatgaatgccatgccgcagttccatgtggccggtgtgaacgtcggcgtactcgccagcctgcagggcgccaagacggtgatcctgcgcgagattgatccgcaggcgatccttcgcctgatccccgaacaccggattgcccacgccttctgggtgcccgccgtgatcctgatgctgacccagcagccgaatatccgcgaaacggatttctccagcctgaagcaggtgttctacggcgcctcgccgatctccgaagcgctgctgcgcacggcggtggagatcatgggcgcccgcttcacccagctttacgggctgaccgaaaccgtcggtgccgggacattcctgccacccgaagcgcatgatcccagctgggggaaactccgctcctgcggtgtgccctggccgggcgctgtggtgcgcgtggtggatggcgacggcaaacccgttcccaccggcgaggttggcgagatcgtcatcaagtcgggcttcgtcatgaagggttactggaaccgtccggaggcaacgcaggacgctgtccggaacggcttcttccatacgggcgacgcgggttatttcgatgaagacggtttcctctacatccatgaccgggtgaaagacatgatcgtttcgggcggggagaatgtctacccggcagaggtcgagaacgcgatctttggcgcgccgggcgttgccgacgttgccgtcatcggcgtgccggatgagaaatggggcgaggcggtcaaggcgatcgtggtgaagaaacccggagaagatccgtccccggaaagcatcatcgcctgggcgaaggatcatatcgccgcttacaaggcgcccaaatcggtggacttcattgaggccttgccacgcaacccctcgggcaagatcctccgcaaggatttgcgcgagccctattggcgcgggcagacgcggcgggttggctaa

SEQ ID NO: 28337 - protein, 522 aa, Hyphomonas neptunium ATCC 15444
MIDIEAMPYIADIPPVQAKLRPDETALWFEGRATSFAELDRRSNQIANGLIRLGLQPGDRVGYLAKNTDAYYELLFGCAKSRTVMTGVNTRLAPPEVKFILSDAKARVLFVGKEFYAMIDQIKAELPDLVRIITLDGDREDWDYFPSWRDSKPAEPPGLDVQGEDDVIQLYTSGTTGLPKGVQLTNDNYRAFFTQAGMLEWSSYDAGEAIMNAMPQFHVAGVNVGVLASLQGAKTVILREIDPQAILRLIPEHRIAHAFWVPAVILMLTQQPNIRETDFSSLKQVFYGASPISEALLRTAVEIMGARFTQLYGLTETVGAGTFLPPEAHDPSWGKLRSCGVPWPGAVVRVVDGDGKPVPTGEVGEIVIKSGFVMKGYWNRPEATQDAVRNGFFHTGDAGYFDEDGFLYIHDRVKDMIVSGGENVYPAEVENAIFGAPGVADVAVIGVPDEKWGEAVKAIVVKKPGEDPSPESIIAWAKDHIAAYKAPKSVDFIEALPRNPSGKILRKDLREPYWRGQTRRVG

SEQ ID NO: 28338 - DNA, 1623 bp, Pseudomonas aeruginosa UCBPP-PA14
  CDS (1)..(1623): transl_table=11
atgtcgatcttcgaacagggtctcgcgcccgccgccgtcaaccacatcgccctgacgccgctgagcttcatcgagcgcaccgccagcgtctatccgcactaccccgcggtgatccacggcaacatccgccgcgactgggcgcagacctaccaacgctgccgacgcctggcctcggccctggccgggcgcggcatcggccagggcgacacggtggcggtgatgctgccgaacatccccgagatgctcgaggcgcactatggcgtgccgatgatcggcgcggtgctgaacaccctcaacgtacgcctcgacgccgaagccatcgccttcatgctgcaacacggcgaagccaaggtgctgatcaccgactacgaattccacgaggtgatccatgccgccatcggcatgctcgaccacccgccgctggtggtcgacgtcaacgaccccgagtatggcgaaggccgcccggttggcgaactggactacgaggcgctgctcgccgagggcgacccgcagttcgcctgggaatggccccgggacgagtggcaggcgatctcgctgaactacacctcgggcaccaccggcaaccccaagggcgtggtctaccatcaccgcggcgcctacctgaacgcgctgggcaaccagatgacctggtccatgggccagcacccggtgtacctctggaccctgccgatgttccactgcaacggctggtgctatccgtggacggtgaccgcgctggccggcgtccacgtctgcctgcggcgggtcgatccgcagaaggtcctcaccctgatccgcgagcaccaggtcagccacctgtgcggcgcacccatcgtgctcaacgccctgatcaacatgcccgactcggccaaggccgccatcgaccacccggtgcatgccatggtcgccggcgccgcgccaccggccaaggtgatcggcgcggtggaagagatgggcatccgcgtcacccatgtctacggcctcaccgaggtctacggcccggtcacggtctgcgcctggcacggcgagtgggacgaactgccgctggagcggcgcgccgcgatcaagtcgcgccagggcgtgcgctacccgaccctcgaaggggtgatggtggccgacccgaagaccctcgagccggtgccgcgcgacggccagtccatcggcgagatcttcatgcgcggcaataccgtgatgaagggctacctgaagaatcccagcgccaccgaggaagccttcgccggcggctggttccataccggcgacctggcggtctgccatccggacggctacatcgagatccgcgaccggctcaaggacatcatcatctccggcggcgaaaacatctccaccatcgaactggagggcgtgctctaccgccacccggcggtgctggaggcggcggtggtggcgcggcccgacgaaaagtggggggaaacgccctgtgcgttcattaccctgaagagcgatcatcaggggctcgccgagagcgagatcgtcgcgttctgtcgcgaacacctggccgcgttcaagattccgcgtaccgtggtgttctcggaactgccgaagacctccaccggcaagatccagaaatacgtgctgcgcgagtgggccgccgccctctga

SEQ ID NO: 28339 - protein, 540 aa, Pseudomonas aeruginosa UCBPP-PA14
MSIFEQGLAPAAVNHIALTPLSFIERTASVYPHYPAVIHGNIRRDWAQTYQRCRRLASALAGRGIGQGDTVAVMLPNIPEMLEAHYGVPMIGAVLNTLNVRLDAEAIAFMLQHGEAKVLITDYEFHEVIHAAIGMLDHPPLVVDVNDPEYGEGRPVGELDYEALLAEGDPQFAWEWPRDEWQAISLNYTSGTTGNPKGVVYHHRGAYLNALGNQMTWSMGQHPVYLWTLPMFHCNGWCYPWTVTALAGVHVCLRRVDPQKVLTLIREHQVSHLCGAPIVLNALINMPDSAKAAIDHPVHAMVAGAAPPAKVIGAVEEMGIRVTHVYGLTEVYGPVTVCAWHGEWDELPLERRAAIKSRQGVRYPTLEGVMVADPKTLEPVPRDGQSIGEIFMRGNTVMKGYLKNPSATEEAFAGGWFHTGDLAVCHPDGYIEIRDRLKDIIISGGENISTIELEGVLYRHPAVLEAAVVARPDEKWGETPCAFITLKSDHQGLAESEIVAFCREHLAAFKIPRTVVFSELPKTSTGKIQKYVLREWAAAL

SEQ ID NO: 28340 - DNA, 1569 bp, Solibacter usitatus Ellin6076
  CDS (1)..(1569): transl_table=11
atgcacgtacctctgacgcctattcgggcgctctatcgggccgttgatcttttcggcaggaagatcggcgtggtcagcggagaccgccgcttcacctacgccgagttcggcgagcgagtggagcggctcgccttcggactgctctccgaaggcgttgcgccgggcgatcgggtagccttcctgagcttcaatacccaccagttgctcgaaggctacttcggcgtccccctggtccgcgccattgtgatgcccttgaacgttcgccttacagcggcggagctgaccggaatcctctgtcacgccgaaccgcgcgtggtaatctacgaagccgacttcgcgccggtcgccaaacaactgcgtgccggctgccccggcgtgcagacttggatcgagatcggtcctgcctacgacgaactgctccaacggggccggatcgcgcgtcccgacattttcaccttcgacgaacgcgatatcgccgagttgttttatacctccggatccaccggcactcccaagggtgtgacactttcccatcgcactctgtacatgcacatgctctccatctccgccacgttctacaacgacgagactatggtggaactccacaccattccgctcttccacgccaacggctggggccgtccgcaatgcgccaccctgcatggactcaagcaggtgatggtccgccgcttcgagcccgtccacgtgctgcgcctcatccaggaagaaaaagccacgtcgatgtcgctcgttcctaccatggccaacgcgctcgttcattgcgccgaactcgccaactacgaccattccagcctccgtcaaattcaccttggcggcgccgcttcatcgcccgaattgatcgagcgtctggaagctgcatttcactgccccgcgatggccggctacggcctcaccgagacctccccggccgcgacaagcgcgcgcgataagtccactttgcctgaaatgagtgagccggagcgcatccgccggcgcgccatgaccggttggcccctgccgggctgcgaaatccgtgtggtcgatcttcagatgaaagatgtaccgcgcgatatggagtccatcggcgaaatcgtgatgcgcggcgacatcatcatggatggctacttccgtgaacccaaagccacagccgacgtcatgaccaacggctggctgcataccggcgatatggcaatgtgggacgaagagaattacctccacatcgtcgatcgcaagaaggacattatcatctccggcggtgaaaatatttcctccatcgaagtggaacgcgccatcgcgtcgcatcccgcggtgctcgaatgcgccgtagtctccgcgccggatccgcagtggggcgaggtgcctgcgaccttcgtcaccgtgaagcccggctacgccctcgatgaatgcggcctctgcgaatacctgcagggccgcatcgccaagttcaaaatgccacggcgatttcacttcagcgataccgcgctgcccaagaccggtactgggaaaattttgaaacgcgagctccgggaaaaactctggagcaacaaagacctccgcatccaaggctaa

SEQ ID NO: 28341 - protein, 522 aa, Solibacter usitatus Ellin6076
MHVPLTPIRALYRAVDLFGRKIGVVSGDRRFTYAEFGERVERLAFGLLSEGVAPGDRVAFLSFNTHQLLEGYFGVPLVRAIVMPLNVRLTAAELTGILCHAEPRVVIYEADFAPVAKQLRAGCPGVQTWIEIGPAYDELLQRGRIARPDIFTFDERDIAELFYTSGSTGTPKGVTLSHRTLYMHMLSISATFYNDETMVELHTIPLFHANGWGRPQCATLHGLKQVMVRRFEPVHVLRLIQEEKATSMSLVPTMANALVHCAELANYDHSSLRQIHLGGAASSPELIERLEAAFHCPAMAGYGLTETSPAATSARDKSTLPEMSEPERIRRRAMTGWPLPGCEIRVVDLQMKDVPRDMESIGEIVMRGDIIMDGYFREPKATADVMTNGWLHTGDMAMWDEENYLHIVDRKKDIIISGGENISSIEVERAIASHPAVLECAVVSAPDPQWGEVPATFVTVKPGYALDECGLCEYLQGRIAKFKMPRRFHFSDTALPKTGTGKILKRELREKLWSNKDLRIQG

SEQ ID NO: 28342 - DNA, 1524 bp, Solibacter usitatus Ellin6076
  CDS (1)..(1524): transl_table=11
atgatcgcgcccctcactccgctcgattttctcgcccggagcgcatccacctggcgcgaccgcatcgcggtggtggatggtgaccggcgcttcacttatagcgggttcgccgcccgcgtgcaaggtcaggccgccgcgctgctcgcgctcggcgtccaacccggagaccgcgtcgcggtgctcgctcccaacggcgcgatggccctcgaatcccacttcgcccccatgtcgatcggcgctgtgctggttatgctgaacacccgcctcgcggccggcgaactggcctggatcctcaatcactgcggcgccaaagtactcctggtggatccgcagctcgcacccctcgtcgctgacgccgcggtcccacacatcatccaggattacgaggctttcctgagcgccgcaccgccgcactacactccggttccggtcaccgacgagaatgcctgcatcgccatcaactacacttccggcaccaccggttttcccaaaggcgtgatgtacacccaccgcggcgcctgggtcaacgctctcggcgagattacggagcatggcctcacgcagcgcagcgtctacctgtggacgctgcccatgttccactgcaacggctggtgcttcccctgggccgtcaccgccgccggcggacgccacatctgcattcgccagcccgacccatgcgaaatggtcgcgctcatccaggcccaaggcgtgacccacttatgcggcgctcccgtagtggtcagttcgctcgcccaatactgcgccgccaatcaggtaaagttcgagcgcccactgcggatcgtcaccgccggcgcgcccccgcctcccgccgtcatccgcgccgccgaagagaccggcgccgagatctgccacgcctacggcctcaccgaaacctacggcccgcacaccatctgcagctggaatcccgagtgggacgagcgccccgctccggagcgcgccctcctcaaagcccgccagggcgtcgcctacacggtggccggcacggacctgcgtgtggtcgatttccagatgcacgacgtcccccccgatggcgaaaccatgggcgaagtcctcatgcgcgggaacaacgtcatgctcggctactacgccaaccccaaagccaccgaggacgcgtttcaaggcgggtggttccactcaggcgatctcgccgtggtccatcccgatggctacatcgaactgcgcgaccggatgaaagacatcgtcatttccggcggcgagaatatctcttccatcgaggtcgaaaaaactctcgccgatcatcccgcggtcgccgaagtggcgatcgtcgccgtacccgatgaaaagtggggcgaggtccccaaggcttacgtcggcctcaagcccggctgcagcgccaccgccgaagaactgatcgcctggtgccgcgatcgcatggcgcacttcaaggcccccaaactggtggagttcggtccgctgccgcgcaccgccaccggtaagatccgcaagaaccagctgcgcgcccaggcaaaggcaaactcatga

SEQ ID NO: 28343 - protein, 507 aa, Solibacter usitatus Ellin6076
MIAPLTPLDFLARSASTWRDRIAVVDGDRRFTYSGFAARVQGQAAALLALGVQPGDRVAVLAPNGAMALESHFAPMSIGAVLVMLNTRLAAGELAWILNHCGAKVLLVDPQLAPLVADAAVPHIIQDYEAFLSAAPPHYTPVPVTDENACIAINYTSGTTGFPKGVMYTHRGAWVNALGEITEHGLTQRSVYLWTLPMFHCNGWCFPWAVTAAGGRHICIRQPDPCEMVALIQAQGVTHLCGAPVVVSSLAQYCAANQVKFERPLRIVTAGAPPPPAVIRAAEETGAEICHAYGLTETYGPHTICSWNPEWDERPAPERALLKARQGVAYTVAGTDLRVVDFQMHDVPPDGETMGEVLMRGNNVMLGYYANPKATEDAFQGGWFHSGDLAVVHPDGYIELRDRMKDIVISGGENISSIEVEKTLADHPAVAEVAIVAVPDEKWGEVPKAYVGLKPGCSATAEELIAWCRDRMAHFKAPKLVEFGPLPRTATGKIRKNQLRAQAKANS

SEQ ID NO: 28344 - DNA, 1548 bp, Mycobacterium smegmatis str. MC2 155
  CDS (1)..(1548): transl_table=11
atggctgtcttcaccttcgccgagctcactccgaccagcctcctgcagcgatctgcccaggcgtttcccgatcgtctcgccattgtcgacggtgagctgagattgacctacacgcagttcgcggagaggtgcggccgcgtcacctcggcgctggcggccgcgggtgtgcaacccggggatcgggtggccgcgctgtgcaccaacagccacgtcatgctggaactgcaccaggcggtgccggcccgcggggcggtgctggtgccgctgaacacgcggctggcgttcgaggagatgcagtacatcatcggccacgccggcgctcgtatcctgatcgccacccgtgagttcgccgaccgtgcgcgagagttggctgacgacgccgggatcgacgtggtgatcgaaggtgacgggtacgaggagtggctgccggacgtggcgtcacccgaggatcgcgtcgcggtcggagaacgggatctgctcgccatcaactacacgtcggggaccacgggcaggcccaaaggcgtgatgtaccaccatcgcggcgcctacctgcaggctgttgcgatggcctaccacacgcgtctcgatccctcgaccggctatctgtggaccttgccgatgttccattgcaacggttggtgtttcacctgggctgtcggcgctgccgggggcacccacatatgtctgcgcaagatcgactcggccgagatctggcgatggctgcgtggcggcggtatcacccatttcagcgccgcgccaacggtgttgacgatgatcgccgaggatccttcggcgcaaccactgcccgcgcgagtgcacgtcgacactggcggtgcgccgccctcgccggcgctgctcgcgcgccttacgccgctggggttcgacgtcacgcatctctacgggctcaccgagacgtacggaccggtcgcggtgaacgtgtggcaaccggagtgggacgaactgccggacgacgagcaggcgaggctgcgggcccggcagggcgtgggcaacatcatcgccaacccgctgcgggtcgtggacctcggcggtgatgacgtgccgcgggacggcacgaccatcggggagatcgcggcgcgcggcaacgacgtcatgctcggttactacaacgacgacgccgccaccagcgccgccacccgtgacgggtacttcctgaccggtgacctggccgccatgcatcccgacgggtatgtcgaaattcgggaccgggcaaaggatgtcatcatctccggcggggagaacatcgcgtcgatcgagatcgaaaaggtcatcgacagccaccccgaggtggtggaatcggcggttgtcggtgtggcggacgagaagtggggcgaggtgccggtcgcgttcatcacgcggcgcgacgggtccgacgtgacattcgaccagctcaccacgttcctgcgggaacatctcgccggtttcaaggtgccgcgcaccatggtgttcgaccatctgccgaagacctcgacgggcaagattcagaagaacgtgctgcgtgcccgcgccgagcaggacaaggcgaactga

SEQ ID NO: 28345 - protein, 515 aa, Mycobacterium smegmatis str. MC2 155
MAVFTFAELTPTSLLQRSAQAFPDRLAIVDGELRLTYTQFAERCGRVTSALAAAGVQPGDRVAALCTNSHVMLELHQAVPARGAVLVPLNTRLAFEEMQYIIGHAGARILIATREFADRARELADDAGIDVVIEGDGYEEWLPDVASPEDRVAVGERDLLAINYTSGTTGRPKGVMYHHRGAYLQAVAMAYHTRLDPSTGYLWTLPMFHCNGWCFTWAVGAAGGTHICLRKIDSAEIWRWLRGGGITHFSAAPTVLTMIAEDPSAQPLPARVHVDTGGAPPSPALLARLTPLGFDVTHLYGLTETYGPVAVNVWQPEWDELPDDEQARLRARQGVGNIIANPLRVVDLGGDDVPRDGTTIGEIAARGNDVMLGYYNDDAATSAATRDGYFLTGDLAAMHPDGYVEIRDRAKDVIISGGENIASIEIEKVIDSHPEVVESAVVGVADEKWGEVPVAFITRRDGSDVTFDQLTTFLREHLAGFKVPRTMVFDHLPKTSTGKIQKNVLRARAEQDKAN

SEQ ID NO: 28346 - DNA, 1566 bp, Nocardioides sp. JS614
  CDS (1)..(1566): transl_table=11
atgatcgtcccgttcagcgtttcggacttcatcgaccgtgccgtgcaggtgtacggcgagcgggtcggcgtcgtcgacgagccggaccagccggcctcgccgctcggtgcgggtggccagctcacctacggcgagctgggctccctggcccgccgtcaggccgcgaggctcgacgagctcgggctcgacgtcggcgaccgggtcgcgatcgtgagccacaacagcgcccggctgctcacctccttcttcggggtcagcggcttcgggcgggtgctggtgccggtgaacttccggctgcgacccgacgaggtgcactacatcgtcaagcactccggcgcgcgggtgctgctgatcgaccccgagctcgaggagaccctcgaggacgtgccggcggagttcaagttcgtgctcggccgcgacgaggacatgttcgcggccgccccggccgacggaggtgtggagccgcggccctgggagcccgacgagaacgccaccgcctgcatcaactacacctccggcaccaccgcgcgcccgaagggcgtgcagatcacccatcgcaacatctgggtgaacgcggccaccttcgccatgcacgccggcgtcaccgaccgcgacgtctacctccacacgctgccgatgttccacgccaacggctgggggatgccgtacgcgatgaccggcctgggcgtgaagcaggtggtgatccgcaagatcgacggcgccgagatcctgcgccgggtgcgcgaccagggggtcaccgtgatgtgcgccgcgcccgccgtcgcggccgcggtcctcgacgccgcgcagacctgggagggcgagatccccgggcgcgaccgggtccggatcatcatggccggcgcgccgccgcccaccaagaccgtgatccgggtccaggaggagctcggctgggagttcatccagatctacggcctcaccgagacctccccgctgctcacgatcaaccggacccgcgaggagtgggacgacctctccgccgaggagcgggcgatccggctgacccgggcgggcgcgcccgcgctcggcgtacgcctggcgatctccgaccacgaggagaactcgggagaggtgctggcccgctccaacgtcgtgctcgacggctactggcagcagcccgaggagaccgagcgcgccctggcggacggctggttccacaccggtgacggcgggagcctcggtgacgacgggtacctgacgatcagcgaccgcaagaaggacgtgatcatcaccggcggcgagaacgtctcctcgatcgaggtcgaggacgtgctgttctcgcacccggcggtggccgaggtctgcgtgatcggcgtgcccagcgacaagtggggcgagacgatcaaggcgctggtcgtgctcgccgagggcgcctccgccaccgaggcggagctgatcgcctggtgcaaggagaaggcggccggctacaaggcgcccacgtcggtggagttccgtgacgagctcgcccgcacggccaccgggaagctgcagaagttcaagctgcgcgcgccgtactgggagggccgcgaccgccaggtcaactag

SEQ ID NO: 28347 - protein, 521 aa, Nocardioides sp. JS614
MIVPFSVSDFIDRAVQVYGERVGVVDEPDQPASPLGAGGQLTYGELGSLARRQAARLDELGLDVGDRVAIVSHNSARLLTSFFGVSGFGRVLVPVNFRLRPDEVHYIVKHSGARVLLIDPELEETLEDVPAEFKFVLGRDEDMFAAAPADGGVEPRPWEPDENATACINYTSGTTARPKGVQITHRNIWVNAATFAMHAGVTDRDVYLHTLPMFHANGWGMPYAMTGLGVKQVVIRKIDGAEILRRVRDQGVTVMCAAPAVAAAVLDAAQTWEGEIPGRDRVRIIMAGAPPPTKTVIRVQEELGWEFIQIYGLTETSPLLTINRTREEWDDLSAEERAIRLTRAGAPALGVRLAISDHEENSGEVLARSNVVLDGYWQQPEETERALADGWFHTGDGGSLGDDGYLTISDRKKDVIITGGENVSSIEVEDVLFSHPAVAEVCVIGVPSDKWGETIKALVVLAEGASATEAELIAWCKEKAAGYKAPTSVEFRDELARTATGKLQKFKLRAPYWEGRDRQVN

SEQ ID NO: 28348 - DNA, 1653 bp, Azoarcus sp. BH72
  CDS (1)..(1653): transl_table=11
atgaccgagaggaagcagacgccctacgacgtggggctggagaaaaacgccgccaactatgtaccgctgaccccgctcacgttcatcgagcgcagcgcctacatctaccccgaccgcgtcgccgtgatccacggcaagcgtcgctacacctggctggaaagctacacgcggtcgcgccgtctcgcgtcggcgctgaagcaactgggcgtgggcaagaacgacacggtcgcggtgatcctgaacaacacgccggaaatgttcgagtgccatttcggcgtgcctgcgtgcggcgccgtgctgaacaccgtcaacacccggctcgacgcggaaggcgtggccttcatcctcaaccacggcgaagccaaggtgctgattaccgaccgcgagtattcgcgcatggtcggcaaggcgatcgaactggcgaatcgcccggacatgatcgtgatcgacgtggatgatcccgaatacaccggtccgggcgaacgcgtcggcaagctcgactacgaggccctgctggaaaccggcaatcccgaattcgagtatgagcagccgggcgacgagtgggatgcgatctcactcaactacacctccggcaccaccggcaaccccaagggcgtggtctatcaccatcgcggtgcctacctcaacgcgatgtccaacatcgtgtcgtggggcatgccgccgcactcggtgtatctgtggacgctgccgatgttccattgcaacggctggtgcttcgcctggaccatggcggccaatgccggcgtcaacgtctgcctgcgccgtgtcgacccgcggctgatcttcgacgcgatgcgcgagcacggcgtcacccactactgcggcgcgcccatcgtgcattccatgctcgccaatgcgcccgaagagtggcgcaagggtatcaatcacaaggtctcgggcctggtcgcggcggcgccgccgccggccgcggtgatcgagggcatggccaagatcggcatcgacatcacccacgtctatgggctgaccgaaacctacggtccggcctcggtgtgcgccaagcacgacgaatggcgcgatctgccgctggccgagcaggttgccaagaacggtcgccagggcgtgcgctatcacgcccaggaaggcatcacggtgctggacccgaccacgatggaacccgtgccctgggacaacgagaccatgggcgagatcatgttccgcggcaacctggtcatgaagggctacctgaagaacgagaaggccaccgaggagtccttccgcggcggctggtatcacaccggcgacctggcggtgatgcagccggacggctacgtcaagatcaaggaccgttcgaaggacgtcatcatctcgggcggtgagaacatctcgtcgatcgaggtcgaagatgcgctgtacaagcaccctgcggtgatggccgccgcggtggtggccgcgcccgacgagaagtggggcgaggtgccgtgcgccttcgtcgaactgaaggatggcgcgaccgtgaccgccgaggagatcattgcccactgccgcgagcacttggcgggcttcaagacgccgaaaaaggtgatcttcggcgcgctgcccaagacctcgaccggcaagatccagaaattcgtgctgcgcgagcaggcgaagtcctcgtccgccatcgagtaa

SEQ ID NO: 28349 - protein, 550 aa, Azoarcus sp. BH72
MTERKQTPYDVGLEKNAANYVPLTPLTFIERSAYIYPDRVAVIHGKRRYTWLESYTRSRRLASALKQLGVGKNDTVAVILNNTPEMFECHFGVPACGAVLNTVNTRLDAEGVAFILNHGEAKVLITDREYSRMVGKAIELANRPDMIVIDVDDPEYTGPGERVGKLDYEALLETGNPEFEYEQPGDEWDAISLNYTSGTTGNPKGVVYHHRGAYLNAMSNIVSWGMPPHSVYLWTLPMFHCNGWCFAWTMAANAGVNVCLRRVDPRLIFDAMREHGVTHYCGAPIVHSMLANAPEEWRKGINHKVSGLVAAAPPPAAVIEGMAKIGIDITHVYGLTETYGPASVCAKHDEWRDLPLAEQVAKNGRQGVRYHAQEGITVLDPTTMEPVPWDNETMGEIMFRGNLVMKGYLKNEKATEESFRGGWYHTGDLAVMQPDGYVKIKDRSKDVIISGGENISSIEVEDALYKHPAVMAAAVVAAPDEKWGEVPCAFVELKDGATVTAEEIIAHCREHLAGFKTPKKVIFGALPKTSTGKIQKFVLREQAKSSSAIE

SEQ ID NO: 28350 - DNA, 1638 bp, Acidovorax sp. JS42
  CDS (1)..(1638): transl_table=11
atgtacgaccagaatctgccgcgcaccgaagccaaccatacgccgctgtcgcccctgtccttcatcgaacgcacggccgaggtctaccccgaccgcctggccatcgtgcatggcgagctgcgccagacctgggggcagacctacgcgcgctgccgccgcctggccagcagcctgcgccgcgcgggcatcggcaagaacgacaccgtggccgtgatgctgcccaacaccccgccgatggtggaggcgcatttcggcgtgcccatggcgggtgcggtgctcaatgcgctgaatacccggctggacccggagaccatcgccttcatgctggaccacggcgaggccaaggcggtgatcgtggaccccgaattcgcccccgtgatggccaaggcgctggcgctgcgccagtcgcaggcgccgctgctgctcatcgacgtggaagacgccgtctacggcccggccgcgcagcgcctgggcacgctgacgtacgaggacttcctggcccagggtgacgcgcagttcgcgtgggaactgcccggcgacgagtgggacgccatcgcactcaactacacctcgggcaccacgggcaaccccaagggcgtggtctaccaccaccgcggcgcgcacaccaatgccgtcagcaacgtgctggagtgggacatgcccaagcatgccgtctacctctggacgctgcccatgttccactgcaacggctggtgctttccctggacggtggcggcgcgcgcgggcgtcaatgtgtgcctgcgccgggtcgaggcgcaggccatcttcgacgccatccgcaaccacggcgtcacacactactgcggcgcgcccatcgtgcatggcctgctggtcaacgcgcctgcggcgatgaaggagggcgttcccgcgggcgtgaaggccatggtggccggggcagcgccgccggcctcgatgatcgagggcatggagcagatggggttcgacctgacccatgtgtacggcctcacggaggtgtatggcccggccaccgtctgcgccaagcacgcggcctgggacgcgctggacatcggcgagcgtgcgcgcctcaatgcccgccagggcgtgcgctaccacctgcaacgcgcggccatggtgctcaacccagacaccatggagcccgtgccgcacgacggcgagaccatgggcgagatcatgttccgcggcaacatcgccatgaagggttacctgaagaaccccaaggccaccgaggaggccttccgtggcggctggttccacagtggtgacctggcggtgcagtaccccgacggctacatcaagatcaaggaccgcagcaaggacatcatcatctcgggcggcgagaacatctcctccatcgaggtggaggacgtgctctaccgccaccccgacgtgctggccgccgccgtggtcgccaagcccgaccccaagtggggtgagacgccctgcgccttcgtggagctgaaggcgggcgcgcaggccacgcccgaggacatcgtggcgcactgcaagaagcacctggccggcttcaaggtgccgcgcgccgtggtgttcggcgagttgcccaagaccagcaccggcaagatccagaagttcgagctgcgcaagcaggcgggatcggccgcggccatcgacgtctga

SEQ ID NO: 28351 - protein, 545 aa, Acidovorax sp. JS42
MYDQNLPRTEANHTPLSPLSFIERTAEVYPDRLAIVHGELRQTWGQTYARCRRLASSLRRAGIGKNDTVAVMLPNTPPMVEAHFGVPMAGAVLNALNTRLDPETIAFMLDHGEAKAVIVDPEFAPVMAKALALRQSQAPLLLIDVEDAVYGPAAQRLGTLTYEDFLAQGDAQFAWELPGDEWDAIALNYTSGTTGNPKGVVYHHRGAHTNAVSNVLEWDMPKHAVYLWTLPMFHCNGWCFPWTVAARAGVNVCLRRVEAQAIFDAIRNHGVTHYCGAPIVHGLLVNAPAAMKEGVPAGVKAMVAGAAPPASMIEGMEQMGFDLTHVYGLTEVYGPATVCAKHAAWDALDIGERARLNARQGVRYHLQRAAMVLNPDTMEPVPHDGETMGEIMFRGNIAMKGYLKNPKATEEAFRGGWFHSGDLAVQYPDGYIKIKDRSKDIIISGGENISSIEVEDVLYRHPDVLAAAVVAKPDPKWGETPCAFVELKAGAQATPEDIVAHCKKHLAGFKVPRAVVFGELPKTSTGKIQKFELRKQAGSAAAIDV

SEQ ID NO: 28352 - DNA, 1461 bp, Magnetospirillum magnetotacticum MS-1
  CDS (1)..(1461): transl_table=11
ttgggctcggccctggcggcgcggggagtgggggtgggcgacaccgtggcggtcatggcggccaatactccggccgcctacgaggcggcgttcggcgtgcccatgaccggcggtgtgctgtgcgcgctcaacatccgtctcgatgccgaggccatcgccttcatgctgagccatggagaggccaaggttctgctgaccgaccgcgaattcgcgcccaccatcaagaaggcgctgtcgctcctggacaagaagcccctggtcatcgacatcgacgatgccgccgtcaccacgggcgagatgctgggcgagatggaatacgaagccttcatcgccggcggcgatcccgattacgcctgggtctggcctgccgatgagtgggacgccatcgcgctgaactacacctcgggcaccaccggtaatcccaagggcgtggtctatcaccatcgcggcgcctatatcaacgccctgggcaacgtcgtcaactgggggatgacggggcatccggtctatctgtggaccctgcccatgttccattgcaacggctggtgttttccctggaccctggcggccttggccggaaccaatgtctgcctgcgccgtgtggatggtgggcatatgttcgccgccatcgagaagcacaaggtcacccatatgtgcggggcgcccatcgtcatgggcatgttgatcaacgccccggaaaaggaccgccgtccgctgccccacccggtggagttcatgaccgccgccgcgccgccgcccgccgcggtgatcgaaaggctggaatcccaggggttcaagatcacccatgtctacggtctgaccgaagtctacggcccggccacagtgtgcgcctggcacgaggaatgggatgcgctgcccaccgaggagcgggcccggttgaagtcgcgccagggcgtgcgctacgtcaacgaggaggcgatgatggtcgccgatcccctcactctggtcccggtgcccaaagacggcgtcaccatgggcgaggtgttctatcgcggcaatgtggtgatgaagggatatctcaagaatcccgccgcaaccgacgaagctttttcgggtggctggtttcataccggcgatctgggggtttggcacggcgacgactacatcgaactgaaggaccgctccaaggacatcattatctcgggtggcgagaatatctcgaccatcgaggtcgaaggcgttctctatcaacatccggcagtgggcgaggcggccgtggtggcccgtcccgacgagaaatggggcgaaaccccttgcgccttcatcggcctgaaagagggaggagcggcaacggccgaggagatcatggccttctgccgccagcgtctggcccattacaaatgcccgcgcaccgtggtcttcacttccttgcccaagacatccaccggaaaagttcagaaatacgtcctgcgggaaatggccaagaaactcaatgattga

SEQ ID NO: 28353 - protein, 486 aa, Magnetospirillum magnetotacticum MS-1
MGSALAARGVGVGDTVAVMAANTPAAYEAAFGVPMTGGVLCALNIRLDAEAIAFMLSHGEAKVLLTDREFAPTIKKALSLLDKKPLVIDIDDAAVTTGEMLGEMEYEAFIAGGDPDYAWVWPADEWDAIALNYTSGTTGNPKGVVYHHRGAYINALGNVVNWGMTGHPVYLWTLPMFHCNGWCFPWTLAALAGTNVCLRRVDGGHMFAAIEKHKVTHMCGAPIVMGMLINAPEKDRRPLPHPVEFMTAAAPPPAAVIERLESQGFKITHVYGLTEVYGPATVCAWHEEWDALPTEERARLKSRQGVRYVNEEAMMVADPLTLVPVPKDGVTMGEVFYRGNVVMKGYLKNPAATDEAFSGGWFHTGDLGVWHGDDYIELKDRSKDIIISGGENISTIEVEGVLYQHPAVGEAAVVARPDEKWGETPCAFIGLKEGGAATAEEIMAFCRQRLAHYKCPRTVVFTSLPKTSTGKVQKYVLREMAKKLND

SEQ ID NO: 28354 - DNA, 1626 bp, Magnetospirillum magnetotacticum MS-1
  CDS (1)..(1626): transl_table=11
atgtccgccaatccgtatgaactgggtctgaccaagaacgacgccaatttcgtggcgctgacgccgctcaccttcctggagcgcgccgccgccgtatggccggatcgtctggccgtcattcacggccccgtacgccggacctgggccgaaaccttcgtgcgctgccgcaagctggccgccgcgctcgcccagcgcggcatcggactgggcgacaccgtggccctgatgggcgccaatacgcccgagaccttcgaggcccatttcggcgtcccgctgaccggtgccgttctgaacgccatcaacacccgtctcgacgccgacgccgtcaccttcatcctcaaccatgccgaggccaagatcctcatcaccgaccgggagttctcgccggtggtaaagaaggccctggccgcgctgggccgcaccattccggtgatcgatatcgacgatccccagttcaagggcggcgaactgctgggcgagaagacctacgagcagcttctggatgaagcgcaatccgaagcgccctggaccatgccctccgatgagtggcaggccatcgctctcaactacacgtcgggcaccaccggcaatcccaagggcgtggtctaccaccatcgcggcgcttatctgaacgcggtgtccaacgcgctgtcatggcagatgggcgacggcacggtctatctgtggacgctgcccatgttccactgcaatggctggtgcttcccctggaccatggccgtggtggcgggcaccagtgtctgcctgcgccatgtgcgcgtcgatgccatcatgagcgccatcagagacgagaaggtcaccaatttctgcggtgcccccatcgtgctcaacatgatcaacaacgcgcccgccgccctgaaggaaggcatcagccatgccgtcaaggtgatgaccgccggtgccgcgccgcccgcccccgtcatcgcgggcatggagcgcatgggctgggaagtgacccatgtctatggcctgaccgagtgctatggccccacggtccagtgcgtttggcacgacaagtggaatcccctctccatcgaagaaaaggcccagatcaaggcgcgccagggcgtgcgcggccccatgctggaaggcctgatgatcgccgatcccttgagcctggagcctgcgcccaaggacggcaagacggtgggcgagatcttcatgcgcggcaacaatgtcatgaagggctatctcaagaatcccgccgccacccaggaagcctttgccggtggctggttccataccggtgatctggcggtctggcaccccgacggctatgtcgagatcaaggaccgctccaaggacatcatcatctcaggcggcgagaatatctcgtccatcgaggtggaagacatcctctacgcccaccccgccgtgctggaagccgccgtggtcgcccggcccgacgagaaatggggcgagacgccatgtgccttcatcgcgctcaaagatggcgccgaggccagtgaagccgatatcatcagcttctgccgcgaacgcatggcccatttcaaggtgccgaggaccatcgtgttcggcggactgcccaagacctccaccggcaaggtccagaagttcatgctgcgccagaaggccaaggagctgtga

SEQ ID NO: 28355 - protein, 541 aa, Magnetospirillum magnetotacticum MS-1
MSANPYELGLTKNDANFVALTPLTFLERAAAVWPDRLAVIHGPVRRTWAETFVRCRKLAAALAQRGIGLGDTVALMGANTPETFEAHFGVPLTGAVLNAINTRLDADAVTFILNHAEAKILITDREFSPVVKKALAALGRTIPVIDIDDPQFKGGELLGEKTYEQLLDEAQSEAPWTMPSDEWQAIALNYTSGTTGNPKGVVYHHRGAYLNAVSNALSWQMGDGTVYLWTLPMFHCNGWCFPWTMAVVAGTSVCLRHVRVDAIMSAIRDEKVTNFCGAPIVLNMINNAPAALKEGISHAVKVMTAGAAPPAPVIAGMERMGWEVTHVYGLTECYGPTVQCVWHDKWNPLSIEEKAQIKARQGVRGPMLEGLMIADPLSLEPAPKDGKTVGEIFMRGNNVMKGYLKNPAATQEAFAGGWFHTGDLAVWHPDGYVEIKDRSKDIIISGGENISSIEVEDILYAHPAVLEAAVVARPDEKWGETPCAFIALKDGAEASEADIISFCRERMAHFKVPRTIVFGGLPKTSTGKVQKFMLRQKAKEL

SEQ ID NO: 28356 - DNA, 1626 bp, Sulfitobacter sp. EE-36
  CDS (1)..(1626): transl_table=11
atgggctggatgacgaacgaagacgggttggacaaatgcgcggcgaattacgtgccgctcacgcctctgtcgcacctgaaacgcgcagcccatgtctttgccgatgtgacggcggtgatctacggcgcgcatcgggtgagctatgcgcagtatcacgcgcgctgctcacagcttgcttcggccttggtggcggcgggggttgaaccgggtcaggttgtggcgacgatcctgcccaatatccccgcgcaggcagaggcgcatttcggcgtgcccgcctgcggtgccgtgcttaacaccatcaacacgcggctggatgtgggcacggtgggctacatcctcgaccacggcgaagcgcgggtgctgctggtcgatacgcagttcgtcgatctggcagaggcggcctgtgcaaccctcgacggcccgcccccgctgctgatcgaagtgcctgatcccgcggcggggtttccggcaacgggtcgccacaccacatacgatgatttcatcgccaccggtgaccctgcgttcaactggatcatgccgcaggacgaatgggaaagccttgcgctcaactatacctctggcacgacggggcggcccaagggcgtggtctatcaccatcgcggggcctatctgatgaccatgggcacggtggtcagctggcgtatggtgatgcggcccgtgttcatgcagatcgtaccgctgtttcactgcaacggctggaaccacacgtggatgatgcccctcttggggggcacactggtctgctgccgcgacatcactgccgctgcgatctatgacgccatcgccgacgaaggcgtgacccattttggcggtgcccccatcgtgctgaacatgatggtgaacgcaacagaagccgaacgccgcgcctttgatcatcaggtggaggtcttcaccgccggtgcgccccctgcccctgccaccctgtccaagatcgaagccttggggttcaacgtcacgcaggtctacgggctgaccgagacctacggccacgtcaccgaatgtctgtgggaccccgcatgggacagcgcccaaggggccgagcgcgccgcgatcaaggcccgtcagggcgtcgccatgccgatgatggaagagatcaccgtcatggacagcgaaatggcccaagtcccgctggacgctgccacacagggagagatcatgatccgcggcaattcggtgatgaagggatacttcaagaaccccgccgccacgcgcgcggcctttgcgggcgggtatttccattcgggcgatctggcggtgcagcatccgaacggacatatgcagatcgcagatcgcgccaaggacatcatcatctcgggcggcgagaacatctcgtccgtcgaggtcgaaggcgtattgatggggcatccggatgtgaacctcgccgccgttgtcgcgcaaccggacgagaaatggggcgaagtgccctgtgcttttgtcgagctgaaaccgggccggagtggagacgaagctgccctgatcgcctttgcgcgcgacacgcttgcgggtttcaaagcacccaaacgcgtggtgtttcaagagctgccgaaaacctcgaccgggaagatccagaaattcgaactgcgcgcacaggccgccaggctttag

SEQ ID NO: 28357 - protein, 541 aa, Sulfitobacter sp. EE-36
MGWMTNEDGLDKCAANYVPLTPLSHLKRAAHVFADVTAVIYGAHRVSYAQYHARCSQLASALVAAGVEPGQVVATILPNIPAQAEAHFGVPACGAVLNTINTRLDVGTVGYILDHGEARVLLVDTQFVDLAEAACATLDGPPPLLIEVPDPAAGFPATGRHTTYDDFIATGDPAFNWIMPQDEWESLALNYTSGTTGRPKGVVYHHRGAYLMTMGTVVSWRMVMRPVFMQIVPLFHCNGWNHTWMMPLLGGTLVCCRDITAAAIYDAIADEGVTHFGGAPIVLNMMVNATEAERRAFDHQVEVFTAGAPPAPATLSKIEALGFNVTQVYGLTETYGHVTECLWDPAWDSAQGAERAAIKARQGVAMPMMEEITVMDSEMAQVPLDAATQGEIMIRGNSVMKGYFKNPAATRAAFAGGYFHSGDLAVQHPNGHMQIADRAKDIIISGGENISSVEVEGVLMGHPDVNLAAVVAQPDEKWGEVPCAFVELKPGRSGDEAALIAFARDTLAGFKAPKRVVFQELPKTSTGKIQKFELRAQAARL

SEQ ID NO: 28358 - DNA, 1629 bp, Roseovarius nubinhibens ISM
  CDS (1)..(1629): transl_table=11
atgggctggatgaaggacgagacagggctcgacaaatgcgcggcgaatttcgtgccgctgacgccgctgtcgcatctgcgccgcgccgtgcagatctatcccgattacgaagcgctggtctatggcgagacccgccgcagctatcgcgagtatcacgcccgcgtcacccagctcgcctcggcgctgaagaacctcgggctgcgccccggcgatgtggtggcgacgctgctgcccaacgtccccgcccatgtcgaggcgcatttcggcgtgcccgccagcggcgcggtgctcaacgcgatcaacacccggctcgagcccgacacgatctcctatatcttcggccatggcgaggcgcagctcgcccttgtcgacaccgcgctcttgccgctggccgaggccgccatcgcccggatgaaaggcaagggcccgcaaatcgtcgaggtggccgacccgcaggccggataccccgccactggccgctatctcgaatatgaggatttcctcgccagcggtgacgaggatttcaactggatcatgcccaaggacgaatgggagagcctcgcgctcaactatacctcgggcaccacgggccgccccaagggcgtggtctatcaccatcgcggcgcctatctgatgaccatgggcacggcggtgagctggccaatgccgcatcaggcgcgctatctcaccatcgtgccgctctttcactgcaacaactggaaccacagctggatgatgccgctggtcggcggctgtgtggtctgctgccgcgacatcaccgcccgcgccatctatgacgccatcgccgatgacggcgtgacccatatgggtggcgcgcccatcgtgctcaacatgatcgtcaacgccaagcccgaggaccggcgcgcctttgaccatatcgtgcagacctacaccgccggggcgccgccccccgccgctacgctgcgcgcgattgagccgctggggttcagcgtgacgcaggtctacggcctgaccgagacctatggccatgtcaccgaatgcacctggcacgcccgctgggacggcgaggaggacgaggaacgctatgcgatcaaggcccgcaccggggtcttgatgccgatgatggaggacatcaccgcgctcgaccccgagacgatgaaacaggtgccgatggatggcgccacccagggcgagatcatgatccgcggcaatgcggtgatgaaaggctatctcaagaaccccgaggccaccaaagaggccttcaagggcggctatttccactccggcgacatcgcctttcaacatcccgacggctatctcaagatcgccgaccgggccaaggacatcatcatttcgggcggcgaaaacatctcgtccatcgaggtcgagggcgtgttgatgaaacaccccgaagtgctgctctgcgccgtggtggccaagcctgatgacaaatggggcgaagtgccctgcgcctttgtcgagttgaaggagggcgcggtctgcgacgaggccgcgatcatcgccttcgcccgcgaacggctcgccgggttcaagacgccgaaacaggtgcggtttcaggaattgcccaagacctcgaccggcaagatccagaaattcgaactgcgcaaaatcgccgccgagggctga

SEQ ID NO: 28359 - protein, 542 aa, Roseovarius nubinhibens ISM
MGWMKDETGLDKCAANFVPLTPLSHLRRAVQIYPDYEALVYGETRRSYREYHARVTQLASALKNLGLRPGDVVATLLPNVPAHVEAHFGVPASGAVLNAINTRLEPDTISYIFGHGEAQLALVDTALLPLAEAAIARMKGKGPQIVEVADPQAGYPATGRYLEYEDFLASGDEDFNWIMPKDEWESLALNYTSGTTGRPKGVVYHHRGAYLMTMGTAVSWPMPHQARYLTIVPLFHCNNWNHSWMMPLVGGCVVCCRDITARAIYDAIADDGVTHMGGAPIVLNMIVNAKPEDRRAFDHIVQTYTAGAPPPAATLRAIEPLGFSVTQVYGLTETYGHVTECTWHARWDGEEDEERYAIKARTGVLMPMMEDITALDPETMKQVPMDGATQGEIMIRGNAVMKGYLKNPEATKEAFKGGYFHSGDIAFQHPDGYLKIADRAKDIIISGGENISSIEVEGVLMKHPEVLLCAVVAKPDDKWGEVPCAFVELKEGAVCDEAAIIAFARERLAGFKTPKQVRFQELPKTSTGKIQKFELRKIAAEG

SEQ ID NO: 28360 - DNA, 1629 bp, Oceanicola batsensis HTCC2597
  CDS (1)..(1629): transl_table=11
atgggctggatggccgacgaaaccgggctggaaaagtgtgccgccaattacgtgccgctcactccgctcagcaacctgcgccgcgccgcgcgcatctggccggggcgcgaagcgctggtctacggcagcttccgcaagacctatgccgagtatcacgagcgcgtcacccgcctcgcctcggccctcgccgggctgggcgtgacgccgggggacgtggtcgccacgatcctgcccaacctgcccccccatgccgaggcgcatttcggcgttcccgcctgcggcgccgtgctcaacgcgatcaacacccggctggacgcaggcaccgtcgcctatatcctcgaccatggcggggccaaggtcgtgctctgcgacagccagttcgtctcggtcctggccgaggcgatggagcggatggaggggcccagaccgcgcgtcatcgaatgccccgacgatcaggccggggtccactcgcgctcggactacatgacctacgaggatttgctggcccggggcgaccccgccttcgactggatcatgcccgaggacgaatgggagagcatcgcgctcaactacacctccggcaccaccggccggcccaagggcgtggtctatcaccaccgcggtgcgcatcagaacgcgatggggcagatcctgtcgtggcggatgcagctctacccgcgctacctgaccatcgtgccgctcttccactgcaacggctggtgccatacctggatgatcccgctgctcggcggcaccgtggtctgctgccgcgacatcaccgcacccgccctcttcgcagccttcgccgacgagggcgtgacccatttcggcggagcgcccatcgtgctgaacatgctcgtcaacgcccccgaggatcagcgccggcccttcgaacagacggtcgaggtcttcaccgccggcgcgccccccgcccccgcgacgctcgcccagatcgaaccgatgggcttcaacgtcacccaggtctacggcctgacggaaacctacggccccgcgaccgaatccacctgggacgacgacctatggggcgatctcaccggcgacgcccgcgccgcgaagaaggcccgccagggcgtggccatgcccgcctacgaacacatcaccgccatgacctcggacatggagcagatccccatggacgccgaggccacaggcgagatcatgatgcgcggcaacggggtgatgaagggctatctgaagaaccccgaggccacaaaggaagcgttcaagggcggctatttccataccggggacatcgcgctccagcattccgacggctatctccagatcgccgaccgcgccaaggacatcatcatctcgggcggcgagaacatctcctcggtcgaggtcgagggcgtgctgatgggtcacccggacgtgctgctctgcgccgttgtcgccaaaccggacgagaaatggggcgaggtcccctgcgccttcgtcgaactcaaggacgggcgtgagggcgacgaggccgcactgatcgcctatgcccgcgaacggctggccggtttcaagacgcccaagaaggtcgtgttccgggaattgcccaagacctcgaccggaaagatccagaagttcgaactgcgccggcaggttcgcgagggctga

SEQ ID NO: 28361 - protein, 542 aa, Oceanicola batsensis HTCC2597
MGWMADETGLEKCAANYVPLTPLSNLRRAARIWPGREALVYGSFRKTYAEYHERVTRLASALAGLGVTPGDVVATILPNLPPHAEAHFGVPACGAVLNAINTRLDAGTVAYILDHGGAKVVLCDSQFVSVLAEAMERMEGPRPRVIECPDDQAGVHSRSDYMTYEDLLARGDPAFDWIMPEDEWESIALNYTSGTTGRPKGVVYHHRGAHQNAMGQILSWRMQLYPRYLTIVPLFHCNGWCHTWMIPLLGGTVVCCRDITAPALFAAFADEGVTHFGGAPIVLNMLVNAPEDQRRPFEQTVEVFTAGAPPAPATLAQIEPMGFNVTQVYGLTETYGPATESTWDDDLWGDLTGDARAAKKARQGVAMPAYEHITAMTSDMEQIPMDAEATGEIMMRGNGVMKGYLKNPEATKEAFKGGYFHTGDIALQHSDGYLQIADRAKDIIISGGENISSVEVEGVLMGHPDVLLCAVVAKPDEKWGEVPCAFVELKDGREGDEAALIAYARERLAGFKTPKKVVFRELPKTSTGKIQKFELRRQVREG

SEQ ID NO: 28362 - DNA, 1629 bp, Oceanospirillum sp. MED92
  CDS (1)..(1629): transl_table=11
atgagcactacacataacccttacgccttgggtttggatcagaaccaggcgaactttgcagcactgacgcccttaagctttgttgagcgtgccgcttttgtatatccagagcacaccgcaacagtgcatggtgatgtgcgtcgtaactgggcagaaacatatactcgttgtcgtcagttaggtagtgctctccagaaacgcggtattggtcagggtgatacggtgtcagtgattgcaccgaacctgcctgaagtgtttgagtcgcattttggtgtgccgatggcgggtgctgtactcaatgcggttaatattcgtctggacgcagaggcgatcgcttttattctgcagcatgctgaaagcaaagtagtgattgtcgaacgtgagttttcagacgtcgtgcaaaaggcgctacgtatcgccggtacttcacccctggtgattgatattgatgatccaacttatgaaggcggtgagctgattggctcgatggattatgaagcctttatcgcggaaggtgatccggaatttgcatggcagcctcctgcagatgagtgggatgcgattaccctgaactacacctccggtacgaccggtaacccgaaaggggttgtataccatcatcgcggcgcttacctgaatgcgatgagcaatattgtttcctgggatatgggccgtcacccgaactatctgtggacgctgccgatgttccactgtaacggctggtgtttcccatggtctattgccgctgcggcgggtaccagcgtgtctctgcggcatgtccgtgatcaggacatctatgacctgatccggaaagaaaaagtcactcacttctgtggagcgccaattgttctgaacatgctgaacaatgctccggatgagatgaaagccggtatcgagcatgaaattaaagtaatgacggcgggagctgcgccaccggcagcagtgattcagggcatggaagagatggggatcgaagtaacccatgtttatggcctgaccgaaacttatggcccatcagtggtctgtgcatggcacgacaaatgggacgataacagcctggaagataaagctcgcctgaaatcccgccagggtgttaaagcgcctatgttagaaggactgatggtggcaaaccctgagaccctcgaaccggtccctcaggatggtgaaaccatgggtgagatcttcatgcgcggcaatctggtgatgaaaggctatctgaagaacccatccacgacggatgagtcctttgagggaggctggttccattccggtgatctggcggtatggcatgaagatggctatatcgaaatcaaagatcgctcgaaagatatcattatttctggtggtgaaaatatctcctctatcgaggttgaagatgtgctctaccgtcaccctgctgtgatggaagcggcggttgtcgcgaaatctgatgagaagtggggcgaggttccttgtgcgtttattaaaaccaaagagggcgtagaggttaccgctgaagagattaaggaattctgccgtaacaacatggcgcgctttaaagcgccgaaagcgattgtctttggtgaattaccgaagacctctaccggcaagattcaaaagtttgtgctgcgtgagaaagcagaaagttaa

SEQ ID NO: 28363 - protein, 542 aa, Oceanospirillum sp. MED92
MSTTHNPYALGLDQNQANFAALTPLSFVERAAFVYPEHTATVHGDVRRNWAETYTRCRQLGSALQKRGIGQGDTVSVIAPNLPEVFESHFGVPMAGAVLNAVNIRLDAEAIAFILQHAESKVVIVEREFSDVVQKALRIAGTSPLVIDIDDPTYEGGELIGSMDYEAFIAEGDPEFAWQPPADEWDAITLNYTSGTTGNPKGVVYHHRGAYLNAMSNIVSWDMGRHPNYLWTLPMFHCNGWCFPWSIAAAAGTSVSLRHVRDQDIYDLIRKEKVTHFCGAPIVLNMLNNAPDEMKAGIEHEIKVMTAGAAPPAAVIQGMEEMGIEVTHVYGLTETYGPSVVCAWHDKWDDNSLEDKARLKSRQGVKAPMLEGLMVANPETLEPVPQDGETMGEIFMRGNLVMKGYLKNPSTTDESFEGGWFHSGDLAVWHEDGYIEIKDRSKDIIISGGENISSIEVEDVLYRHPAVMEAAVVAKSDEKWGEVPCAFIKTKEGVEVTAEEIKEFCRNNMARFKAPKAIVFGELPKTSTGKIQKFVLREKAES

SEQ ID NO: 28364 - DNA, 1635 bp, Oceanospirillum sp. MED92
  CDS (1)..(1635): transl_table=11
atggagaataaaaataacaatccgtacagcctgggactggacaagaatgcagcgaactatgctgccctgaccccgctgtcttttattgaacgagctgcaacggtttatcccgatcggactgcagtgatttacggagatctgcaacgtacttggtcacagacctatgagcgttgtattcgactggcgtctgcgctgcgtaaacgcggtgtcggtgaaggggatacggtagccgttatgttgccaaacatccctgagatgcttgagctgcatttcgctgtacctatgacgggtgctgtactgaatacacagaacacgcgtctggatgcggaaacgatcgcgtttatgctggatcatggcgaagcccgggtggtgattacggatcgtgaattttccaatgtgatggaacgggccgtgcgtatggcgagcgttgatcctctgctggtggatgtggatgatcctcagttcactggcggtgaactgatcggtagtctgacttatgagcagttactagccgaaggtgatattaatgatcactggtctccgccggaagatgagtggcaggcgattaccctgaactacacttcagggaccacgggaaatccgaaaggtgtggtttatcatcaccgcggcgctcacctgaatgcgaccagtaacattattggtcagaacttgccgcctcatgcggtttacctgtggaccttaccgatgtttcattgcaatggctggtgttacccctggtcggtaaccgcggttgcaggaacccatgtttgtttgcgccacctacttcccgagaaggtttttgaactgattcaggcctgtggggtcacccatttctgcggtgcgcctgtggttctgaatatgttgctcaatgcgcctgaagaatcaaaaatgctggtggatcatccggttacagtaacaacgggtggcgctgcgccgcctgcggcgatcatcgaaggtatggagaaaatcggtatcaaggttgtacatgcgtatggcctgacagagtcttatggcccgagtgtgttctgtgcccatcaggatgagtgggatcagatggttctggaagataaagcggccaaaatggcgcgacaaggagtcagggcaccggcgcttgaacagctgatggtgggtgatccagagaccatggcacccgtgcctcgtgacggtaaaaccatgggtgaagtgttcatgcgcggtaacaacgtgatgaaaggctatctgaaaaacccttccgcttctgatgccgcgttctccggagggtggttccacagcggtgatctggctgtctggcatgaagatggctatatcgaagtgaaggatcgctccaaagatgtgatcatttcgggcggtgagaatatatcgacgattgaagtcgaggatatgctctatcgccatccagctattttggaagcggcggttgtagcgaaaccagatgaacactggggagaggtgccttgtgcatttgtcactctgaaagatggccagagtgctacagaagcggagattatcgagtttacccggagcaatatggcgcattttaaatgcccgaaaaaagtggtgtttgcgcctttgccgaaaacttccacaggtaaggttcagaagtttgcacttcgggccatgctaaaagatatctga

SEQ ID NO: 28365 - protein, 544 aa, Oceanospirillum sp. MED92
MENKNNNPYSLGLDKNAANYAALTPLSFIERAATVYPDRTAVIYGDLQRTWSQTYERCIRLASALRKRGVGEGDTVAVMLPNIPEMLELHFAVPMTGAVLNTQNTRLDAETIAFMLDHGEARVVITDREFSNVMERAVRMASVDPLLVDVDDPQFTGGELIGSLTYEQLLAEGDINDHWSPPEDEWQAITLNYTSGTTGNPKGVVYHHRGAHLNATSNIIGQNLPPHAVYLWTLPMFHCNGWCYPWSVTAVAGTHVCLRHLLPEKVFELIQACGVTHFCGAPVVLNMLLNAPEESKMLVDHPVTVTTGGAAPPAAIIEGMEKIGIKVVHAYGLTESYGPSVFCAHQDEWDQMVLEDKAAKMARQGVRAPALEQLMVGDPETMAPVPRDGKTMGEVFMRGNNVMKGYLKNPSASDAAFSGGWFHSGDLAVWHEDGYIEVKDRSKDVIISGGENISTIEVEDMLYRHPAILEAAVVAKPDEHWGEVPCAFVTLKDGQSATEAEIIEFTRSNMAHFKCPKKVVFAPLPKTSTGKVQKFALRAMLKDI

SEQ ID NO: 28366 - DNA, 1650 bp, Oceanospirillum sp. MED92
  CDS (1)..(1650): transl_table=11
atgaatactcctatttctgccttcgaaactgatcttgatcagaaccaggctaactactccgcgctgacaccgatcacatttatcgagcgtgcagccagtgtttatccgaaccggatcgcgactgtacacggtgatgttcgtcgcacctgggctgagacctatacgcgttgtaagcagtttgccagcgcactgcgcgctaaaggtgtaaacccaggtgatgcggtgtctatcatggcacccaacctggctgagcattttgaagctcattttgctgtacctatgtgtggcgcggtacttaactcaatcaatatccgtctggattctgaagcggttgctttcatcctgaaacacgcggaaagcaaagtgctgatcaccgatcgtgagttcagttctgtagtgaaaggtgcgctagagctgctggatgagaagcctttcgtgatcgatattgatgatccctactggagcgagggtgagttcatcggagaaacgaaatacgatgactttctcgccacaggggatgaacacttcgttccgcataaagttgcagatgagtggaacgctatcactctgaactacacatccggcaccacaggtaatcctaaaggggtggtttaccaccaccgtggcgcttacctgaatgcgatcagtaactctatttcctggggtatggaccagcacgctgtctacctatggacgctaccgatgttccactgcaacggctggtgtttcccatggacaattgccgcgatggccggagttaacgtttgcctgcgtcacgtacgtgccgacgatattttcaatgcgattaagcgggaaaaagtcggttacttctgcggtgcgccaatcgtactgaatatgctgaactcggctgacgatgaactgaagactggcattgagcatcaggttaaagtgatgacggcaggcgctgcgccacccgccgcagttatcgcgggcatggagtctttgggcttcagcgtaacccacgtttatggtctgaccgagacctatggaccttccgttgtctgtgcatggcacgacgagtgggatgaaaaatctctggacgacaaagcacggctgaaagcccgccagggtgtacgtgcacctatgctagacggtcttatggttgcagatcctgtgactatgaagccggtaccaaaagatggcgaaaccatgggtgagatcttcatgcaggggaacctggtgatgaaaggctacctgaagaaccctgataccaccgagaagtcattcgaaggcggctggtttcactcaggtgacctggcggtatggcatgaagacggctatatcgagatcaaggaccgctctaaagacatcatcatttcagggggtgagaacatctcctctattgaagtagaagatgtactttaccgccatccattggttcaggaagctgccgtggttgctaaaaaccatgagaaatggggcgaaacaccttgcgcatttgtcgcgctgaaagagggttcagatcgcgatatcactgagaaagagattatcgatttctgtcgtgagcatatggcccacttcaaggcaccaaaagatattgttttcggcgacctgccaaaaacatctaccggaaaaattcagaagttcctccttcgtgaccgtgctaacggtgtcgagcaggacgcataa

SEQ ID NO: 28367 - protein, 549 aa, Oceanospirillum sp. MED92
MNTPISAFETDLDQNQANYSALTPITFIERAASVYPNRIATVHGDVRRTWAETYTRCKQFASALRAKGVNPGDAVSIMAPNLAEHFEAHFAVPMCGAVLNSINIRLDSEAVAFILKHAESKVLITDREFSSVVKGALELLDEKPFVIDIDDPYWSEGEFIGETKYDDFLATGDEHFVPHKVADEWNAITLNYTSGTTGNPKGVVYHHRGAYLNAISNSISWGMDQHAVYLWTLPMFHCNGWCFPWTIAAMAGVNVCLRHVRADDIFNAIKREKVGYFCGAPIVLNMLNSADDELKTGIEHQVKVMTAGAAPPAAVIAGMESLGFSVTHVYGLTETYGPSVVCAWHDEWDEKSLDDKARLKARQGVRAPMLDGLMVADPVTMKPVPKDGETMGEIFMQGNLVMKGYLKNPDTTEKSFEGGWFHSGDLAVWHEDGYIEIKDRSKDIIISGGENISSIEVEDVLYRHPLVQEAAVVAKNHEKWGETPCAFVALKEGSDRDITEKEIIDFCREHMAHFKAPKDIVFGDLPKTSTGKIQKFLLRDRANGVEQDA

SEQ ID NO: 28368 - DNA, 1629 bp, marine gamma proteobacterium HTCC2143
  CDS (1)..(1629): transl_table=11
atgtcgaacatttttgaatccgaattaccaaagaacctcgccaaccatacggcgttgacgcccgttcattttctttctcacgcagctaagacctaccctgacaaccttgccgttgttcatggtgatctgcgttataactatgcaacgctgcaacagcgctgccgacgattagccagcgcgcttagtcagcacggtatcggccctggcgataccgtttcggtaatagccccgaatattcccgctcatttggaagcccattttgcggtgccaatgactggcgcggtgttgaacagtatcaatattcgcttggatgcagatactttcgcctatatttttgatcatggtgaatgcgacgtgctgctcatcgatgcgcaatttgccgaggttgcgaagcaggcgctgtcaaaaagcagccgacgcccccttatcatagacttggatgactctctcggaccacgatcagttcgtattggaagtacaacttacgaacagtttttattgacaggcaatcccgacatcgtccccgccctcccggctgacgaatggcagtcactggcgctcaactatacgtcggggacaacgggcaatccgaaaggcgtcgtttaccatcaccgtggcgctcatcaaaacgcgatggggaatatattagcgtggaatatgggacacgcaccgacctatttgtggaccctgcctatgtttcattgcaatggttggtgctttccctggactattaccctactagccggcgtccacgtatgcttgagagatgtggctgctgacgcgattatagaaagtatcgtcgccaacgatgtcagccacatgtgcggcgctcctattgttctttcgatgatagccaacgcaccggaagttttgcgaaatcaaattcctaaaggcatcaaaataatgactgcgggtgcagcgccgcctgcggcggtgattgttgcaatcgaagatctcggcgccgaaattacccatacttacggcctaacagaggtttatggcccctgcgtatattgtgcctggcatacggagtgggacgagcttagtcgcgagcacagggctgcaatgaaagcgcgccaaggcgtcgcctatcccgtactgaacaacctcgatgtacttgatccagaaacgatgagaccggtgcctgatgacggcgaaactattggtgaagtgatgttccgcggcaacgtcgtgatgaaagggtatttaaaaaacccagacgccacccgcgaggcgctcgccgatggctggttccactcgggagatctagcggtaaaacaccccgataattacattgaaatcaaagaccgctccaaggatatcattatctcaggtggcgaaaatatctcgtcaatagaagtagagtcagccctgtatcagcacagcgcggtgttaagtgctgccgtggttgccaaggctgatgacaagtggggcgaaacaccctgtgctttcgtcgaactaaaagacggcaccacgcttgacgcacaaacactgatcgctttcagtagaaatcatttggccagtttcaaaattccaaagcatgtgatctttggcgaactaccaaaaacttcaactgggaagatacagaaatttattctgcgggagaaagcaaaaacaatcgtcgattaa

SEQ ID NO: 28369 - protein, 542 aa, marine gamma proteobacterium HTCC2143
MSNIFESELPKNLANHTALTPVHFLSHAAKTYPDNLAVVHGDLRYNYATLQQRCRRLASALSQHGIGPGDTVSVIAPNIPAHLEAHFAVPMTGAVLNSINIRLDADTFAYIFDHGECDVLLIDAQFAEVAKQALSKSSRRPLIIDLDDSLGPRSVRIGSTTYEQFLLTGNPDIVPALPADEWQSLALNYTSGTTGNPKGVVYHHRGAHQNAMGNILAWNMGHAPTYLWTLPMFHCNGWCFPWTITLLAGVHVCLRDVAADAIIESIVANDVSHMCGAPIVLSMIANAPEVLRNQIPKGIKIMTAGAAPPAAVIVAIEDLGAEITHTYGLTEVYGPCVYCAWHTEWDELSREHRAAMKARQGVAYPVLNNLDVLDPETMRPVPDDGETIGEVMFRGNVVMKGYLKNPDATREALADGWFHSGDLAVKHPDNYIEIKDRSKDIIISGGENISSIEVESALYQHSAVLSAAVVAKADDKWGETPCAFVELKDGTTLDAQTLIAFSRNHLASFKIPKHVIFGELPKTSTGKIQKFILREKAKTIVD

SEQ ID NO: 28370 - DNA, 1620 bp, marine gamma proteobacterium HTCC2080
  CDS (1)..(1620): transl_table=11
gtgctgtttgacggccccgagttagccaagactgcggcgaaccatacgccgctgtcaccggtgtcaattttaaagcgtgtcgaacgggttcatccgaacttacccgcccaggtacacggcagcattcgccgcaactggggtgaggtggcggcgcgctgtaaacgtctcgcctcggcgctggcaaagcgcggggtgagcaaaggcgataccgttgccctcattgcccccaacatacccgaagcactcgagtgtgccctcgcagtgcctatgctcggtgcggtgctcaatgccaacaatatgcgccttgacgccagcacgctgggttatatccttgaacacggcgaggcctcggtgttgttggtggacaccgagttttctgccgtggccgctgaagcggtgcgcctgtcgggtcgcgagctgttggtgatcgatattgaagataccgagggccccggaggtgcgtgtattggcgcgctgacctacgaggccctattggctgagggctcggaagactttgcctatgccttgcccgatgacgagtgggacgccctggcactgaactacacctcgggcaccaccggtcaccccaaaggggtggtgtattcccatcgcggtgcctggaccaactcggttaacaatgtggtgacctgggaaatgccccatcaccccacctatctgtggacgctgccgttgtttcactgcaacggctggtgcttcccctggacgattacgctgctcgcgggtactcatgtgtttatgcgcggccccaccgccaaaggcatttacgcggcctttgccgagcacggtgtgactcacctctgtggggcgcccattattatgtcgatgattgccagcgcccccaacgacgagcgtcagccttttgaccaaaaagtgcgcatgatgaccgctgcggcaccgcccccggccccggttattgaagctatggagcaaatgggtattgccattacccacgtgtatggcctgaccgaagtctatggccccgccgtggtctgtgctgaaaagccggaatgggcagcgttgcctctcgatgagcaatcgaagctcaaggcgcgccaaggtgtggcttatgagctggaagaagatgtgctcgtgctcgaccccgagaccagcttgccggtgcccctagacggggagacccagggcgaggtggtctttcgcggcaacattgttatgaagggttatttaaagcgtcccgaagaaaccgacgctgcgtttcgcgacggctggttttggtcgggagatttagcggtgcagcaccccgacggttacattgaaattcgtgatcgcgccaaggacatcattatttcggggggcgagaatatttcgtccatcgaagtagagaatgctctgcatactcaccccgccgtcgattttgtggcggtggtggccatggccgacgagaagtggggcgagacaccctgcgcctttgtggagttagttgaaggcagcacggccaccgagcaagagttgctcgatcatgcccgggccttactggctgggtttaagcgccccaagaaagtggtgtttggaccgttgcccaaaaccaccacgggtaagattcgaaagaatgaattgcgggatcggttgcgcaacatttaa

SEQ ID NO: 28371 - protein, 539 aa, marine gamma proteobacterium HTCC2080
MLFDGPELAKTAANHTPLSPVSILKRVERVHPNLPAQVHGSIRRNWGEVAARCKRLASALAKRGVSKGDTVALIAPNIPEALECALAVPMLGAVLNANNMRLDASTLGYILEHGEASVLLVDTEFSAVAAEAVRLSGRELLVIDIEDTEGPGGACIGALTYEALLAEGSEDFAYALPDDEWDALALNYTSGTTGHPKGVVYSHRGAWTNSVNNVVTWEMPHHPTYLWTLPLFHCNGWCFPWTITLLAGTHVFMRGPTAKGIYAAFAEHGVTHLCGAPIIMSMIASAPNDERQPFDQKVRMMTAAAPPPAPVIEAMEQMGIAITHVYGLTEVYGPAVVCAEKPEWAALPLDEQSKLKARQGVAYELEEDVLVLDPETSLPVPLDGETQGEVVFRGNIVMKGYLKRPEETDAAFRDGWFWSGDLAVQHPDGYIEIRDRAKDIIISGGENISSIEVENALHTHPAVDFVAVVAMADEKWGETPCAFVELVEGSTATEQELLDHARALLAGFKRPKKVVFGPLPKTTTGKIRKNELRDRLRNI

SEQ ID NO: 28372 - DNA, 1581 bp, Candidatus Desulfococcus oleovorans Hxd3
  CDS (1)..(1581): transl_table=11
atgtacaccttaggcgacatctcaaccaacggcgcggttcattttccggactgggaggcgatcgtttttgaagaaacccgcatgacctatcggcaactcaatacccgggtcaaccgcctggccaatgccctgacggcgctggggtgcaaaaaaggggatcacctggcggtcctggcggaaaactgcagccagtacgtggaaatctattttgccgcagccaagatcggggcctgtgtctgcccgcagaaccatcgtctggccgatgaagagctgacctacgtcatcaaccatggtgaatcaaccctgtttctggtggggcatggatttgaagatcgggcctgttccatccagagtggtttgacgaatatcaggtactggatatccatagaaaactttattgacgggtacctttcctacgaagaactgataaagacacacccggacacggaaccggtgccagagtcgccggtcgatgaacaggacctggccattctcatgtacaccggcggcaccaccggtcttcccaagggggtcatgctgacccaccggaacctgatgaccaccaccgccaatgccgtactcacggcggccactgcgctggccaacctggggccgggccggcggttttccacctgcatggtgctacccatgtttcatgtttccctgtggccggtactgttgacactttcaattggcggtaaggctgtcatcaaccgcaagatggatctgggcgaaatcctgcggctgattcaggatgaagagtgcgcccatatcaatctggtgccgaccatttacggctggctggtcgattatccggacgccgataaatacgatatttccagcctgatttacatgacctatgccggcagcccctttcccacggaagttttgaaaaagtgcattcggcggtttggcaatattttttctcaaggatatggggccaccgaaaccgccggcggcgcggcaacgatgttaagttatcaggatcacgagatcgagggctcccggtcacgtttactggccagcgccggtaaaaccgccccctgttcccgaatcaagatcgccgacgacgagggccgtgccctgccgtacgggcaaagcggcgaaatatgcgtcaccggcaaacacatcatggccggctactggaaggatccggtgaaaaccgccgaggccctgcgagacggatggtaccataccggcgacatgggctacatggatgaagatgggtatgtgtttttgaccgaccgcaaagcggacatgatcatttccgggggagaaaacgtctatcccaaggagaccgaggatgtcctttaccagcatgaagccgtggcggaatgctctgtggtctcggctccggatccccgctggggtgaaatcgtcaaggcggtggtggtcctgcaaccaggtaaaacagcgactgaagaagagttgattgctttctgcaaagagcggctggccgggtataaatgccccaagtcgattgtcttctgggacaatctgcctacatccatcatcgggaaagttttaaagaaggagatcaaggcaactttctggcaggggcaagacaggaaaatcggataa

SEQ ID NO: 28373 - protein, 526 aa, Candidatus Desulfococcus oleovorans Hxd3
MYTLGDISTNGAVHFPDWEAIVFEETRMTYRQLNTRVNRLANALTALGCKKGDHLAVLAENCSQYVEIYFAAAKIGACVCPQNHRLADEELTYVINHGESTLFLVGHGFEDRACSIQSGLTNIRYWISIENFIDGYLSYEELIKTHPDTEPVPESPVDEQDLAILMYTGGTTGLPKGVMLTHRNLMTTTANAVLTAATALANLGPGRRFSTCMVLPMFHVSLWPVLLTLSIGGKAVINRKMDLGEILRLIQDEECAHINLVPTIYGWLVDYPDADKYDISSLIYMTYAGSPFPTEVLKKCIRRFGNIFSQGYGATETAGGAATMLSYQDHEIEGSRSRLLASAGKTAPCSRIKIADDEGRALPYGQSGEICVTGKHIMAGYWKDPVKTAEALRDGWYHTGDMGYMDEDGYVFLTDRKADMIISGGENVYPKETEDVLYQHEAVAECSVVSAPDPRWGEIVKAVVVLQPGKTATEEELIAFCKERLAGYKCPKSIVFWDNLPTSIIGKVLKKEIKATFWQGQDRKIG

SEQ ID NO: 28374 - DNA, 1641 bp, Pseudomonas putida GB-1
  CDS (1)..(1641): transl_table=11
atgatcactacccgcgtcatgcccccggccgagcaggcctatgcgtacccgctgctgatcaagcgcctgctgttgtcgggtgtgcgctaccagcccaaccaggaaatcgtctacgccgacaagctgcgctacacctacaccacgttgctggagcgtattcaacggctggccaacgtgctgagcgctgccggggtccagcctggcgacaccgtggccttgctcgactgggacagccaccgcgcattggagtgtttcttcgccgtacccatgctgggcgcagtgttgcatacggtaaacgtgcggttgtccagcgagcaggtgcgctacaccatgaaccacgccgaggaccggctggtgctggtgcacgacgacttcctgccgttgatgcagcagctgcgcgccgacctgccgacagtggagggcttcatccgcctgagtgacggcggtcacgccgcgcaaggcgtgcctctgctgggcgagtacgaaaccatgctggcggctgcagaaccgtacttcgaattcccggacttcgacgaaaactcgctggccacgctgttctataccagcggtaccaccggcaaccccaagggtgtgtacttcagtcaccggcaactggtgctgcataccctggtcgagcagggcactttggccgcgtgcggtgaggtaccgctgctgcgcaccggcgatgtgtacatgccgatcacgcccatgttccatgtgcatgcctggggcgtgccttacgtggcgacggcacttggcatcaagcaggtctacccggggcgctacgagcccaaccgcctggtgcgcctgttccatgaggagggggtgaccttctcccattgcgtgccaacggtgctgcagatgatgctcgacagcgagcaagggcgccgcaccgaccttgccggctggaaaatgctgctgggcggcagcgcgctgaccctgggcctggcccagcgcgccagcgagcgcggcatcagcgtgcactgtggttacggcatgtcggaaagctgcccgctgctcagcatcacctacctgagtgccgagctgctggcaaagcccatggcgcaacaattgccgctgcgcatcgatgccggtgtgccgattgccatggtggacctgcgtatcgtcgacagcgagggccgggaggtgccgcacgacggtgaaagcctgggtgaagtcgtggtgcgcgcgccttggctgacccaaggctacctgcacgaaccggagcaaggcgcagcactgtggttggggggctggatgcacaccggtgacctggcttgtatcgatgcggcgggcgtggtgcgtatccgcgaccggatcaaggacgtgatcaagaccggtggcgagtgggtcagctcggtagcgctggaaaacctgatcagccagcacccgtttgtcgcctcggtggctgtcgtcggtgttcctgatccacagtggggggaacaacccttggccttggtggtctgctgtgagggtgtgcaactggaccagccgtcattggccaggcacctgcagccgtttgtcgacagcgggcacttgaacaagtgggcgataccacggcagttgcgttgtgtggacgaaatcccccggaccagtgtcggcaagatcgacaagaaacgcatccgccagacggaagtctag

SEQ ID NO: 28375 - protein, 546 aa, Pseudomonas putida GB-1
MITTRVMPPAEQAYAYPLLIKRLLLSGVRYQPNQEIVYADKLRYTYTTLLERIQRLANVLSAAGVQPGDTVALLDWDSHRALECFFAVPMLGAVLHTVNVRLSSEQVRYTMNHAEDRLVLVHDDFLPLMQQLRADLPTVEGFIRLSDGGHAAQGVPLLGEYETMLAAAEPYFEFPDFDENSLATLFYTSGTTGNPKGVYFSHRQLVLHTLVEQGTLAACGEVPLLRTGDVYMPITPMFHVHAWGVPYVATALGIKQVYPGRYEPNRLVRLFHEEGVTFSHCVPTVLQMMLDSEQGRRTDLAGWKMLLGGSALTLGLAQRASERGISVHCGYGMSESCPLLSITYLSAELLAKPMAQQLPLRIDAGVPIAMVDLRIVDSEGREVPHDGESLGEVVVRAPWLTQGYLHEPEQGAALWLGGWMHTGDLACIDAAGVVRIRDRIKDVIKTGGEWVSSVALENLISQHPFVASVAVVGVPDPQWGEQPLALVVCCEGVQLDQPSLARHLQPFVDSGHLNKWAIPRQLRCVDEIPRTSVGKIDKKRIRQTEV

SEQ ID NO: 28376 - DNA, 1674 bp, Pseudomonas putida GB-1
  CDS (1)..(1674): transl_table=11
atgccccagccaagctactcccagggcaaccaggacaaggccctgcttacccagtgcatcggcgacgccttcgacgccactgtcgctcgctttcccgagcgcgaggcgctggtggtgcgccaccaggcccttcgctacacctggcggcaactggccgaggccgtcgaccagcatgctcgcgcgctgatggccctgggcgtgcagcccggtgaccgcctgggtatctgggcgcccaattgcgccgagtggtgcattacccagttcgccagcgccaaggttggcgcaatcctggtcaacatcaatccggcctaccgctccagcgagctggactatgcgctcggccagtccggctgccgttgggtgatctgtgccgatgcgttcaagacctccgattaccacgccatgctgctgggccttgtacctggcctggccagcggtcaagcgggcgcgctgatctgcgagcgttttcccgagctgcgtggcgtggtcagtctggccgttgcgcccccacctgggttcctcgcctggcacgacctgcagtcccgcgccgaggccgtcagccgcgaggccctggcccagcggcaggcacaactgcgctgcgacgatccgatcaacatccagtacacctcggggactaccggcttcccaaagggcgccaccctcagccacagcaacattctcaacaacggctacatggtgggtgaaagcctgggcctgaccgaacatgatcggttggtagtgccggtgccgctgtaccactgcttcggtatggtcatggccaaccttggctgcatgacccacggcagcaccttgatttatcccaacgatgccttcgaccctttggctaccctgcgcgcggtggcggaggagaaagccacggcgttgtatggcgtgccgaccatgttcattgccgagctggaccacccgcagcgcggcgagttcgacctgtcgagcctgcgcacggggatcatggccggcgctacgtgcccgatcgaggtgatgcgccgggtgattggcgagatgcacatggccgaggtgcagattgcctacggcatgaccgagaccagcccggtgtcgctacagacctgcgccactgacgacctggagcgccgcgtgaccagcgtggggcgcacccagccacggctggagaacaaagtgatcgacaacgacggcggcacagtgccgcgcggtgagattggcgagctgtgcacgcgtggctacagcgtgatgctgggttactggaacaaccccaaggccacggccgagagcatcgatgaagacggctggatgcacaccggcgacctggcagtgatggacgaacaaggctatgtgcggattgtcgggcgcagcaaggacatgatcattcgcggcggtgagaacatctacccgcgtgagctggaagagttcttcttcacccacccagcggtggccgatgtgcaggtgattggcgtgccgtgcagcaagtatggcgaagagatcgtcgcctgggtgcggctgcacccagggcatgctgccagtgaagaagaactgcgagagtgggccaaggcgcgaattgcgcacttcaaggtgccccggtacttccgctttgtcgacgagttcccgatgacggtgaccggcaaggtgcagaagttcaggatgcgcgagatcagcgtcgaggaactgactgccaattga

SEQ ID NO: 28377 - protein, 557 aa, Pseudomonas putida GB-1
MPQPSYSQGNQDKALLTQCIGDAFDATVARFPEREALVVRHQALRYTWRQLAEAVDQHARALMALGVQPGDRLGIWAPNCAEWCITQFASAKVGAILVNINPAYRSSELDYALGQSGCRWVICADAFKTSDYHAMLLGLVPGLASGQAGALICERFPELRGVVSLAVAPPPGFLAWHDLQSRAEAVSREALAQRQAQLRCDDPINIQYTSGTTGFPKGATLSHSNILNNGYMVGESLGLTEHDRLVVPVPLYHCFGMVMANLGCMTHGSTLIYPNDAFDPLATLRAVAEEKATALYGVPTMFIAELDHPQRGEFDLSSLRTGIMAGATCPIEVMRRVIGEMHMAEVQIAYGMTETSPVSLQTCATDDLERRVTSVGRTQPRLENKVIDNDGGTVPRGEIGELCTRGYSVMLGYWNNPKATAESIDEDGWMHTGDLAVMDEQGYVRIVGRSKDMIIRGGENIYPRELEEFFFTHPAVADVQVIGVPCSKYGEEIVAWVRLHPGHAASEEELREWAKARIAHFKVPRYFRFVDEFPMTVTGKVQKFRMREISVEELTAN

SEQ ID NO: 28378 - DNA, 1623 bp, Pseudomonas putida GB-1
  CDS (1)..(1623): transl_table=11
atgtcgatctatgcccagggcctgatgcccgctgccgtcaaccatgtcgccctcaccccgctgagcttcatcgaacgcaccgccgccgtatacggcaattacccggccgtcatccacggcgctatccgccgcaactggcaggaaacctaccaacgctgcctgcgcctggccagtgccctggctggccgtggcatcggccgtggcgacaccgtggcagtgatgctacccaacaccccggccatgcttgaggcgcacttcggcgtacccatgatcggtgccgtgctcaataccttgaacgtgcgcctggatgccgaggccatcgccttcatgctgcagcacggcgaggccaaggtgctgatcaccgaccgcgagttccatgccgtcatcgaagccgccctggcgctgctcgaacacccgccgctggtgattgatgtggatgacccggagtatggcgagggccgcgctgtcagcgaactggactatgaagccctgcttgccgaaggggacccggactttgcctgggaatggcccgatgacgagtggcaggccatttcgctgaactacacctccggtaccaccggcaaccccaagggcgtggtctaccaccaccgcggcgcttacctgaacgcactgggcaaccagatgacctgggccatggggcaccgcccggtttacctgtggaccctgccaatgttccactgcaacggctggtgctacccctggaccatcaccgcgctggccggcacccatgtgttcctgcgtcgggtcgacccgcagaaaatcctcaccctgatccgcgagcaccgggtcagccacctgtgcggggcgccaatcgtgctcaacgccctggtcaacatgcccgaagccgccaaggcagccatcgagcacccggtgcaggccatggtcgccggtgccgcgccgccggccaaggtgattggcgccgtggaggaaatgggcatcaaggtcacccacacctacggcctgaccgaggtctacggcccggtgaccgtgtgtgcctggcatgacgaatgggatgcgctgtcgctggacgagcgtgcgcggatcaagtcgcgccagggcgtacgctacccgaccctggacggcctgatggtcgccgacccgcaaaccctccagccggtgccgcgcgacggcaacaccctgggcgaaattttcatgcgcggcaataccgtgatgaagggctacctgaaaaaccctgaagccaccgccgaagccttccgtggcggctggttccacaccggcgacctggccgtatggcatgccgacggatatgtcgaaatcaaggaccggctcaaggacatcatcatttccggtggcgagaacatttccaccatcgaggtcgaagacgccctctacaagcacccggctgtactggaagccgccgtggtggcacgcccggatgaaaagtggggcgaaacgccgtgcgccttcgttgccctcaagccgggccgggaagacacccgcgagaccgatatcaccagttggtgccgcgagcacctggccgggttcaaggtgccgaagaccgtggtgtttggtgagctgcccaaaacctccaccggcaagatccagaagtacgtgctgcgcgaccgggccaaggccctctga

SEQ ID NO: 28379 - protein, 540 aa, Pseudomonas putida GB-1
MSIYAQGLMPAAVNHVALTPLSFIERTAAVYGNYPAVIHGAIRRNWQETYQRCLRLASALAGRGIGRGDTVAVMLPNTPAMLEAHFGVPMIGAVLNTLNVRLDAEAIAFMLQHGEAKVLITDREFHAVIEAALALLEHPPLVIDVDDPEYGEGRAVSELDYEALLAEGDPDFAWEWPDDEWQAISLNYTSGTTGNPKGVVYHHRGAYLNALGNQMTWAMGHRPVYLWTLPMFHCNGWCYPWTITALAGTHVFLRRVDPQKILTLIREHRVSHLCGAPIVLNALVNMPEAAKAAIEHPVQAMVAGAAPPAKVIGAVEEMGIKVTHTYGLTEVYGPVTVCAWHDEWDALSLDERARIKSRQGVRYPTLDGLMVADPQTLQPVPRDGNTLGEIFMRGNTVMKGYLKNPEATAEAFRGGWFHTGDLAVWHADGYVEIKDRLKDIIISGGENISTIEVEDALYKHPAVLEAAVVARPDEKWGETPCAFVALKPGREDTRETDITSWCREHLAGFKVPKTVVFGELPKTSTGKIQKYVLRDRAKAL

SEQ ID NO: 28380 - DNA, 1683 bp, Pseudomonas putida GB-1
  CDS (1)..(1683): transl_table=11
atgttgcagacccgcatcatcaagcccgccgagggcgcctacgcctacccactgctgatcaaacgcctgctgatgtctggctgccgctatgaaaagacccgcgaaatcgtctaccgcgaccagttgcggctcacttatccacagctcaacgagcgcatcgcacgcctggccaatgtgctgaccgaggccggggtaaaggccggtgacaccgtcgcggtgatggactgggacagccaccgttacctggaatgcatgttcgccattccgatgatcggcgccgtggtgcacaccatcaacgtgcgcctgtcgcccgagcagatcctctacaccatgaaccacgccgaagaccgcgtggtgctggtcaatagcgacttcgtcggcttgtaccaggccatcgccgggcagttgaccaccgtcgacaagaccctgttgctgaccgacggcccggacaagaccgccgatttgcccgacctggtcggcgagtacgagcaactgctggccgccgccagcccgcgctacgacttccctgacttcgacgagaactcggtggccaccaccttctacaccaccggcaccaccggtaaccccaagggtgtgtatttcagtcatcgtcagctggtgctgcacacactggccgaggcctcggtcaccggcagtatcgacagcgtgcggctgctgggcagtaacgacgtgtacatgccgatcactccgatgttccatgtgcatgcctggggcatcccttacgctgccaccatgctcgggatgaagcaggtgtaccctgggcgctacgagccagacatgctggtcaagctctggcgcgaggagaaggtcactttctcccattgcgtgccgaccatcctgcagatgctgctcaactgcccggcttcgcaagggcaggatttcggcggctggaagatcatcattggcggcagctcgctcaaccgctcgttgtatcaggccgctctggcacgtggcatccagctgactgctgcgtatggcatgtcggaaacctgcccgctgatctccgccgcccaccttaacgatgagttgcaggccggcagcgaggatgagcgtgttacctaccgcatcaaggccggtgtgccggtgccactggtcgaggcagccatcgtcgatggcgacggtaacttcctgccagcagacggtgagacacaaggcgagctggtgttgcgtgcgccgtggctgaccatgggttacttcaaggaaccggaaaagagcgaggagctgtggcagggtggctggctacacaccggcgatgtcgccaccctcgacggtatgggttacatcgacatccgcgatcgcatcaaggatgtgatcaagaccggtggcgagtgggtctcctcactcgacctggaagacttggtcagccgccacccggcggtgcgcgaagtggcggtggtgggggtggccgacccgcaatggggtgagcgtccgtttgccctgctggtggtgcgtgatggccacgccatcgacgccaagtcgctgaaggagcacctcaagccgtttgtcgagcaaggtcacatcaacaagtgggcgattccaagccagatcgccgttgttactgaaattcccaagaccagcgtcggcaagctcgacaagaaacgcatccgccaggacatcgtccaatggcaggccagcaacagcgcgttcctttccaccttgtaa

SEQ ID NO: 28381 - protein, 560 aa, Pseudomonas putida GB-1
MLQTRIIKPAEGAYAYPLLIKRLLMSGCRYEKTREIVYRDQLRLTYPQLNERIARLANVLTEAGVKAGDTVAVMDWDSHRYLECMFAIPMIGAVVHTINVRLSPEQILYTMNHAEDRVVLVNSDFVGLYQAIAGQLTTVDKTLLLTDGPDKTADLPDLVGEYEQLLAAASPRYDFPDFDENSVATTFYTTGTTGNPKGVYFSHRQLVLHTLAEASVTGSIDSVRLLGSNDVYMPITPMFHVHAWGIPYAATMLGMKQVYPGRYEPDMLVKLWREEKVTFSHCVPTILQMLLNCPASQGQDFGGWKIIIGGSSLNRSLYQAALARGIQLTAAYGMSETCPLISAAHLNDELQAGSEDERVTYRIKAGVPVPLVEAAIVDGDGNFLPADGETQGELVLRAPWLTMGYFKEPEKSEELWQGGWLHTGDVATLDGMGYIDIRDRIKDVIKTGGEWVSSLDLEDLVSRHPAVREVAVVGVADPQWGERPFALLVVRDGHAIDAKSLKEHLKPFVEQGHINKWAIPSQIAVVTEIPKTSVGKLDKKRIRQDIVQWQASNSAFLSTL

SEQ ID NO: 28382 - DNA, 1689 bp, Pseudomonas putida GB-1
  CDS (1)..(1689): transl_table=11
atgcaagccgaattctggaatgacaagcgcccggcgggcgtgccttccaccatcgacatcaacgcctacgcctcggtcgtcgaggtgttcgaacgctcctgcaagcgctttgccgaccgcccggcgttcagcaatctgggcgtgacgctgagttatgccgagctggagcgccattcggcagccttcactgcctggttgcagcagcacaccgacctcaagccgggtgaccgcatcgcggtgcagatgcccaatgtgctgcagtaccccatcgccgtgttcggtgccatgcgcgccgggctgatcgtggtcaacaccaacccgctgtacaccgagcgcgagatgcgccaccagttcaaggacagcggcgcccgtgcgctggtgtacctgaacatgttcggcaagcgcgtgcaggaagtgctgcccgataccggtatcgaatacctgatcgaggcgaagatgggcgacctgctgcccaccgccaagggctggctggtcaacactgtggtcgacaagctgaagaagatggtgccggcctacaatttgccccaggcggtgccgttcaagcaggtgctgcgcgagggccgtgggctgtcgcccaagcccgtgccgctgaacctcgacgacatcgccgtgctgcagtacaccggcggcaccaccggcctggccaagggcgccatgctcacccacggcaacctggtggccaacatgctgcaggtgctggcgtgcttctcgcagcacggccccgatgggcagaagctgctcaaggacggccaggaggtgatgatcgcgcccctgccgctttaccacatctatgcctttaccgcgaactgcatgtgcatgatggtcaccggcaaccacaacgtgctgattaccaaccctcgggatattcccggcttcatcaaggagctgggcaagtggcgattctctgcgttgctgggcctcaacaccctgtttgttgcgctgatggaccatcctggtttccgccagctggatttctcggcgctgaaagtcaccaactccggcggtacggcgctggtcaaggcaaccgccgagcgctgggaagcccttaccgggtgccgcatcgtcgaaggctacggcctgaccgaaacctcgcctgtggccagcaccaacccctatggtcaattggcgcgcctgggcacagtgggtactccggtggcgggtactgcattcaaggtcattgatgatgacggcaacgaaatgccgctgggcgagcgcggcgagttgtgcatcaaggggccacaggtgatgaagggttactggcagcagcccgaggccacggcccaggccctggatgccgaaggctggttcaagaccggtgacatcgcggtgatcgacccggacggcttcacccgcatcgtcgatcgcaagaaggacatgatcatcgtctcgggtttcaacgtgtaccccaacgagatcgaggacgtggtgatgggccaccccaaggtcgccaactgtgcagccatcggcgtgccggacgaccgctccggcgaggcggtgaagctgttcgtggtgccgcgcgagggcgggctgagcgtggatgagctgaaggcctactgcaaggccaacttcaccggctacaaagtacccaagcacatcgtgctgcgcgagtcgttgccgatgacgccggtaggcaagattctgcgacgggagttgcgcgacatcgcttga

SEQ ID NO: 28383 - protein, 562 aa, Pseudomonas putida GB-1
MQAEFWNDKRPAGVPSTIDINAYASVVEVFERSCKRFADRPAFSNLGVTLSYAELERHSAAFTAWLQQHTDLKPGDRIAVQMPNVLQYPIAVFGAMRAGLIVVNTNPLYTEREMRHQFKDSGARALVYLNMFGKRVQEVLPDTGIEYLIEAKMGDLLPTAKGWLVNTVVDKLKKMVPAYNLPQAVPFKQVLREGRGLSPKPVPLNLDDIAVLQYTGGTTGLAKGAMLTHGNLVANMLQVLACFSQHGPDGQKLLKDGQEVMIAPLPLYHIYAFTANCMCMMVTGNHNVLITNPRDIPGFIKELGKWRFSALLGLNTLFVALMDHPGFRQLDFSALKVTNSGGTALVKATAERWEALTGCRIVEGYGLTETSPVASTNPYGQLARLGTVGTPVAGTAFKVIDDDGNEMPLGERGELCIKGPQVMKGYWQQPEATAQALDAEGWFKTGDIAVIDPDGFTRIVDRKKDMIIVSGFNVYPNEIEDVVMGHPKVANCAAIGVPDDRSGEAVKLFVVPREGGLSVDELKAYCKANFTGYKVPKHIVLRESLPMTPVGKILRRELRDIA

SEQ ID NO: 28384 - DNA, 1683 bp, Pseudomonas putida GB-1
  CDS (1)..(1683): transl_table=11
atgagtcaaccgagttatacccgcggtcgccaggaccaagccttgctgacccagaccatcggccaggccttcgatgccaccgtggcccgctgtgccgacagcgaggcgctggtgtcgcgccatcaaggcctgcgctacagctggcggcagttggccgcacaggtcgaaaaccatgcacgcgcgctcatggccctgggcgtgaacaccggcgagcgtgtcggtatctggtcgcccaactgcgcgcaatggtgcattttgcaactggccagcgccaaggttggggccatcctggtcaacatcaaccctgcctatcgcgtgggcgagttggaatacgtgttgcgccagtccagctgtcgctggctggtgtgtgccgatgccttcaagacgtctgattaccatgccatggttcaggaactggtgcctgaattggccagcgccaagccaggtgaactggccagtgagcgcctgccagcgttgcgcggtgtgatcagcctggccgccaacccgcctgccggcttcctgccctggcacgcattgcccgagtgggcagggcagacctcgccagaggcctgcagcgctcgccagcaaagcctgcagttcgaccagccggtgaacatccagtacacctccggcaccaccggcgcgcccaagggtgccaccctcagtcactacaacatcctcaacaacggtttcatggtcggcgaaagcctggggctgaccgagcgcgaccgtatggtgatcccggtgccgctgtaccactgcttcggcatggtcatggccaacctcggttgcatcacacacggcagcaccatgatctaccccaacgacgccttcgacgccgagcttaccctgcgcgccgtggccgaggagcgcgccagcatcctctatggcgtgccgaccatgttcatcgccatgctcgaccacccgtcgcgtgcgcagatggacctgtcgaccctgcgcagtggcatcatggccggtgccacctgcccgatcgaggtgatgcgccgggtcatcgaccagatgcacatggccgaagtgcagattgcctacggcatgaccgaaaccagcccggtgtcgctgcagaccggcccggacgacgacctggaactgcgcgtgaccaccgtcggccgcacccagccgcagctggaaaacaagctggtggacgccgacggctgcatcgtcccgcgcggtgagatcggtgaactgtgcacccgtggctacagcgtgatgctcggctactgggacaacccccaggccacggcggacgccatcgacccggcgggctggatgcattcgggcgacctggcggtgatggatgaacatgggcacgtgcgcatcgtcgggcgcaacaaggacatgatcattcgtggcggtgagaacatttacccgcgtgagctggaagagttcttctatacccacccggcggtggccgatgcgcaggtgatcggcattccgtgcagccgctatggtgaagaaatcgtggcctggatcaagctgcacccagggcatagcgccacggttgaggaactgcagggttggtgcaaggcacgcatcgcccacttcaaggtgcctcggcatattcgttttgttgaggaatacccgatgacggtgaccggcaaggtgcagaagttccgcatgcgggagattagtgtggcggaaatctcggcggtatctgcgggttga

SEQ ID NO: 28385 - protein, 560 aa, Pseudomonas putida GB-1
MSQPSYTRGRQDQALLTQTIGQAFDATVARCADSEALVSRHQGLRYSWRQLAAQVENHARALMALGVNTGERVGIWSPNCAQWCILQLASAKVGAILVNINPAYRVGELEYVLRQSSCRWLVCADAFKTSDYHAMVQELVPELASAKPGELASERLPALRGVISLAANPPAGFLPWHALPEWAGQTSPEACSARQQSLQFDQPVNIQYTSGTTGAPKGATLSHYNILNNGFMVGESLGLTERDRMVIPVPLYHCFGMVMANLGCITHGSTMIYPNDAFDAELTLRAVAEERASILYGVPTMFIAMLDHPSRAQMDLSTLRSGIMAGATCPIEVMRRVIDQMHMAEVQIAYGMTETSPVSLQTGPDDDLELRVTTVGRTQPQLENKLVDADGCIVPRGEIGELCTRGYSVMLGYWDNPQATADAIDPAGWMHSGDLAVMDEHGHVRIVGRNKDMIIRGGENIYPRELEEFFYTHPAVADAQVIGIPCSRYGEEIVAWIKLHPGHSATVEELQGWCKARIAHFKVPRHIRFVEEYPMTVTGKVQKFRMREISVAEISAVSAG

SEQ ID NO: 28386 - DNA, 1614 bp, Marinobacter sp. ELB17
  CDS (1)..(1614): transl_table=11
atgaataagtacaaaaagttcgacagaacacgcgccaatttttccgcactgacaccacttacgttgctacagcgctcggcaactgtgtatccggataaacaggccgtaatcgatgtcgacctggtgctttcctatggtgagctataccgacgctgctgccagatgagtgatgcgctgagacgcagaggtgttaatcccggagatacggtcgccatactaagcccgaatagccacgagatgcttgagtctcactactccgtgccgatggcaggtgccgtcattaatacgattaatattcgcctggatgccgcaacgctctcctttattttagggcatggcgaggcgcgtgtgctgttctatgacacagattgggaggatgtggtgcgtgcagcggtctcggagctggaagcgccgccacttctgatttctatcgagagtaaagcgggcgtgagtgatggacttgcacaacaggattatgaaaaccttctgttagaggggaatgcggaggccagttggcagcgccccaatgacgagtgggatgctattgctctgaactatacatcgggtacaacgggtaatccgaaaggcgtgatttaccaccatcgtggtgcttttctggccgcgatgaccaactccatggtgtttcaaatgacgcctgagacggtctacttgtggactcttccgatgttccattgcaatggttgggcctacacttgggcgataacggcagtgggtggaacccacgtttgtctccgggatgtggacccgatgaacatttatcgccatatcgagacttaccgagtgactcatatgtgcggagcgccggtggtaatgaacatgttgctgcaagagctcgggcgagaaaagctgaagctgtcccgttcgacccagttcgctttgggtggtgcagcacccccgagcagtgtgattcgaaaagcggaagagatcggttttcagattactcacctctacggtttgaccgagacgtttggtccatccgcattgtgcgtgccccagcccgagtggcaggcccttccgctggaacaaagagcattgaaaatgtcccgtcagggcgtttccacccatgggctggatgagattgctgttctcgatgttgttagtggtgaatccgtgcctgctgatggcaaaaccatgggtgagatctgtattcggggaaacaccgtgatgaagggctatctgaaaaatccggaagcgaccgccaatgcctttcgtaacgaatggtttcacacgggcgacctggcggtcatgcaccctgaccactacgtcgagattcgggaccgggccaaggatgtaatcatatccggcggagagaacatttctagccttgaggttgaggaagtgctttaccgccacccacaggtctccgaggctgctgtagtcgcaatggccgatgaaaagtggggcgaagtaccttgtgcttttgtccatctgattgacgatagtgaagagataacatgcgaggacattatagctttttgtagggagcacatgccgcatttcaaggcgcccaggaaggtggtgtttggtgagttgccgaaaaccgctaccggaaagatacgcaaaaatattcttcgggattcgctgttcccataa

SEQ ID NO: 28387 - protein, 537 aa, Marinobacter sp. ELB17
MNKYKKFDRTRANFSALTPLTLLQRSATVYPDKQAVIDVDLVLSYGELYRRCCQMSDALRRRGVNPGDTVAILSPNSHEMLESHYSVPMAGAVINTINIRLDAATLSFILGHGEARVLFYDTDWEDVVRAAVSELEAPPLLISIESKAGVSDGLAQQDYENLLLEGNAEASWQRPNDEWDAIALNYTSGTTGNPKGVIYHHRGAFLAAMTNSMVFQMTPETVYLWTLPMFHCNGWAYTWAITAVGGTHVCLRDVDPMNIYRHIETYRVTHMCGAPVVMNMLLQELGREKLKLSRSTQFALGGAAPPSSVIRKAEEIGFQITHLYGLTETFGPSALCVPQPEWQALPLEQRALKMSRQGVSTHGLDEIAVLDVVSGESVPADGKTMGEICIRGNTVMKGYLKNPEATANAFRNEWFHTGDLAVMHPDHYVEIRDRAKDVIISGGENISSLEVEEVLYRHPQVSEAAVVAMADEKWGEVPCAFVHLIDDSEEITCEDIIAFCREHMPHFKAPRKVVFGELPKTATGKIRKNILRDSLFP

SEQ ID NO: 28388 - DNA, 1629 bp, Marinobacter sp. ELB17
  CDS (1)..(1629): transl_table=11
atgacttcgatctacgaccagggccttacgcccgttgatgccaattacgccgttcaaacacctatcgattttattactcgcaccgccagtgtttatccggattatcctgcgattattcacggtgccattcgccgaacctgggccgagacccacgagcgcagtttgcgcctggcgtcggcgctggtcggccgcggcatcaaaaaaggcgataccgtcgccgtcatgctgcccaatattccagccatggttgagtgtcattttggtgtgcccatgaccggcgcggtaatgaacgccctgaacgttcggctcgatgccgaagtgattgcttacatgcttgaacacgcagaagccaaagtcattctggtcgatcgcgaatttggcgaagtgattctggaagccgtcagccgcttggacaaaaagccgctgataattgatgtagacgaccccgaatacggtgaaggcgttaaggtcagcgatctggattatgaagccttcttgcaagaaggcgaccccgagtaccagtgggatatgccgactgatgaatgggacgccatttccctgaactacacctctggcaccaccggcaaccccaaaggtgtggtgtatcaccaccgtggggcttacttgaattcactgggtaataccgcggtatggtctatggccatgcatccggtgtacctgtggaccctgccgatgttccactgtaacggctggtgtttcccctggaccatcaccgccatggccggtacccacgtgtgcctgcgccgggttgatccagaaaaaattctgcagctgatccgcgagcaccgtgttacccacatgtgcggcgccccgattgtgctgaacgccttgttgaacgtgccgcctgcatccaaggccggtattgatcatgttgtgaaggctatggttgccggtgctccgcctcccgcccaggttattggtgcagttgaagaaatgggcatcgcgttgacccacacctacggcctgaccgaagtatacggccctgtgaccgtctgcgcctggaaagatcgttggaacgatctgccgctggcagagcgcgctgccatcaaatcccgccaaggcgttcgttaccacaccctaggcggcaccatgattgcagacccgggcaccatgaagccgacgccgaaagacggcaaaaccattggtgaaatctttctgcgcggtaacaccgtgatgaagggctacctgaagaacccgaaagccacggaagaagccttccgcggcggctggttccacaccggcgacctggccgtttggcacgaagacggttacatggaaatcaaagaccgcctgaaagacatcattatttccggcggcgagaacatttccaccattgaaattgaaaacgttctttaccgtcacccggcggttatggaggcggccgttgtcgcccgcccggatgaaaagtggggcgaaacaccctgcgcctttgtgactctaaagcccgacgccggcaacgtgaccgaagcagcaatgatcgatttctgccgtaagcacatggcccgtttcaaggttccgaaaaccgtggtgttttcggacctgccgaaaacctcgaccggtaaagtccagaaattcctgctgcgcgaacaggctaaggaaatcaagtag

SEQ ID NO: 28389 - protein, 542 aa, Marinobacter sp. ELB17
MTSIYDQGLTPVDANYAVQTPIDFITRTASVYPDYPAIIHGAIRRTWAETHERSLRLASALVGRGIKKGDTVAVMLPNIPAMVECHFGVPMTGAVMNALNVRLDAEVIAYMLEHAEAKVILVDREFGEVILEAVSRLDKKPLIIDVDDPEYGEGVKVSDLDYEAFLQEGDPEYQWDMPTDEWDAISLNYTSGTTGNPKGVVYHHRGAYLNSLGNTAVWSMAMHPVYLWTLPMFHCNGWCFPWTITAMAGTHVCLRRVDPEKILQLIREHRVTHMCGAPIVLNALLNVPPASKAGIDHVVKAMVAGAPPPAQVIGAVEEMGIALTHTYGLTEVYGPVTVCAWKDRWNDLPLAERAAIKSRQGVRYHTLGGTMIADPGTMKPTPKDGKTIGEIFLRGNTVMKGYLKNPKATEEAFRGGWFHTGDLAVWHEDGYMEIKDRLKDIIISGGENISTIEIENVLYRHPAVMEAAVVARPDEKWGETPCAFVTLKPDAGNVTEAAMIDFCRKHMARFKVPKTVVFSDLPKTSTGKVQKFLLREQAKEIK

SEQ ID NO: 28390 - DNA, 1551 bp, Erythrobacter sp. SD-21
  CDS (1)..(1551): transl_table=11
atgtcagaagagccgaaactgagtttcgaccagttcattcgtcactgggccagggagaggcccggtcacacggcgctcgaacaggatggcgcggccatcactttcggcgagttcgaggagcgcagccgcaagatcgtcgccatgctggcggcacgcggtatcgccaagggcgaccgggtcgcctggctgggcaagaattcgcggctctatttcgaactgttctattcggctgcccgcatgggtgcggtgatggtgcctatcggctggcggctggccgcgcccgaagtagcctatatcctcggcgacacaggcgcgaagctgctttccatcggcgaaggcttcgaggaggcggcggctaaggcctgcgggcagatggacagcccgccgcaagtgatctccacgcccgatgcggagggagctatcgagaacgaggctgcaaaggagttcgagcccgccggccccgacgacgccgtgctccagctctacacttccggcaccaccggtaatcccaagggcgcggtgctgaccaaccgcaacctcttcgcgctgcgcgtaccgagcgaggaggagggccagccctggtcgcatttcgacgaggacgaggcgattctcgtctgcatgccctgcgcgcatatcggcgggacgggtctcggcatcatggcgatgagcagcgggatccgcgcgatcgtgcaggaggaattcacgccggacggtgtgctcgacgggttcgagcagggcatcacgcggctcttcattgtacctgcggcgctgcagatggtcgtccagcatccgcgcgcgaagactaccgatatgtcggcaataaaatacgtgctctatggcgcggcgccgatcccgctcgacctgctgcgcgaagcggtgaagaccattcccgatgccggtttcctccagtgctacggcatgaccgagaccaccggcaccatcgccgcgctgccgccggaagaccacgacctcgacggcaaccagcggatgaaatccgcgggtaaggcggtgccgggtgtcgaactcaaggtgatcggagaggatgacgcggaattgccgcgcggcgaagtcggcgaactgatctgccgcagcccctccaacatggccggctactggaatctgcccgaagcgaccgaaagctcgctggtcgacggctggatgcacacgggcgatgccgcctacatggacgaggacggctacgtctacatccaggaccggatgaaggacatgatcatctccggcggcgagaacgtctatccggcgcaggtcgaaagcgcaatttacggccacccgcagattgccgaagtggcggtgatcggcgtgccggacgagacctggggtgagacggtgaaggcctgcatcgtgctcaagcccggagaagagctggacgaggcctcggtcatcgcctggacgaaggagcggctggccggcttcaaggtcccgcgcagcatcgacgtgctcgacgtcatgccccgcaacgccagcggcaagatcctgcgcaaggacctgcgcgccccctattggaagggccgcgagaggcaggtcaattga

SEQ ID NO: 28391 - protein, 516 aa, Erythrobacter sp. SD-21
MSEEPKLSFDQFIRHWARERPGHTALEQDGAAITFGEFEERSRKIVAMLAARGIAKGDRVAWLGKNSRLYFELFYSAARMGAVMVPIGWRLAAPEVAYILGDTGAKLLSIGEGFEEAAAKACGQMDSPPQVISTPDAEGAIENEAAKEFEPAGPDDAVLQLYTSGTTGNPKGAVLTNRNLFALRVPSEEEGQPWSHFDEDEAILVCMPCAHIGGTGLGIMAMSSGIRAIVQEEFTPDGVLDGFEQGITRLFIVPAALQMVVQHPRAKTTDMSAIKYVLYGAAPIPLDLLREAVKTIPDAGFLQCYGMTETTGTIAALPPEDHDLDGNQRMKSAGKAVPGVELKVIGEDDAELPRGEVGELICRSPSNMAGYWNLPEATESSLVDGWMHTGDAAYMDEDGYVYIQDRMKDMIISGGENVYPAQVESAIYGHPQIAEVAVIGVPDETWGETVKACIVLKPGEELDEASVIAWTKERLAGFKVPRSIDVLDVMPRNASGKILRKDLRAPYWKGRERQVN

SEQ ID NO: 28392 - DNA, 1737 bp, Janthinobacterium lividum
  CDS (1)..(1737): transl_table=11
atgacagtgattttccagcgccggtgctatgctgacccctatcaatcccgaaacagggagctacagaattccagtacctatattatttaccaggagacaagcatgacagctgatttcaacaccggcctcggcaaaaacagcgccaactacgccgccctcactccgctcgactatatcgccagggctgccgcagtatatggcaatcgcctggcaattgcacatggcgccgtgcgccagacctggggggtaacgtatgcgcgcacgcgccgcctggcctccggcctcatcaaactgggcgtaagcacgggcgacacggtggccgtgatgctgcccaacacgcccgccatggtggaagcgagctttggcgtcccgatggccggcgccgtcctcaatgccctgaatatccgcctcgatctggcttcgctgaccttcatgctgcgccatggccaggcgaaagtcttgctggccgatacggaatttgccgagctggcgcgccagatggcggcgcagattcccggcctgcgcgtgatccaggtcaacgacgtgctagggccggaagtggacgctttttcggacctcgactatgaaagcttgctggccagcggcgaccccgattatgactggcagccgccggccgacgagtgggacgccatcgccctcaactatacttccggcaccacgggcgacccgaaaggcgtcgtctaccaccaccgcggcgcggcgctcaacgccctgtcgaacatcctggaatgggacatgcccaagcatgccgtctacctgtggaccttgccgatgttccactgcaatggctggtgcttcccgtggaccatcgccgcgcgcgccggcgtcaacgtgtgcctgcgcaagttcgagcccaagctcgtgttcgacctgatgcgcgaattgcgcatcacccactattgcgccgcacccatcgtgcacgcggccctggccaacgcgcccgccaactggcgcgacggcatcgattggaccgtgcgcggcatggtggctggcgcgccgccgcctgccgccatggtggcgaaaatcgaagccatgggtttcgatctgatccactcgtatggcttgacggaagtgtacggcccggccgccatctgcgccgagcaggacgagtgggcggccttgagccaggaagaacgggccgtgttgaaatcgcgccagggcgtgcgctaccacctgcaaagcgccgtcgccgtgatcgacccggaaaccatgcagccggtagcggccgacggcgaacagatcggtgaaatcatgttccgtggcaacatctgcatgaagggttacttaaaaaatgaaagggcgacgcaggaagcgtttgccggtggctggttccacacgggcgaccttggtgtcatgtatccggacggctacatcaagttgaaggaccgcagcaaggacatcatcatttccggcggcgagaacatttccagcgtggaagtcgaagacgccttgtaccaccacccgcaagtgctggccgccgccgtcattgcccagccggacgagaaatggggcgaaacgccatgcgccttcgtcgaactgcgcgaaggcggcacggtgacggaagccgaattgatcgccttctgcaagaacaacctggccggattcaaggtgccgaaagccatttatttcggtcccctgccccgcacgtcgacgggcaagatccagaagttcgaattgcgcaagcgcatgcagtcggacaaggccatcgacgtctga

SEQ ID NO: 28393 - protein, 578 aa, Janthinobacterium lividum
MTVIFQRRCYADPYQSRNRELQNSSTYIIYQETSMTADFNTGLGKNSANYAALTPLDYIARAAAVYGNRLAIAHGAVRQTWGVTYARTRRLASGLIKLGVSTGDTVAVMLPNTPAMVEASFGVPMAGAVLNALNIRLDLASLTFMLRHGQAKVLLADTEFAELARQMAAQIPGLRVIQVNDVLGPEVDAFSDLDYESLLASGDPDYDWQPPADEWDAIALNYTSGTTGDPKGVVYHHRGAALNALSNILEWDMPKHAVYLWTLPMFHCNGWCFPWTIAARAGVNVCLRKFEPKLVFDLMRELRITHYCAAPIVHAALANAPANWRDGIDWTVRGMVAGAPPPAAMVAKIEAMGFDLIHSYGLTEVYGPAAICAEQDEWAALSQEERAVLKSRQGVRYHLQSAVAVIDPETMQPVAADGEQIGEIMFRGNICMKGYLKNERATQEAFAGGWFHTGDLGVMYPDGYIKLKDRSKDIIISGGENISSVEVEDALYHHPQVLAAAVIAQPDEKWGETPCAFVELREGGTVTEAELIAFCKNNLAGFKVPKAIYFGPLPRTSTGKIQKFELRKRMQSDKAIDV

SEQ ID NO: 28394 - DNA, 1635 bp, Janthinobacterium lividum
  CDS (1)..(1635): transl_table=11
atgacagctgatttcaacaccggcctcggcaaaaacagcgccaattacgccgccctcaccccgcttgactatattgccagggcagccgcagtatatggcaatcgcctggcaattgcacatggcgccgtgcgccagacgtggcaagaaacctatgcgcgcacgcgtcgcctggcatcaagcctcatcaagctgggcgtgggcacgggcgataccgtcgccgtgatgctgccgaatacccccgccatggtggaagcgagctttggcgtccctatggccggcgccgtcctcaatgcattgaacatccgcctcgacctggcctcgctgactttcatgctgcgccatggccaggcgaaagtcttgctggccgacacggaatttgccgagctggcgcgccagatggcggcgcagattcctggcttgcgcgtgatccaggtcaacgacgtactgggaccggaagtggaaccatttgccgagctcgactatgaaaccctgctggccagcggcgaccccggttacgactggcagccgccggcggacgagtgggatgccatcgccctcaactacacgtccggcaccacgggcgacccgaaaggcgtcgtctaccaccaccggggcgcggccctgaatgccctgtcgaacatattagagtgggacatgcccaagcatgccgtctacttgtggaccttgccgatgttccactgcaatggctggtgcttcccgtggaccgtggccgcacgtgccggcgtcaacgtgtgcctgcgcaagttcgagccgaagctcgtgttcgacctgatgcgcgaattgcgcatcacccactattgcgcggcgcccatcgtgcatgcggccctggccaacgcgcccgccaactggcgcgacggcatcgactggaccgtgcgcggcatggtggccggtgcgccgccgccggcggccatggtggcgaagatcgaagcgatgggctttgacttgatccactcatacggcttgacggaagtgtacggccccgccgccatctgcgccgagcaggatgagtgggcggccctgtcgcaggaagagcgggccgtgttgaaatcgcgccagggcgtgcgctaccacctgcaaagcgccgtggccgtgctggacccggaaaccatgcagcccgtggcggccgacggcgaacagatcggcgagatcatgttccgtggcaacatctgcatgaagggttatctgaagaatgaaagggcgacgcaggaagcgttcgctggcggctggttccacacgggcgacctcggtgtcatgtatccggacggctatatcaagctgaaggaccgcagcaaggacatcatcatttccggcggcgagaatatttccagcgtggaagtggaagacgcgctgtaccaccacccgcaagtactggccgccgccgtcatcgcccagccggacgagaaatggggcgaaacgccgtgcgcgtttgtcgaattgcgcgaaggcggcacggtgacggaagcggaattgatcgccttctgcaagaacaacctggcgggattcaaggtgccgaaagccatttatttcggccccctgccccgcacgtcgacaggcaagatccagaagttcgaattgcgcaagcgcatgcagtcggacaaggccatcgacgtctag

SEQ ID NO: 28395 - protein, 544 aa, Janthinobacterium lividum
MTADFNTGLGKNSANYAALTPLDYIARAAAVYGNRLAIAHGAVRQTWQETYARTRRLASSLIKLGVGTGDTVAVMLPNTPAMVEASFGVPMAGAVLNALNIRLDLASLTFMLRHGQAKVLLADTEFAELARQMAAQIPGLRVIQVNDVLGPEVEPFAELDYETLLASGDPGYDWQPPADEWDAIALNYTSGTTGDPKGVVYHHRGAALNALSNILEWDMPKHAVYLWTLPMFHCNGWCFPWTVAARAGVNVCLRKFEPKLVFDLMRELRITHYCAAPIVHAALANAPANWRDGIDWTVRGMVAGAPPPAAMVAKIEAMGFDLIHSYGLTEVYGPAAICAEQDEWAALSQEERAVLKSRQGVRYHLQSAVAVLDPETMQPVAADGEQIGEIMFRGNICMKGYLKNERATQEAFAGGWFHTGDLGVMYPDGYIKLKDRSKDIIISGGENISSVEVEDALYHHPQVLAAAVIAQPDEKWGETPCAFVELREGGTVTEAELIAFCKNNLAGFKVPKAIYFGPLPRTSTGKIQKFELRKRMQSDKAIDV

SEQ ID NO: 28396 - DNA, 1536 bp, Amycolatopsis orientalis
  CDS (1)..(1536): transl_table=11
gtgtccttgtccctagcggccgtcctcgccgactcggcgggcaggcggccggaccaccccgcgctcgtgttcgacggggaaccgttctcctaccgggaactctgggccggggcgaagaggtacgcctccgcgctccgggaccagggggtcgccgccggcgaccgggtcgtgctgctcctgccgaacacgccggagttcccgatggtctacttcggcgcgctggcgctcggcgcggtcgtcgtgccggtgcacacgttgctcgtcgcggaggagatccactacatcctcaccgactgtgacgcccgggtgctgatctgcggagccgccctgctggagcagggcggcgaggccgccgacgcggccggtgtcgaagtcctgacgatgctggaggactccgacaccggccgcgtccgcctcgacgtcctcgccggggacgcggccgagatcgagcggtacgaaccgcgtgaaccctcggacctcgcgctgatcctctacacctcggggaccaccggcaaacccaagggcgcgatgctgacccacctgagcatcgtgctgaacgtttccaccacgatgctgtcgccgttcgacttccacgccgacgacgtgctgctcggctgcctgccgctgttccacaccttcggccagatctgcgggatggcgacctgtttccgcgccggcgcgacgatggtgctgatgtcgcggttcgacgcgcgagccgcgctggaactgatggtggagcagaactgctcgctgttcatgggcgtgccgacgatgtacgtcgcgttgctggaggccgccgaggacgagccgcggcggcccaaactcgaccgggccttctccggtggttcgtcgctgcccgtagcgctgctggagcggttcgaggccgtgttcgactgcccgatctacgagggatacggcctcaccgagacctcgcccgtggtggcctacaaccagcgcgcgtggccgacccgcgcgggcaccgtcggcaaaccgatctggggcgtggacgtcgccatcgcgcgcgccgagaccgaagaccggatcgaacccgtgccgccgggtgaggtcggcgagatcgtcgtccggggccacaacgtgatggcgggctacctgaaccgtcccgaggccacggcggccgcgatcgtggacggctggttccgcagcggcgacctaggcttcctcgacgacgacggctatctgtccattgtggaccgtaagaaggacatgatccttcgcggcggctacaacgtgtatccgcgcgagatcgaggaagtgctggccaggcatcccgcgatcgcccaggtcgcggtcgtcggcgtgccggacgaacggtacggcgaggagatctgcgccgtcgtggtggccgcttccgatcgggaacccgggccggaactggcggcggaactcgtggcgtggagcaagaagcgcgtggcggcctacaagtatccgcgccgcgtggagttcctggacgcgatgccgctcgggcccagcgggaagatcctcaagcgggagctggcggagctcctcgggcactga

SEQ ID NO: 28397 - protein, 511 aa, Amycolatopsis orientalis
MSLSLAAVLADSAGRRPDHPALVFDGEPFSYRELWAGAKRYASALRDQGVAAGDRVVLLLPNTPEFPMVYFGALALGAVVVPVHTLLVAEEIHYILTDCDARVLICGAALLEQGGEAADAAGVEVLTMLEDSDTGRVRLDVLAGDAAEIERYEPREPSDLALILYTSGTTGKPKGAMLTHLSIVLNVSTTMLSPFDFHADDVLLGCLPLFHTFGQICGMATCFRAGATMVLMSRFDARAALELMVEQNCSLFMGVPTMYVALLEAAEDEPRRPKLDRAFSGGSSLPVALLERFEAVFDCPIYEGYGLTETSPVVAYNQRAWPTRAGTVGKPIWGVDVAIARAETEDRIEPVPPGEVGEIVVRGHNVMAGYLNRPEATAAAIVDGWFRSGDLGFLDDDGYLSIVDRKKDMILRGGYNVYPREIEEVLARHPAIAQVAVVGVPDERYGEEICAVVVAASDREPGPELAAELVAWSKKRVAAYKYPRRVEFLDAMPLGPSGKILKRELAELLGH

SEQ ID NO: 28398 - DNA, 1671 bp, Oryza sativa subsp
  CDS (1)..(1671)
atgggcgacgccgcggtacccgccatggtggtggaggaggaggaacaggagcacgtgttccggagcaggttcccgccggtggccgtgccggacggcgtcaccgtgccggagttcgtgctggacggcgccgaggcctacgccgacagggtggcgctcgtggaggccgcggcgggcgggcggtcgtacacgtacggcgaggtggcgcgcgacacggcgcggttcgccagggcgctccggtcggtgggcgtccggaaggggcacgtcgtcgtcgtcgcgctcccaaacctcgccgtgtaccccgtcgtgtcgctcgggatcatgtcggcgggggccgtgttctccggcgtgaacccgcgcgcgctcgccgcggagatcaagaagcaggtggaggactccgaggcgaagctggtcgttgccaacgaggtcgcgttcgacaaggtgaaggacgccggcgtgccggtgatcggcgtcggcgacagggagcggatgcctggggcgatcagctgggacgagcgcctcgccgcggccgaccgcaccggcgcgccggtgatggcgccgccggagcccgtacagcagtcggacctgtgcgcgctgccctactcgtccggcacgacgggggtctccaagggcgtgatgctgagccaccggaacctggtgtccagcctgtgctcctccatgttcgccgtcggcgaggagctcgccggggaggtcgtcaccctggggctgatgcccttcttccacatctacggcatcaccggcatctgcctggcgacgctccggcacaagggcacggtggtggtgatggaccggttcgagctgcgcgcgttcctgcgcgccctggtggcgcaccgcgtggcgttcgcgccgctggttccccccgtgatgctcgccatggtgaagagccccgccgccgccgagctcgacgtgtcggcgctcgcgctcaggtccgtcatgaccgccgccgcgccgctcgcccccgacctcctggcggcgttccgggacaagttccccggcgtgcaggtggaggaagcctacggcctcaccgagcacagctgcatcaccctcacgcacgccgccggcgacggccacggccacgtcgccaagaagagctcggtggggttcatcctgccgaacctggaggtgaagttcgtggacccggacaccgggaggtcgctgccggcgaacacgccgggggagctgtgcgtgcggagccagagcgtgatgcaggggtactacaagaggaaggaggagacggagcgcacggtggacggcaaggggtggctgcacaccggcgacgttgggtacatcgacggcgacggcgacgtgttcatcgtggacaggatcaaggagctgatcaagtacaaggggtttcaggtcgcccccgccgagctcgaggccgtcctcctctcccacccctccgttgaggacgccgccgtcttcggggtgccggacgaggaggccggcgaggtgccggtggcgtgcgtggtgcggcggcacggtgcggaggagggggaggaggagatagtggcgtacgtggcggagagggtggcgtcgtacaagcgggtccgggtgctgcacatcgtcgacgccatccccaagtcggtgtccgggaagatcctgaggaggcagcttagggacgagttcatcaagaggatgaaaccgtcagcttga

SEQ ID NO: 28399 - protein, 556 aa, Oryza sativa subsp
MGDAAVPAMVVEEEEQEHVFRSRFPPVAVPDGVTVPEFVLDGAEAYADRVALVEAAAGGRSYTYGEVARDTARFARALRSVGVRKGHVVVVALPNLAVYPVVSLGIMSAGAVFSGVNPRALAAEIKKQVEDSEAKLVVANEVAFDKVKDAGVPVIGVGDRERMPGAISWDERLAAADRTGAPVMAPPEPVQQSDLCALPYSSGTTGVSKGVMLSHRNLVSSLCSSMFAVGEELAGEVVTLGLMPFFHIYGITGICLATLRHKGTVVVMDRFELRAFLRALVAHRVAFAPLVPPVMLAMVKSPAAAELDVSALALRSVMTAAAPLAPDLLAAFRDKFPGVQVEEAYGLTEHSCITLTHAAGDGHGHVAKKSSVGFILPNLEVKFVDPDTGRSLPANTPGELCVRSQSVMQGYYKRKEETERTVDGKGWLHTGDVGYIDGDGDVFIVDRIKELIKYKGFQVAPAELEAVLLSHPSVEDAAVFGVPDEEAGEVPVACVVRRHGAEEGEEEIVAYVAERVASYKRVRVLHIVDAIPKSVSGKILRRQLRDEFIKRMKPSA

SEQ ID NO: 28400 - DNA, 1623 bp, Magnetospirillum gryphiswaldense
  CDS (1)..(1623): transl_table=11
atggccgtcaccaacgcgtatgatcgggatttggacaagaacgccgcgaatttcgtcgcgctgacgcccctgaccttccttgagcgcaccgcctccgtctggccggatcgtgtcgccgtgattcatggcccggtgcgtcgcacctggggcgaaaccttggtccgcgtgcgccgtctggccgccggtctggccgcgcgcggcatcggcaagggcgacaccgtggccatgctggccgccaacacgccggaactgttcgagggccatttcgccatcccgctggccggggcggtgctcaacgccatcaacacccgtctggacgccgaggccatcaccttcatcctcgaacacggcgaagccaagctgctgatcgtcgaccgtgaattctccaaggtgacgaaaaaggcgctggaaggcctcaaggtcaagattccggtgttcgacatcgacgatcccacctatgtgggcggcgagctgatcggcgaaggcacctatgaggatttgctggccgacgagttgcacccgtggaccatgcccggcgacgaatgggacgccatcgcccttaactacacctcgggcaccaccggcaaccccaagggcgtggtctaccaccatcgcggcgcttatctgaacgcggtgtccaacgccctgggctggaccctgcccgatggtccggtctatctgtggaccctgcccatgttccactgcaacggctggtgcttcccctggaccatggccgccgccgccggcaccagcgtctgtctgcgccatgtccgggtcgagccgatcctcgacctgatccgcagcgagaatgtcggctatttctgcggcgcccccatcgtgctgaacatgatcaacaacgcccccgccgccttgaaggagggcatcagccagccggtcaaggtgatgaccgccggtgccgccccgccggccgccgtcatcgccggcatggagcgcatgggctgggaagtcacccacgtctatggcctgaccgaggtttatggtccggtcatccaatgcgtttggcacgacaagtggaacgatctgtccatcgacgacaaggccaagatcaaggcccgccagggcgtgcgcggccccatgctggaagcggtgatggtcgccgaccccatgaccttggaaccctgccccaaggacggcatgaccatgggcgaaatcttcatgcgcggtaacaacgtcatgaagggctatctgaagaaccctaaggcgacggtggaaagcttcgagggcggctggttccacaccggcgatctggccgtgtggcacgccgacggctatgtggagatcaaggaccgctccaaggacatcatcatctcgggcggcgagaacatctcgtccatcgaggtggaagacgtgctttacaagcatcccgacgtgatggaagccgccgtggtggcgcggcccgacgaaaaatggggcgagacgccgtgcgccttcgtcagcctgaaggacggcgccacctgcaccgaggaagatatcatcgccttttgcaaggcgcacatggccgggttcaagaccccgcgcaccatcgttttcggcccgctgcccaagaccagcaccggcaagattcaaaagttcatgctgcgtcagcaggcgaaggagctgtaa

SEQ ID NO: 28401 - protein, 540 aa, Magnetospirillum gryphiswaldense
MAVTNAYDRDLDKNAANFVALTPLTFLERTASVWPDRVAVIHGPVRRTWGETLVRVRRLAAGLAARGIGKGDTVAMLAANTPELFEGHFAIPLAGAVLNAINTRLDAEAITFILEHGEAKLLIVDREFSKVTKKALEGLKVKIPVFDIDDPTYVGGELIGEGTYEDLLADELHPWTMPGDEWDAIALNYTSGTTGNPKGVVYHHRGAYLNAVSNALGWTLPDGPVYLWTLPMFHCNGWCFPWTMAAAAGTSVCLRHVRVEPILDLIRSENVGYFCGAPIVLNMINNAPAALKEGISQPVKVMTAGAAPPAAVIAGMERMGWEVTHVYGLTEVYGPVIQCVWHDKWNDLSIDDKAKIKARQGVRGPMLEAVMVADPMTLEPCPKDGMTMGEIFMRGNNVMKGYLKNPKATVESFEGGWFHTGDLAVWHADGYVEIKDRSKDIIISGGENISSIEVEDVLYKHPDVMEAAVVARPDEKWGETPCAFVSLKDGATCTEEDIIAFCKAHMAGFKTPRTIVFGPLPKTSTGKIQKFMLRQQAKEL

SEQ ID NO: 28402 - DNA, 1647 bp, Vitis vinifera
  CDS (1)..(1647)
  misc_feature (523)..(523): r is g or a
atggaggtcaagaaagaggagcagccgcagcaggagcagcgggagatcattttccggtcgaaactgcctgatatttacatcccagatcatcttccgctgcactcgtattgctttgagaatatatcgaagttcagctcaaggccttgtgtgatcgacggcgctaacggagatatttatacatacgcggatgtggagctcacagcccggagagtcggcgccggcctccacaagatggggatcaagcaaggcgaagtgataatgcttctgctgcagaattgtaccgagttcgtgttcgcatttctgggggcttcatatatcggtgcaacaagcacgacggcgaatccgttttacatgccggccgagatcgagaagcaggcgaaagcatcgaagtgtaggctgataatcacccaggcttgctactccgggaaagcgatgagtttcgcagaggaaaacgacgtgaaggtcatgtgcatcgacaccccaccggagggttgcctgcacttctcggagctgacgaacgccracgaggccgacctccccaccgtgaaaatcaacccggacgatgtcgtcgcgcttccgtactcatccggcactaccgggctcccgaaaggagtgatgctgacccacagggggcaggtcaccagcgtggcccagcaagtcgacggcgaaaaccccaacctgtatttccacagtgaggacgtcatcctctgcgtgttgccattgttccacgtctactctctgaactcagttctgctctgcggattgagagttggtgcagcaattctgattatgcagaagtttgagataatcaaattgctggagcttattaataagtataaggtcacaattgcaccgttcgtcccgccgatcgtgttggcgattgcgaagagtccggtggtggatgagtacgacctttcctccatcagaactgtcatgtccggtgctgctcccatgggtaaagagcttgaagacactgtcagagccaagctccccaacgccaagcttggacagggctacgggatgacagaggcgggacccgtgttggcaatgtgcttggcctttgcgaaagagccatttgagatcaagtctgggtcatgtggcacagtggtcagaaatgctcaaatgaagatcctcgatcccgataccggtgcctctcttccccggaatcagcccggagaaatttgcatccgaggccatcagatcatgaaaggttatctgaatgatccagaggccacagaaagaaccatagataaagaaggatggctgcacacaggtgacatcggatatattgatgatgatgatgagcttttcattgttgataggctaaaagagttgatcaaatataagggatttcaagtcgcaccagctgagcttgaagcaatgttaattgcacatcccaatgtttctgatgccgctgttgtttcgatgaaagatgaggccgctggggaggttcctgttgcattcattgtgagatcgaatggttcgaagatcactgaggatgagatcaagcaatatatctcaaagcaggtcgtgttctataaaaggatttatcgagttttcttcgtagagacaattcctaaagctccatcgggtaaaatcctgcgaaaagacttgagagcaaggctggccgttggtgttccgaattaa

SEQ ID NO: 28403 - protein, 548 aa, Vitis vinifera
MEVKKEEQPQQEQREIIFRSKLPDIYIPDHLPLHSYCFENISKFSSRPCVIDGANGDIYTYADVELTARRVGAGLHKMGIKQGEVIMLLLQNCTEFVFAFLGASYIGATSTTANPFYMPAEIEKQAKASKCRLIITQACYSGKAMSFAEENDVKVMCIDTPPEGCLHFSELTNABEADLPTVKINPDDVVALPYSSGTTGLPKGVMLTHRGQVTSVAQQVDGENPNLYFHSEDVILCVLPLFHVYSLNSVLLCGLRVGAAILIMQKFEIIKLLELINKYKVTIAPFVPPIVLAIAKSPVVDEYDLSSIRTVMSGAAPMGKELEDTVRAKLPNAKLGQGYGMTEAGPVLAMCLAFAKEPFEIKSGSCGTVVRNAQMKILDPDTGASLPRNQPGEICIRGHQIMKGYLNDPEATERTIDKEGWLHTGDIGYIDDDDELFIVDRLKELIKYKGFQVAPAELEAMLIAHPNVSDAAVVSMKDEAAGEVPVAFIVRSNGSKITEDEIKQYISKQVVFYKRIYRVFFVETIPKAPSGKILRKDLRARLAVGVPN

SEQ ID NO: 28404 - DNA, 1596 bp, Vitis vinifera
  CDS (1)..(1596)
  misc_feature (505)..(505): r is g or a
  misc_feature (696)..(696): y is t or c
  misc_feature (699)..(699): y is t or c
atggccaatcgaattgacgaccatgttttcagatcaaaactccctgaaattcccatctccaaccacctccctctccacacctactgctttgaaaactactcccaattcgccgatcgtccatgcttgatcgtcggatccaccaacaaaacctactcctttgcagaaacccacctcatttctcgcaaagtcggagctgggttcgcccacctcggcctcaaacagggagacgtcgtcatgatcctcctccagaactgcgccgaattcgcgttctcctttctcggagcttccatggtcggagccgtcaccaccaccgccaaccccttctacacttcggccgaaattttcaagcagttgaatgcttccaaggcgaaaatcgtcgtcacgcaggcgcagtacgtcgacaagctccgggactaccccgacggacaggtggcaaagatcggagaaggtttcaccgtcattaccatcgacgatccgccggagaactgcatgcatttctcggtgrtgtcggaggcgaacgagagcgaacttccggaggtttcgatcaactccgacgacccagtggcgctgccgttctcctctggcactaccgggcttccgaagggggtggtcctgacgcacaagagcttgatcacaagcgtggctcagcaggtggacggcgagaaccctaacctccacctgacgccggacgacgtygtyttgtgtgtgctgccgctgttccacatatactctctgaacagcgtgcttctctgctcgctgagggccggcgcggcggtgctgctgatgcagaagttcgagattggaactctgctggagctgatccagcgctaccgggtgtcggtggcggcggtggtgcccccgctggtgctggcgctggcgaagaacccgatggtggagagcttcgacctgagctcaatccgggtggtgctgtccggggcagccccgctggggaaggagctggaggcggctctccggagcagggtgcctcaggcggtgcttggccagggttatggaatgacagaggccggaccggtgttatcgatgtgcctagccttcgccaagcagccctttcctactaagtccggctcgtgcggcaccgttgtccgcaatgctgagctcaaggtcgtcgaccctgagaccggttgctccctcggccgcaaccaaccgggcgagatctgcattcgaggacaacagattatgaaaggatacttgaacgatcccgaggccacggcctctaccatcgatgttgacggttggctacacaccggtgacattggctatgttgacgatgatgaagaggtaccgcctgctgagcttgaggcccttctggtgagtcacccatcaattgctgatgcagctgttgtcccgcaaaaagatgatgttgcaggtgaagttcctgttgcatttgtggttagatcaaacgggtttgaactcactgaagaggctgtgaaagagttcatatcgaaacaggttgtgttctacaaaagactgcacaaggtgtactttgttcatgccattccaaagtcaccatcagggaaaattttaagaaaagacctcagagctaaactagcagaaaagaccccagagccaaactag

SEQ ID NO: 28405 - protein, 531 aa, Vitis vinifera
  misc_feature (169)..(169): The Xaa at location 169 stands for Met, or Val.
MANRIDDHVFRSKLPEIPISNHLPLHTYCFENYSQFADRPCLIVGSTNKTYSFAETHLISRKVGAGFAHLGLKQGDVVMILLQNCAEFAFSFLGASMVGAVTTTANPFYTSAEIFKQLNASKAKIVVTQAQYVDKLRDYPDGQVAKIGEGFTVITIDDPPENCMHFSVXSEANESELPEVSINSDDPVALPFSSGTTGLPKGVVLTHKSLITSVAQQVDGENPNLHLTPDDVVLCVLPLFHIYSLNSVLLCSLRAGAAVLLMQKFEIGTLLELIQRYRVSVAAVVPPLVLALAKNPMVESFDLSSIRVVLSGAAPLGKELEAALRSRVPQAVLGQGYGMTEAGPVLSMCLAFAKQPFPTKSGSCGTVVRNAELKVVDPETGCSLGRNQPGEICIRGQQIMKGYLNDPEATASTIDVDGWLHTGDIGYVDDDEEVPPAELEALLVSHPSIADAAVVPQKDDVAGEVPVAFVVRSNGFELTEEAVKEFISKQVVFYKRLHKVYFVHAIPKSPSGKILRKDLRAKLAEKTPEPN

SEQ ID NO: 28406 - DNA, 1704 bp, Vitis vinifera
  CDS (1)..(1704)
  misc_feature (1116)..(1116): w is a or t
  misc_feature (1125)..(1125): y is t or c
  misc_feature (1130)..(1130): r is g or a
  misc_feature (1134)..(1134): y is t or c
  misc_feature (1482)..(1482): r is g or a
  misc_feature (1521)..(1521): r is g or a
  misc_feature (1602)..(1602): k is g or t
  misc_feature (1626)..(1626): r is g or a
atggtggtggagcgcgacatagatgatctaccgaagaacgcagcgaactacacggccttgactccgctgtggttgctggagagagcggctgtggtacatcccaacaggaaatcagtgatccatggatctttgcagtacacgtggctccagacttatcagcggtgccgccgattggcttccgctctttctaagtattccatcggcgccggcagtacggtagcaataattgcaccaaacatccctgccatgtatgaagctcattttggggttcccatgtctggagcggtggtgaactgtgttaacattcgtctaaatgcaccgacaattgctttccttcttgagcattcatcggcagcagttgtaatggtggatcaagagtttttcccattagcagaggaagctttgaaaatctggtcagggaaaagcaaaaatgattttaagcctccccttctgatcgtcatagctgatgaaagctgcgatcctaaaggactagaatatgctttgaggaaaggggtcattgaatatgagcagttcctggaaacaggagaccctgaatttgcatggaaaccaccacaggatgagtggcagagtattgctttggggtatacttctggaacaacagccagccctaagggggtagtgttgcaccataggggagcatatatcatggccctcactggtgctcttgtatgggggatgaatgaaggagctgtgtacctatggacacttccaatgtttcattgtaatggctggtgtttcacttggacacttgctgctctttgtgggaccaacatatgccttcggcaggttgcaaccaaggcaatttatcaagccatagccaacgatggtgtaacccacctctgtgctgcaccagtggtcctcaacagcatagtcaatgcccccaaaagtgaaaccatccttccccttccacgcgtggtccatgtaatgacagctggggctgctccgcccccttctgttctctttgccatgtcccaacaaggctttcgtgtcacccatacctacggactctcagaaacctacggcccctccacagtatgtgcatggaaacctgaatgggatgaactaccacctgaaactcaagcccgtctcaatgcwcgccaaggygtccratayatcggcttggagggcctagatgtggtcagcaccacagacatgaagcctgtccctgccgatggaaccaccattggtgagattgtgatgcggggtaatactgtgatgaagggctacttaaagaacccgaaagccaacgaggaaacttttgcaaatggatggtttcattcaggtgatcttggggtgaagcatccagatgggtacatacaacttaaggaccgatcaaaagacatcatcatctctggaggcgaaaacataagcagtgtggaggttgaaaatgctgtatacttgcaccctgcagtgctagaggcatcagtggtggcaaggccagatgaccgctggggggaatcrccttgtgctttcgtgacgttgaagccaggggttgatagrtccgatgaaagacgcctggcagaagatattatgaagttctgccgatccaagttgccggcttactggattccaaaatctgtkgtgtttggaccattgcccaagacrgccactgggaagatacagaagcatctgctgagggccaggacgaaggagatgggacctcttaagaagagcaagctgtag

SEQ ID NO: 28407 - protein, 567 aa, Vitis vinifera
  misc_feature (377)..(377): The Xaa at location 377 stands for Arg, or Gln.
MVVERDIDDLPKNAANYTALTPLWLLERAAVVHPNRKSVIHGSLQYTWLQTYQRCRRLASALSKYSIGAGSTVAIIAPNIPAMYEAHFGVPMSGAVVNCVNIRLNAPTIAFLLEHSSAAVVMVDQEFFPLAEEALKIWSGKSKNDFKPPLLIVIADESCDPKGLEYALRKGVIEYEQFLETGDPEFAWKPPQDEWQSIALGYTSGTTASPKGVVLHHRGAYIMALTGALVWGMNEGAVYLWTLPMFHCNGWCFTWTLAALCGTNICLRQVATKAIYQAIANDGVTHLCAAPVVLNSIVNAPKSETILPLPRVVHVMTAGAAPPPSVLFAMSQQGFRVTHTYGLSETYGPSTVCAWKPEWDELPPETQARLNARQGVXYIGLEGLDVVSTTDMKPVPADGTTIGEIVMRGNTVMKGYLKNPKANEETFANGWFHSGDLGVKHPDGYIQLKDRSKDIIISGGENISSVEVENAVYLHPAVLEASVVARPDDRWGESPCAFVTLKPGVDRSDERRLAEDIMKFCRSKLPAYWIPKSVVFGPLPKTATGKIQKHLLRARTKEMGPLKKSKL

SEQ ID NO: 28408 - DNA, 1641 bp, Vitis vinifera
  CDS (1)..(1641)
  misc_feature (186)..(186): m is a or c
  misc_feature (295)..(295): r is g or a
  misc_feature (552)..(552): y is t or c
  misc_feature (1023)..(1023): r is g or a
  misc_feature (1290)..(1290): y is t or c
  misc_feature (1371)..(1371): r is g or a
atgtcttccatgcacgaaatagttcggagtgggttttgcagatcgaactccgttttttatagtaaacgtaatcccgtttctctgccgcagaaggagtttatcgacgtcaccaccttcatctcttcccggcctcatcatgggaagacggccttcatcgacgcggcctcaggccaccgcctcagtttmtacgaagtctggagagccgtcgatgccgtgtcgagttgtctcgccgacatggggatccggaaaggccatgtcatccttttgctgtctcccaactccattttgttccccrtcgtttgtctctcggtgatgtctctcggcgccgtgatcactaccacgaacccactcaacacggctcgcgaaatcggcaagcagatagccgattccaagcctgttcttgcgttcacgattccgtcactcgtgcccaaactcgcggggtcgaatctgcccattgtgttgatggggggagagggaaacaccccagctcctgctggggttgtgggttcattagaagaaatgatgaggagggagccgagtgggaagcgagtyggggagcgagttaaccaggaggacacggcgacgctgctctactcgtccggcaccaccggcgcgagcaaaggagtggtgtcgtcgcatagaaacctcatcgccatggttcagaccatcgtgagccggttcagctccgaagatggagagcagaccttcatctgcaccgtccccatgttccacatctacggcttagcggcgttcgcaatgggtatgctggcgtcgggatcaacggtggtggtgctctcgagattcgagatggatgagatgctttcttccatctccaagtaccgagccacgtgcctgcctctcgtgccgcccatactggtggcgctcgttcacagcgctgataaaataaaggccaagtacgatttgaattctctacaatctactctctccggtggagctccactgagcaaggaggtcatagaggggttcgcagaaaaatacccatctgtgaaaattcttcaaggrtacggcctgacagagtccaccggcatcggagcttccacggactctctggaggagagccgccggtacgggacggcggggctgttgtcgccgagcatggaggctaagatcgtggacccaggaagtggaaaggcattgacggtgaaccagaccggagagctttggctgagaggtcccaccattatgaaaggttatttcagtaatccagaagcgactacatccactcttgattcaagtggatggttgagaactggagatctctgctacatygatgatgatggattcattttcattgttgataggttgaaggagctgatcaaatacaaaggatatcaggttcctccagctgarctagaggccttgttacttactcacccagagattgctgatgctgctgttataccattcccagacaaggaagtggggcaatatcctatggcatacattaatagaaaagcaggaagcaatctgtccgagtctgcggtcatggatttcatagcaaaacaggtggctccatacaagagaatccggcgagtcgcatttgtagattccattcccaaaaatgcatcaggcaagattctgaggaaggatctcatacaacttgcaacctccaaactctga

SEQ ID NO: 28409 - protein, 546 aa, Vitis vinifera
  misc_feature (62)..(62): The Xaa at location 62 stands for Leu, or Phe.
  misc_feature (99)..(99): The Xaa at location 99 stands for Ile, or Val.
MSSMHEIVRSGFCRSNSVFYSKRNPVSLPQKEFIDVTTFISSRPHHGKTAFIDAASGHRLSXYEVWRAVDAVSSCLADMGIRKGHVILLLSPNSILFPXVCLSVMSLGAVITTTNPLNTAREIGKQIADSKPVLAFTIPSLVPKLAGSNLPIVLMGGEGNTPAPAGVVGSLEEMMRREPSGKRVGERVNQEDTATLLYSSGTTGASKGVVSSHRNLIAMVQTIVSRFSSEDGEQTFICTVPMFHIYGLAAFAMGMLASGSTVVVLSRFEMDEMLSSISKYRATCLPLVPPILVALVHSADKIKAKYDLNSLQSTLSGGAPLSKEVIEGFAEKYPSVKILQGYGLTESTGIGASTDSLEESRRYGTAGLLSPSMEAKIVDPGSGKALTVNQTGELWLRGPTIMKGYFSNPEATTSTLDSSGWLRTGDLCYIDDDGFIFIVDRLKELIKYKGYQVPPAELEALLLTHPEIADAAVIPFPDKEVGQYPMAYINRKAGSNLSESAVMDFIAKQVAPYKRIRRVAFVDSIPKNASGKILRKDLIQLATSKL

SEQ ID NO: 28410 - DNA, 1710 bp, Vitis vinifera
  CDS (1)..(1710)
atgtcagccgaggaagagatggatgcagctgctgagcaacggctcggaggttctccaccggattttgatggaaggagtggctttgactcccgtaccggtgtctacagttcactcataaaacttgggggccagcaccgggtcccaactaggcctgaccttgacactgcaaccttcgtgctgtcacagtttccagccccggactgtgctgagtctcgtgttgcgcttatagactctgccactggtcgtcgagtcacgtatgcggagctccggcgatcgatcaggatgcttgcaacagggttgtatcatggacttgggattagaaagggtgatgttgtgttcctcttggccccaaactcgctcctgtatccaacaatctgccttgctgtgctctccattggcgcggtgctgactaccgctaacccactcaacactcagtcagaaatttccaagcaagttgatgactcaggtgccaaagttgctatttcagcaccagaagagctgcacaagttgctccaaactggagtgcccacactcctcacgcacaggacttgtgatgagaactcactttccattgaagagttgattgactgcagcgatcccgcgctggacttgccaccagcccagatgagtcagtcggacaccgcagccatactatactcttcaggcacaactgggactagcaagggtgtgatattaacccatgcaaaattcatagccatgatgacactcctcaagtggtcagtggatataacatcatccaacaatgatgttttcttgtgcttcatccccatgttccacatctacgggcttgcattctttgcccttggactactccgttcaggaactaccactgtcgtgatgccaaggtttgattccaaggccatgcttgatgcaattcaggcttaccaagtgagcaacatcccagcagttcctccagtgattcttggactagtgaagaatagcagcagctgtgacctatcatcactaagaagggtgggttcaggggctgcaccattgagcaaagaagtagctgaagggttcagggagaagtttccttgggtggagctcaggacaggctatgggttgacagagagctgtggagcagccacttactttgtaactgatgagcaagccaaggcccgtgcaggctcaagcggaagattgcttcctagattttgtgccaaggtggtggatactgaaacagggctggctctaccacctaatagggagggagagctgtggctgaagagtcctactgtgatgaaagggtacctggggaatgcagaagcaacagctgcaaccatcacttcagatggatggctgcgaacaggagacctttgttattttgatgaagatggattcctttacattgttgatcggataaaggagctcatcaagcacaatggatatcaggtggctccagcagaattagaagcaatacttctgagtcatcccagtgttctcgatgcagcagtcataccggttgaagatgaagcagcagggcagataccaatggcatatgtagtgagagcaggtggatctgaactcacccaacaagaagtcattcaatttgtagctggccaggtggcaccatataagaaagttagaaaagtgggtttcatcaatgccatcccaaggtccacagctggcaaaatcttgcggaagcagctcgtccttctaagccaacaagaagttatctccaagttgtaa

SEQ ID NO: 28411 - protein, 569 aa, Vitis vinifera
MSAEEEMDAAAEQRLGGSPPDFDGRSGFDSRTGVYSSLIKLGGQHRVPTRPDLDTATFVLSQFPAPDCAESRVALIDSATGRRVTYAELRRSIRMLATGLYHGLGIRKGDVVFLLAPNSLLYPTICLAVLSIGAVLTTANPLNTQSEISKQVDDSGAKVAISAPEELHKLLQTGVPTLLTHRTCDENSLSIEELIDCSDPALDLPPAQMSQSDTAAILYSSGTTGTSKGVILTHAKFIAMMTLLKWSVDITSSNNDVFLCFIPMFHIYGLAFFALGLLRSGTTTVVMPRFDSKAMLDAIQAYQVSNIPAVPPVILGLVKNSSSCDLSSLRRVGSGAAPLSKEVAEGFREKFPWVELRTGYGLTESCGAATYFVTDEQAKARAGSSGRLLPRFCAKVVDTETGLALPPNREGELWLKSPTVMKGYLGNAEATAATITSDGWLRTGDLCYFDEDGFLYIVDRIKELIKHNGYQVAPAELEAILLSHPSVLDAAVIPVEDEAAGQIPMAYVVRAGGSELTQQEVIQFVAGQVAPYKKVRKVGFINAIPRSTAGKILRKQLVLLSQQEVISKL

SEQ ID NO: 28412 - DNA, 1584 bp, Vitis vinifera
  CDS (1)..(1584)
  misc_feature (466)..(466): m is a or c
atgggaactcacctccaagcttctgctcaagataatgagcacattttcaggagccagcatcaagcagttccagtgccagataacatgacactgccggactttgtgcttcaggatgctgaattgtatgctgaaaaggtggcatttgtggaggctgtgacagggaaggagtatacttatggtgaagttgtcagagatgtaaggaggtttgctaaggccttgaggtcaattgggctgaggaaggggagagtggtggttgttgtactgccaaatgtggctgagtacgccatcgtcgcgctgggaataatggccgctggcggcgtgttttcaggcgcaaacccagctgggcatgcttcagagattaagaagcaggtggaggctgctgatgccaagcttgttgtcacaaatggggccatgtatgagaaggtgaaaagcctggagctaccagtaattgtgatgggggaagaamatgttgcaggcgccataaactggggtgagctgcttgaagcagcagaccgggcaaacaccgatacaatcagcgaggatgtgcaccagaatgatctatgtgccctcccattctcatcagggactacaggaatttcaaagggagtaatgctcactcaccggaatcttgtagctaacctctgctccaccctcttcagtgttgggccagagatggtgggacaaatcactattctaggcctaatgccattctttcacatatatggaatcactggaatatgctgtgccacacttaggaacaaggggaaggtagtggtgattgggaggtatgagcttagaacttttctgaatgcattgatcacacatgagatcacatttgccccaattgtgccgccaatcattttggcattggttaagaatccgatcgtggaggagtttgatctcagcaggctcaagcttagggcagtcatgactgctgcagctcccctggcacctgagctcctctctgcctttgagaagaagttccctagtgtccaagtccaagaggcatatggactgactgagcacagctgcattacacttactcatggagaccccactaaaggccatgccactgctaagaaaaactcagttgggttcatccttcccaacatggagctcaagttcatcgatcctgaaaccggtatctccctccccaagaacacccctggtgaaatctgtgttagaagccaatgtgtaatgcaaggctactataagaacgaggaggagacagctcgaacaattgacaacaatggatggctccatactggcgacattggctacatagacgatgatggggacgtctttgtggttgatcgcatcaaagagttgatcaaactgcctgatgaagaggcaggggagattccagcagcatgtgtagtgctcaacccagaagcaaaagagacagaggaagaaattgtgaagtatgttgcctctaatgtggcacagtataagagagtgagggtggtgcactttgtggagactatcccaaaatcaccatctgggaaaattatgagaaggcttcttagagaaaagatgctagaaaaaatgaagaacaacaccaaatctggtgccatattaccctaa

SEQ ID NO: 28413 - protein, 527 aa, Vitis vinifera
  misc_feature (156)..(156): The Xaa at location 156 stands for Asn, or His.
MGTHLQASAQDNEHIFRSQHQAVPVPDNMTLPDFVLQDAELYAEKVAFVEAVTGKEYTYGEVVRDVRRFAKALRSIGLRKGRVVVVVLPNVAEYAIVALGIMAAGGVFSGANPAGHASEIKKQVEAADAKLVVTNGAMYEKVKSLELPVIVMGEEXVAGAINWGELLEAADRANTDTISEDVHQNDLCALPFSSGTTGISKGVMLTHRNLVANLCSTLFSVGPEMVGQITILGLMPFFHIYGITGICCATLRNKGKVVVIGRYELRTFLNALITHEITFAPIVPPIILALVKNPIVEEFDLSRLKLRAVMTAAAPLAPELLSAFEKKFPSVQVQEAYGLTEHSCITLTHGDPTKGHATAKKNSVGFILPNMELKFIDPETGISLPKNTPGEICVRSQCVMQGYYKNEEETARTIDNNGWLHTGDIGYIDDDGDVFVVDRIKELIKLPDEEAGEIPAACVVLNPEAKETEEEIVKYVASNVAQYKRVRVVHFVETIPKSPSGKIMRRLLREKMLEKMKNNTKSGAILP

SEQ ID NO: 28414 - DNA, 1614 bp, Vitis vinifera
  CDS (1)..(1614)
atggattcactgaagccaaggcccgcaaattcatcacctctcacccctttaggcttcctcgatagagctgctactgtttatggcgattgcccttctgttttgtataactccatcacgtacacctggtctcagacccaccgtcgatgtctccaggtggcttcttccatcaaatctttcggcattgggagaggccatgtggtgtcggtggtggcacccaatgtccccgccatgtacgagcttcacttcgccgtccccatgtccggcgccgtcctcaacactatcaatactcgcctagacgcacgcactgtttccgtgctccttcgccacagcgaatccaaactcgtcttcgtcgactgcctctcccgcgcgctcattcttgaagcgctctcgttattcccaccaaacactcaatggccacttctcgtcctcatcgcggatgaagaggtcgcgccctcatctaccaggggtgatccggagttcaagtgggtccggccggagagcgagtgggacccgattattctgaattacacatccggaacgacctcgtcaccaaagggtgtggtccactgccaccgcgggattttcatcgtcaccattgattctctcgtggaatggtctgtaccgaagcagccggtgtacctctggaccctacccatgttccacggcaacggctggaccttcacttggggaatggcggccgtcggtgggaccaacgtctgcctccgcaaattcgacgcacgtatcatctacgacgccattcccaagtacggcatcacccacatgtgcgctgcacctgtggtcctcaacatgctctccaactaccccaaccaccaaccactagggtatcccgtaaaaatcctcaccgccggggctccacctccgtacagcgtgcttctgcgaacagaatctctgggttttgttgtgagtcacgggtacggaatgactgaaacggcgggagtggtggtgtcctgcgcttggaagccgcagtgggatcggtttccggcgtcggagagggcaagggtgaaggcaagacaaggggtgaggacggttgttatgacggaagtggacgtggtggaccccaagtcaggagtcagcgtgaagcgagacgggtcgtctttgggcgagattgtgctgagaggtgcatgcattatgctcggttacctcaaagacccagagggaacctccaaatgcatgagtaaagaagggtggctctacaccggagacgtagcggtgatgcacccagatgggtatatagaaatcaaggaccgatccaaggacgtgatcatcagcggaggcgagaacttgagcagtgtggaagttgagtcggtgctctacactcacccagccgtgaacgaggcggcagtggtggctcggcccgacgacttctggggggagactccatgcgcgttcgtgagcttaaagccagggtcgccggacaagccgacggcgaaggagatgatggagtactgtagggcgagaatgccgcactacatggtaccgaagacggtcgtattcaaggaagaactgcccaagacttcaacggggaagattcagaagtttaagctaagagacattgccaaggctatggggtgttcgccggcaagtcggatgtag

SEQ ID NO: 28415 - protein, 537 aa, Vitis vinifera
MDSLKPRPANSSPLTPLGFLDRAATVYGDCPSVLYNSITYTWSQTHRRCLQVASSIKSFGIGRGHVVSVVAPNVPAMYELHFAVPMSGAVLNTINTRLDARTVSVLLRHSESKLVFVDCLSRALILEALSLFPPNTQWPLLVLIADEEVAPSSTRGDPEFKWVRPESEWDPIILNYTSGTTSSPKGVVHCHRGIFIVTIDSLVEWSVPKQPVYLWTLPMFHGNGWTFTWGMAAVGGTNVCLRKFDARIIYDAIPKYGITHMCAAPVVLNMLSNYPNHQPLGYPVKILTAGAPPPYSVLLRTESLGFVVSHGYGMTETAGVVVSCAWKPQWDRFPASERARVKARQGVRTVVMTEVDVVDPKSGVSVKRDGSSLGEIVLRGACIMLGYLKDPEGTSKCMSKEGWLYTGDVAVMHPDGYIEIKDRSKDVIISGGENLSSVEVESVLYTHPAVNEAAVVARPDDFWGETPCAFVSLKPGSPDKPTAKEMMEYCRARMPHYMVPKTVVFKEELPKTSTGKIQKFKLRDIAKAMGCSPASRM

SEQ ID NO: 28416 - DNA, 1986 bp, Coprinus cinereus
  CDS (1)..(1986)
atgtccgaaggtccaatccgagtcgctccccaccccatcggcaagcgcgtcaagcatggctgcaagacgccccatgtctcccacattgacgattaccgaagccagcaccgggaaaccattggtcacgaatccgacaagtggtgggcaaagaaagctcacgagcttctctattgggatcgaccattccataccgtccgctcgggcagcttcgagaatggcgacattgcttggttccccgagggtggtttgaacgcctcctataactgcgttgaccgctgggcgttcaaacatccggaaaagaccgcgattatctacgaagcagatgaacctggcgagggaagggagatctcttacgcggaactcctccgggaagtctgcagcatcgcaaacgtgctcaagtcgttcggcgtcaagaagggcgacaccgtctccgtctacctccccatgacctggcaagccgtcgccgccttcctcgcctgtgcccgcatcggcgccatccactctgtcgtctttgctggcttctcggccgaagcattgcgtgatcgtatgcaagattgcaaatcgcgtgtgctcatcacgtccgatgaggggcggcgcggtgggaaggcgattgctaccaaggccatcgcggatgcggccctcaaggagtgcccggcggttgagaaggtgttggtgttgaagaggacgggtaacccggttccgtggactgagggtcgggatgtgtggtggcacgaggcggtcgccagggtaccgaggtactgccctcccgaggtcatggcatccgaggaccctctcttcatcctctacacttccggctcgactggcaaacccaagggtgtcgtgcacacgactggtggatatctactctgcgccgccttgactgtcaaatacgtcttcgatgtccaccccgacgacaggttcgcttgcatggccgacgttggctggatcacgggccacacttacatcgtctacggtcctctcgctattggcgctaccaccaccgtgttcgagtccactcccgtataccccactccttcacgatactgggagaccgtcgagaagtacaagctcacccagttctactcggcccctaccgctatccgactcttgcgccgcctcggacacgagcacgtcaacaagcacgatttgagcagtttgcgtgtgttgggaagcgttggagagcccatcaaccccgaggcttggcactggtacaacgagcacgtcggaaagaccgagtgtgctatcgttgataccttctggcaaactgagactggttccatcgtcgttacccctttccccggtgctatcgagaccaagcctggtgccgcgactgtacccttcttcggtattgagcccgccatcttggagcctaccactggaaaggtgctcgagggcaatgatgtcgagggtgttctcactatcgctcatccctggccttctatcgctcgaaccatctacggagaccatcagcgctacctcgagacttacatgaagccttatcccggctacttctacaccggtgatggcgctgctcgtgatgaggacggctacatctggatcaagggtcgtgttgatgatgtcattaacgtttctggccatcgtttgtccaccgccgaaatcgaatccgctctcatcacccacactggagttgctgagaccgccgtcatcggtaccgccgacgaactgaccggccaggccgtctacgccttcgtcactctcaagcctgaattcaagttcgacgccgagaacgaggctggcctctccaaggagctcatcctccaagtccgcaagatcatcggtccctttgctgcgcccaagcggatctatatcgtcagtgacctccccaagactcgctccggcaagatcatgcgacgtatcctccgcaagatcgtcgctggcgaggctgaccagctcggtgacctcagcaccctcgccgacccgggcatcgtcgaagtcatcaaggagaaggttgcctctgctgcgtaa

SEQ ID NO: 28417 - protein, 661 aa, Coprinus cinereus
MSEGPIRVAPHPIGKRVKHGCKTPHVSHIDDYRSQHRETIGHESDKWWAKKAHELLYWDRPFHTVRSGSFENGDIAWFPEGGLNASYNCVDRWAFKHPEKTAIIYEADEPGEGREISYAELLREVCSIANVLKSFGVKKGDTVSVYLPMTWQAVAAFLACARIGAIHSVVFAGFSAEALRDRMQDCKSRVLITSDEGRRGGKAIATKAIADAALKECPAVEKVLVLKRTGNPVPWTEGRDVWWHEAVARVPRYCPPEVMASEDPLFILYTSGSTGKPKGVVHTTGGYLLCAALTVKYVFDVHPDDRFACMADVGWITGHTYIVYGPLAIGATTTVFESTPVYPTPSRYWETVEKYKLTQFYSAPTAIRLLRRLGHEHVNKHDLSSLRVLGSVGEPINPEAWHWYNEHVGKTECAIVDTFWQTETGSIVVTPFPGAIETKPGAATVPFFGIEPAILEPTTGKVLEGNDVEGVLTIAHPWPSIARTIYGDHQRYLETYMKPYPGYFYTGDGAARDEDGYIWIKGRVDDVINVSGHRLSTAEIESALITHTGVAETAVIGTADELTGQAVYAFVTLKPEFKFDAENEAGLSKELILQVRKIIGPFAAPKRIYIVSDLPKTRSGKIMRRILRKIVAGEADQLGDLSTLADPGIVEVIKEKVASAA

SEQ ID NO: 28418 - DNA, 1572 bp, Bacillus subtilis
  CDS (1)..(1572): transl_table=11
gtgtatccagaccgaaatatccgctatacgtacgctcaatttgacagtctgtgccgtcaaaccgctaaaggtctcatgcggatggggattggaaaaggagaccacgtcgccatatgggcttctaatatctctgaatggcttgccgtccagttcgcaactgcgaagatcggagccgtgctcgtgaccgtcaataccaattatcaagcacatgagcttgattacttgttaaagcaatcggatgccgcggcgcttattatcatggattcatacaggggcacttcttatccagacatcgtgaacagtttaattccagaactgcaagaagcaaagcccggccaactgaaatctgaacgctatccctttttaaaaacgctgatctatattggcaataaacgattgtctggcatgtatcattgggacgatacagagatattggcgaaaacagtgacagatgctgagcttgaagagagaatgaacagcctggataaagacaatgtgattaatatgcaatacacatcaggaacgacagggtttccaaaaggcgtgatgctgacccatttcaatgtcatcaataacgctgctaatatcgctgaatgtatggctttaacctctcaagaccgcatgtgcatccctgttccgttttttcactgctttggatgcgtccttggggttttggcatgtgtatccgtcggggcagccatgatacccgtgcaagaatttgatcccgttaccgtccttaaaacggtagaaaaagagaaatgcacagtgctccatggtgtgcctaccatgtttatcgccgagctgcatcatccggattttgatgcatatgatctatcgacgctccgaacaggaatcatggccggctctccctgtccaagtgaagtgatgaaagctgtgattgaaaggatgggcatgaaagacattacgatcgcctatggacaaaccgaagcctcgccagtcattacacaaacgagagcaaatgattccttcataagaagagtcgaaacaaccggccgtgccctgccacatactgaggtgaaaattgtagaacccgggacatgtcaagaagttcaaagaggcatgcagggagaactgtgcacccgtggctatcacgtcatgaaaggctattataaagacaaagatgcgaccagaaaagcaatcaatcatgacggatggctgtttaccggagatcttgctgtcatggatgaagacgggtactgccgcatcaccggaagattaaaagatatgctcatcagaggcggcgagaacatttatccgcgggaaattgaagaatttttataccagcatcccgctgttttagatgtacaggtggttggtgtgcctgacgccaaattcggggaggaagctgcagcctggattaaactgaaagacggtaaaagcgtttcacctgatgagcttaaagcctattgcaaagggaaaatcgcccgccacaaaattccgcgttatgttatttttacggatgactatccgatgacggcctcaggcaaaattcaaaaatataaactgcgagaaaaaacgattgaaatgttcaacttatcatcaagtcaatga

SEQ ID NO: 28419 - protein, 523 aa, Bacillus subtilis
MYPDRNIRYTYAQFDSLCRQTAKGLMRMGIGKGDHVAIWASNISEWLAVQFATAKIGAVLVTVNTNYQAHELDYLLKQSDAAALIIMDSYRGTSYPDIVNSLIPELQEAKPGQLKSERYPFLKTLIYIGNKRLSGMYHWDDTEILAKTVTDAELEERMNSLDKDNVINMQYTSGTTGFPKGVMLTHFNVINNAANIAECMALTSQDRMCIPVPFFHCFGCVLGVLACVSVGAAMIPVQEFDPVTVLKTVEKEKCTVLHGVPTMFIAELHHPDFDAYDLSTLRTGIMAGSPCPSEVMKAVIERMGMKDITIAYGQTEASPVITQTRANDSFIRRVETTGRALPHTEVKIVEPGTCQEVQRGMQGELCTRGYHVMKGYYKDKDATRKAINHDGWLFTGDLAVMDEDGYCRITGRLKDMLIRGGENIYPREIEEFLYQHPAVLDVQVVGVPDAKFGEEAAAWIKLKDGKSVSPDELKAYCKGKIARHKIPRYVIFTDDYPMTASGKIQKYKLREKTIEMFNLSSSQ

SEQ ID NO: 28420 - DNA, 1647 bp, Populus jackii
  CDS (1)..(1647)
atggaggccaataaggatcaagtacaagaattcattttcaggtccaaactccctgacatctatatcccaaaccacctccctttacacacttattgcttcgaaaagctttcccaattcaaagacaacccttgcttgatcaatggccctaccggtgatatctacacttatgcggatgttgagctcacatcacgcaaagttgcctctggcctctacaagttaggcctccaacaaggcgatgttatattgctcttgctccaaaactcgccagaatttgtttttgcattccttggagcgtcgttcattggcgctattagctcaactgcaaaccctttctatacttcagctgagatcgcaaaacaagcaacagcatcaaaggcaaagctgataataacacatgcagcgtacgccgagaaagtgcaacagtttgctcaagaaaatgatcatgttaagataatgaccatcgattctcttacagaaaactgcttgcatttctcagagttgacaagctctgatgagaatgaaatccctactgtcaagattaagcctgatgatatcatggcactcccatattcgtcagggactacaggtctccctaaaggtgtcatgttgactcataaagggcttgttactagtgtggcacaacaagttgatggagagaaccctaatctctattttcacgagagggatgtgattctttgtgtgctgcctttgttccacatctattcactcaattccgtattcctttgtgggctaagagctggttcagcaattttggttatgcaaaaattcgatacggtttcattaatggaccttgtacagaaatataaggtgacaattgctccactcgtgccccctatctgtctggcaattgcaaaaagtccagtcgttgatcagtatgatctttcttcgatccggacagtactgtctggcgcagcacctttggggaaggagcttgaggatacagtcagagctaagctgcctaatgctaaacttggacagggatatggaatgacagaggcagggcccgtgatagcaatgtgcttagcttttgcaaaggaaccctttgagattaaatctggcgcatgtgggactgttgttagaaatgcagagatgaagattgtcgacccggaaaccggtgagtcccagccgcgaaataaaaccggcgagatttgcattaggggttgccaaataatgaaaggttatctaaatgatcctgaggcaactgaaaggacgatagacaaagatggatggttgcacacgggtgatattggatacattgatgaagatgaactctttatcgtggatcgtttgaaagaattgatcaaatacaaaggtttccaagtagcacctgctgagcttgaagcaatgttgattgctcatcccaacatctctgatgctgctgtagtacccatgaaagatgaagctgccggagaggttccggttgcttttgtggtgcgatcaaatggttccaagatcaccgaggatgaaatcaaacaatatatctcaaaacaggtgatcttttataagagaatcggtcgggttttcttcacggaggccatccccaaggccccgtcgggaaaaatcttgagaaaggacctcagagcaagggtttctgctggtgatcttccatgcacatcagattcctaa

SEQ ID NO: 28421 - protein, 548 aa, Populus jackii
MEANKDQVQEFIFRSKLPDIYIPNHLPLHTYCFEKLSQFKDNPCLINGPTGDIYTYADVELTSRKVASGLYKLGLQQGDVILLLLQNSPEFVFAFLGASFIGAISSTANPFYTSAEIAKQATASKAKLIITHAAYAEKVQQFAQENDHVKIMTIDSLTENCLHFSELTSSDENEIPTVKIKPDDIMALPYSSGTTGLPKGVMLTHKGLVTSVAQQVDGENPNLYFHERDVILCVLPLFHIYSLNSVFLCGLRAGSAILVMQKFDTVSLMDLVQKYKVTIAPLVPPICLAIAKSPVVDQYDLSSIRTVLSGAAPLGKELEDTVRAKLPNAKLGQGYGMTEAGPVIAMCLAFAKEPFEIKSGACGTVVRNAEMKIVDPETGESQPRNKTGEICIRGCQIMKGYLNDPEATERTIDKDGWLHTGDIGYIDEDELFIVDRLKELIKYKGFQVAPAELEAMLIAHPNISDAAVVPMKDEAAGEVPVAFVVRSNGSKITEDEIKQYISKQVIFYKRIGRVFFTEAIPKAPSGKILRKDLRARVSAGDLPCTSDS

SEQ ID NO: 28422 - DNA, 1674 bp, Populus jackii
  CDS (1)..(1674)
atggaggcgaaaaatgatcaagcacaagaattcattttcaggtccaaactccctgatatccacatcccaaaccacctccctttacacacttattgctttgaaaacctttcccgattcaaagacaatccctgtttgatcaatggccctaccggtgaaatccacacctacgcggaagttgaactcacatcacgcaaagtcgcttccggtctcaacaagttaggcatcaaacaaggcgatgttatattgctgttgctccaaaactcgccagaatttgtgtttgcgtttctcggagcatcaattattggtgctattagcacaaccgcaaaccccttctacactcccgctgaggtcgcaaaacaagcaacagcatcaaaggcaaagctgataattacacaggcagtttacgccgagaaagtgcaagaattcgtcaaggaaaatgtccatgtcaaaatagtgaccgttgactctccaccagaaaactacttgcatttttcagagttgacaaattctgatgaggatgatattcctgctgtcgagattaaccctgatgatgtcgtggcactcccttattcgtcagggacaacaggtctccctaaaggtgtcatgttgactcataaagggctcgttactagtgtggcacaacaagttgatggagagaaccctaacctctattttcacgagaaggatgtgattctttgtgtgttgcctttgttccacatctactcgctcaattccgtgttactttgtgggctaagggttggttcagcaattttgcttatgcaaaaattcgagattgttacgttaatggagcttgtacaaaaatataaggtgacaattgcgccatttgtcccccctgtcgtcctcgcagttgcaaaatgtccagtcgttgataagtatgatctttcttccattcggaccgtaatgtctggcgccgcaccaatggggaaggagcttgaggatacagtaagggctaagctgcctaatgctaaacttggacagggatacggaatgacagaggcagggcccgtgctatcgatgtgcttggcatttgcaaaggaaccctttgaaattaaatcaggtgcctgtgggactgttgttagaaacgccgagatgaagattgttgaccccgataccggtagatccctgccacgaaatcaatccggagagatttgcattagaggtagccaaatcatgaaaggttatctaaatgaccctgaggccactgaaaggactgtagacaatgatggatggttgcacaccggcgacattggatacatcgacggagatgatgagctctttatcgttgatcgactgaaagaattgattaaatacaagggttttcaagtagcacctgctgagcttgaagcaatgttgattgctcatcccgacatctctgattgtgctgtagtacccatgaaagatgaagctgccggagaggttcctattgcttttgtggtgcgagcaaatggttccaagattaccgaggacgaaatcaaacaatatatctcaaaacaggtggtcttttacaagagaattagtcgggtgttcttcacggaagcgattcccaaggctccatccggaaaaatcttgagaaaagacctaagagcaaggcttgcaactggcgacttcctcattaaattccaacatgacacatacatgcaaaaacagcagtag

SEQ ID NO: 28423 - protein, 557 aa, Populus jackii
MEAKNDQAQEFIFRSKLPDIHIPNHLPLHTYCFENLSRFKDNPCLINGPTGEIHTYAEVELTSRKVASGLNKLGIKQGDVILLLLQNSPEFVFAFLGASIIGAISTTANPFYTPAEVAKQATASKAKLIITQAVYAEKVQEFVKENVHVKIVTVDSPPENYLHFSELTNSDEDDIPAVEINPDDVVALPYSSGTTGLPKGVMLTHKGLVTSVAQQVDGENPNLYFHEKDVILCVLPLFHIYSLNSVLLCGLRVGSAILLMQKFEIVTLMELVQKYKVTIAPFVPPVVLAVAKCPVVDKYDLSSIRTVMSGAAPMGKELEDTVRAKLPNAKLGQGYGMTEAGPVLSMCLAFAKEPFEIKSGACGTVVRNAEMKIVDPDTGRSLPRNQSGEICIRGSQIMKGYLNDPEATERTVDNDGWLHTGDIGYIDGDDELFIVDRLKELIKYKGFQVAPAELEAMLIAHPDISDCAVVPMKDEAAGEVPIAFVVRANGSKITEDEIKQYISKQVVFYKRISRVFFTEAIPKAPSGKILRKDLRARLATGDFLIKFQHDTYMQKQQ

SEQ ID NO: 28424 - DNA, 1608 bp, Populus tremuloides
  CDS (1)..(1608)
atgaatccacaagaattcatctttcgctcaaaattaccagacatctacatcccgaaaaaccttcccctgcattcatacgttcttgagaacttgtctaaacattcatcaaaaccttgcctgataaatggcgcgaatggagatgtctacacctatgctgatgttgagctcacagcaagaagagttgcttctggtctgaacaagattggtattcaacaaggtgacgtgatcatgctcttcctaccaagttcacctgaattcgtgcttgctttcctaggcgcttcacacagaggtgccatgatcactgctgccaatcctttctccacccctgcagagctagcaaaacatgccaaggcctcgagagcaaagcttctgataacacaggcttgttactacgagaaggttaaagattttgcccgagaaagtgatgttaaggtcatgtgcgtggactctgccccggacggtgcttcacttttcagagctcacacacaggcagacgaaaatgaagtgcctcaggtcgacattagtcctgatgatgtcgtagcattgccttattcatcagggactacagggttgccaaaaggggtcatgttaacgcacaaagggctaataaccagtgtggctcaacaggtagatggagacaatcctaacctgtattttcacagtgaagatgtgattctgtgtgtgcttcctatgttccatatctatgctctgaattcaatgatgctctgtggtctgagagttggtgcctcgattttgataatgccaaagtttgagattggttctttgctgggattgattgagaagtacaaggtatctatagcaccagttgttccacctgtgatgatggcaattgctaagtcacctgatcttgacaagcatgacctgtcttctttgaggatgataaaatctggaggggctccattgggcaaggaacttgaagatactgtcagagctaagtttcctcaggctagacttggtcagggatatggaatgaccgaggcaggacctgttctagcaatgtgcttggcatttgccaaggaaccattcgacataaaaccaggtgcatgtggaactgtagtcaggaatgcagagatgaagattgttgacccagaaacaggggtctctctaccgaggaaccagcctggtgagatctgcatccggggtgatcagatcatgaaaggatatcttaatgaccccgaggcaacctcaagaacaatagacaaagaaggatggctgcacacaggcgatatcggctacattgatgatgatgatgagcttttcatcgttgacagattgaaggaattgatcaagtataaagggtttcaggttgctcctactgaactcgaagctttgttaatagcccatccagagatatccgatgctgctgtagtaggattgaaagatgaggatgcgggagaagttcctgttgcatttgtagtgaaatcagaaaagtctcaggccaccgaagatgaaattaagcagtatatttcaaaacaggtgatcttctacaagagaataaaacgagttttcttcattgaagcaattcccaaggcaccatcaggcaagatcctgaggaagaatctgaaagagaagttgccaggcatataa

SEQ ID NO: 28425 - protein, 535 aa, Populus tremuloides
MNPQEFIFRSKLPDIYIPKNLPLHSYVLENLSKHSSKPCLINGANGDVYTYADVELTARRVASGLNKIGIQQGDVIMLFLPSSPEFVLAFLGASHRGAMITAANPFSTPAELAKHAKASRAKLLITQACYYEKVKDFARESDVKVMCVDSAPDGASLFRAHTQADENEVPQVDISPDDVVALPYSSGTTGLPKGVMLTHKGLITSVAQQVDGDNPNLYFHSEDVILCVLPMFHIYALNSMMLCGLRVGASILIMPKFEIGSLLGLIEKYKVSIAPVVPPVMMAIAKSPDLDKHDLSSLRMIKSGGAPLGKELEDTVRAKFPQARLGQGYGMTEAGPVLAMCLAFAKEPFDIKPGACGTVVRNAEMKIVDPETGVSLPRNQPGEICIRGDQIMKGYLNDPEATSRTIDKEGWLHTGDIGYIDDDDELFIVDRLKELIKYKGFQVAPTELEALLIAHPEISDAAVVGLKDEDAGEVPVAFVVKSEKSQATEDEIKQYISKQVIFYKRIKRVFFIEAIPKAPSGKILRKNLKEKLPGI

SEQ ID NO: 28426 - DNA, 1713 bp, Populus tremuloides
  CDS (1)..(1713)
atgatgtccgtggccacggttgagcccccgaaaccggaactctcccctccacaaaaccaaaacgcaccatcctctcatgaaactgatcacattttcagatcaaaactaccagacataaccatctcgaacgacctccctctgcacgcatactgctttgaaaacctctctgatttctcagataggccatgcttgatttcaggttccacgggaaaaacctattcttttgccgaaactcacctcatatctcggaaggtcgctgctgggttatccaatttgggcatcaagaaaggcgatgtaatcatgaccctgctccaaaactgcccagaattcgtcttctccttcatcggtgcttccatgattggtgcagtcatcaccactgcgaaccctttctacactcaaagtgaaatattcaagcaattctctgcttctcgtgcgaaactgattatcacccagtctcaatatgtgaacaagctaggagatagtgattgccatgaaaacaaccaaaaaccgggggaagatttcatagtaatcaccattgatgacccgccagagaactgtctacatttcaatgtgcttgtcgaggctagcgagagtgaaatgccaacagtttcaatccttccggatgatcctgtggcattaccattctcttcagggacaacagggctcccaaaaggagtgatactgacccacaagagcttgataacaagtgtggctcaacaagttgatggagagatcccaaatttatacttgaaacaagatgacgttgttttatgcgttttacctttgtttcacatcttttcattgaacagcgtgttgttatgctcgttgagagccggttctgctgttcttttaatgcaaaagtttgagataggatcactgctagagctcattcagaaacacaatgtttcggttgcggctgtggtgccaccactggtgctggcgttggccaagaacccattggaggcgaacttcgacttgagttcgatcagggtagtcctgtcaggggctgcgccactggggaaggagctcgaggacgccctcaggagcagggttcctcaggccatcctgggacagggttatgggatgacagaggccgggcctgtgctatcaatgtgcttagccttttcaaagcaacctttcccaaccaagtctgggtcgtgtggaacggtggttagaaacgcagagctcaaggtcattgaccctgagaccggtcgctctcttggttacaaccaacctggtgaaatctgcatccgtggatcccaaatcatgaaaggatatttgaatgacgcggaagccacggcaaacaccatagacgttgagggttggctccacactggagatataggttatgtcgacgacgacgacgagattttcattgttgatagagtgaaggaaatcataaaattcaaaggcttccaggtgccgccagcggagcttgaggctctccttgtaaaccacccttcaattgcggatgcggctgttgttccgcaaaaagacgaggttgctggtgaagttcctgtcgcgtttgtggtccgctcagatgatcttgaccttagtgaagaggctgtaaaagaatacattgcaaagcaggtggtgttctacaagaaactgcacaaggtgttcttcgttcattctattcccaaatcggcttctggaaagattctaagaaaagacctcagagccaagcttgccacagccaccaccatgtcctag

SEQ ID NO: 28427 - protein, 570 aa, Populus tremuloides
MMSVATVEPPKPELSPPQNQNAPSSHETDHIFRSKLPDITISNDLPLHAYCFENLSDFSDRPCLISGSTGKTYSFAETHLISRKVAAGLSNLGIKKGDVIMTLLQNCPEFVFSFIGASMIGAVITTANPFYTQSEIFKQFSASRAKLIITQSQYVNKLGDSDCHENNQKPGEDFIVITIDDPPENCLHFNVLVEASESEMPTVSILPDDPVALPFSSGTTGLPKGVILTHKSLITSVAQQVDGEIPNLYLKQDDVVLCVLPLFHIFSLNSVLLCSLRAGSAVLLMQKFEIGSLLELIQKHNVSVAAVVPPLVLALAKNPLEANFDLSSIRVVLSGAAPLGKELEDALRSRVPQAILGQGYGMTEAGPVLSMCLAFSKQPFPTKSGSCGTVVRNAELKVIDPETGRSLGYNQPGEICIRGSQIMKGYLNDAEATANTIDVEGWLHTGDIGYVDDDDEIFIVDRVKEIIKFKGFQVPPAELEALLVNHPSIADAAVVPQKDEVAGEVPVAFVVRSDDLDLSEEAVKEYIAKQVVFYKKLHKVFFVHSIPKSASGKILRKDLRAKLATATTMS

SEQ ID NO: 28428 - DNA, 1659 bp, Brassica napus
  CDS (1)..(1659)
atggaacttttgctcccacacccttcaaactcatctcctctgactgttctcggttttttggaccgagccgccgccgtttacggcgactctccttccctcctccacgataccaccacccatacttggtctgaaacccactctcgatgtctccgagtcgcttcgactctatcttcctcctccctcggaatcaaccgtggccaagttgtctccgttattggtcccaacgttccttctgtctacgagcttcagttcgcggttccaatgtctggagcagtcctcaataacatcaaccctcgtttagacgctcatgcactctctgttgttctacgtcacagtgaatccaagctcgttttcgtcgaccatcactcgagttctttagtcctcgaagctctctcgttcttgcccaagaatgagaagcctcgtctcgtcctcctccaagatgacagcaacatatccggcttaaccaatatgtcggcctcttcgtctgctgacgtggattttctcgacacttacgaaggtgttatggagagaggagacccgaggttcaagtgggtccgtcctaacaacgagtggaacccaatggtgcttaactacacttccggaacgacgtcgtctcctaaaggtgtggtacttagtcacagagcagttttcatgagtaccgttaactctttgctctactggtctatgcctaaccgaccagtctacctatggaccctaccgatgttccacgccaacggttggggctacacatgggccacagctgctgtgggggccacaaacatttgtgtccgaagagtagacgctccgaccattttcgagttgatcgacaagcatcaagtgactcacatgtgcgccgcgccgatggttctcaacatgttgactaactatccatctaggaaacagcttaaacggccggtccagattatgacagctggagctccacctccggccacggtcatttcaagcgccgagagtctaggttttgatgtggctcacggttacgggctgacagaaactggtggtctagttgtcacatgtgcgtggaagccggagtgggacgggctaggacaagacgagagagcgagactgaagtcaaggcaaggaatcagaaccgcggtattcgcggaagctgacgtgttggacacgctaacgggaaagagcgtgaagcacgacggagtaactgtgggagagattgtcttcagaggtggttgtgtcatgttgggttactacaatgacccggaagggaccgccgcgagtatgagagaagacggatggttctacactggagacattggtgtgatgcacccggacggttacttggaagtcaaggataggtcaaaagatgtgatcatatgtggaggagagaacataagcagcacggaagttgagacggttttgtacacgaacccggcggttaaggaagcagctgtggtggctaaaccggataagatgtggggagagactccttgtgcgtttgtgagcttgaagtgtagtgatcgtgggtcagttactgagagagaggtaagggagttttgtaagaagaagctaccaaagtatatggttccaaggaatgtggttttcatggaggagcttccaaagacttctactggaaagattcagaagttcctgctcagacaaatggccaagtctttgccttga

SEQ ID NO: 28429 - protein, 552 aa, Brassica napus
MELLLPHPSNSSPLTVLGFLDRAAAVYGDSPSLLHDTTTHTWSETHSRCLRVASTLSSSSLGINRGQVVSVIGPNVPSVYELQFAVPMSGAVLNNINPRLDAHALSVVLRHSESKLVFVDHHSSSLVLEALSFLPKNEKPRLVLLQDDSNISGLTNMSASSSADVDFLDTYEGVMERGDPRFKWVRPNNEWNPMVLNYTSGTTSSPKGVVLSHRAVFMSTVNSLLYWSMPNRPVYLWTLPMFHANGWGYTWATAAVGATNICVRRVDAPTIFELIDKHQVTHMCAAPMVLNMLTNYPSRKQLKRPVQIMTAGAPPPATVISSAESLGFDVAHGYGLTETGGLVVTCAWKPEWDGLGQDERARLKSRQGIRTAVFAEADVLDTLTGKSVKHDGVTVGEIVFRGGCVMLGYYNDPEGTAASMREDGWFYTGDIGVMHPDGYLEVKDRSKDVIICGGENISSTEVETVLYTNPAVKEAAVVAKPDKMWGETPCAFVSLKCSDRGSVTEREVREFCKKKLPKYMVPRNVVFMEELPKTSTGKIQKFLLRQMAKSLP

SEQ ID NO: 28430 - DNA, 1551 bp, Streptomyces ghanaensis
  CDS (1)..(1551): transl_table=11
atgaccctgaccgccgcgtccgtactggccgagtccgccgggcgacgccccgaccaccccgcgctcgtcttcggctccgaacgcatcacctacgccgagctctggctcgcaacccgccggtacgcggcggtgctgagggaccgcggtgtgcgcccgggcgaccggatcgccctgctgctgccgaacacaccgcacttcccgatggtgtactacggcgtgctggcgctcggtgccgtggtggtcccggtgcacggcctgctgcgtgccgacgagatcgtccacgtgctgggcgactccgaggcgaaggccatggtgtgcgcggccccgatgctgaccgagggcgccaaggcggccgggacggccggggttccgctgctcaccgtcatggtcgagaacggcgaggacgacgacggcccggcacgcctcgacgtgctcgccgaacgggcggagcccctggacggtctggtgccgcgcgcgcccgacgacttggccttggtgctgtacacctcgggcaccaccggccggcccaagggcgcgatgatcacccacctcaacctggtgatgaacgtcagcaccacgatgcgctcgccgttcgacctcggccccgaggacgtgctgctgggctgtctgccgctgttccacaccttcggccagacctgcggcatgagcgcctgtttcctggccggcggcaccctggtgctcatgaaccgcttcgacggccccggcgcgctcgacctcatggtcaccgagggctgcacggtgttcatgggcgtcccgaccatgtacctggccctcctcgacgccgccgctcacgacgcccgccgccccgtgctcgaccgcgccttctccggcggttcggcgctaccggtcaaggtgctcgaggagttccaggaggtctacggctgcccgatctacgaggggtacggcctcacggagacctcgccggtggtggcgtacaaccagaaggcgtggccgcgcaggcccggcaccgtggggcgccccatctggggcgtggaggcggagatcgccgccgccgacgtggaggaccgtatcgagctgctgccggccggggagatcggggagatcgtcgtacgcggccacaacgtcatggccggctacctcaaccggccggaagccaccgcagccgtgctggtcgacggctggttccgctcgggcgacctggggatgaaggacgccgacggctatctgaccatcgtcgaccgcaagaaggacatggtgctgcgcggtggctacaacgtctatccacgcgaggtggaggaggtgctgatgcgtcacccggccgtcgcccaggttgccgtcatcggtgtccccgacgacaagtacggcgaggaggtgtgcgccgtggtgcggacgcggccgggcacggatccggacgcggcgctggccgcgcacatcgtgtcctggagcaggcagcgaatcgccgcgtacaagtacccgcgccgggtggagttcgtcgaggacttccccctcgggccgagcggcaaggtactgaaacgcgaactcgccgcccgcttcgccggcggtggctga

SEQ ID NO: 28431 - protein, 516 aa, Streptomyces ghanaensis
MTLTAASVLAESAGRRPDHPALVFGSERITYAELWLATRRYAAVLRDRGVRPGDRIALLLPNTPHFPMVYYGVLALGAVVVPVHGLLRADEIVHVLGDSEAKAMVCAAPMLTEGAKAAGTAGVPLLTVMVENGEDDDGPARLDVLAERAEPLDGLVPRAPDDLALVLYTSGTTGRPKGAMITHLNLVMNVSTTMRSPFDLGPEDVLLGCLPLFHTFGQTCGMSACFLAGGTLVLMNRFDGPGALDLMVTEGCTVFMGVPTMYLALLDAAAHDARRPVLDRAFSGGSALPVKVLEEFQEVYGCPIYEGYGLTETSPVVAYNQKAWPRRPGTVGRPIWGVEAEIAAADVEDRIELLPAGEIGEIVVRGHNVMAGYLNRPEATAAVLVDGWFRSGDLGMKDADGYLTIVDRKKDMVLRGGYNVYPREVEEVLMRHPAVAQVAVIGVPDDKYGEEVCAVVRTRPGTDPDAALAAHIVSWSRQRIAAYKYPRRVEFVEDFPLGPSGKVLKRELAARFAGGG

SEQ ID NO: 28432 - DNA, 1581 bp, Tenebrio molitor
  CDS (1)..(1581)
atgagtgactttgtaaaagtgggacccctggataactatgaccttcccaaaaaatcattgggaaacatatttttcgaaagaataaagaaacggaacgccaacagagtcgccatagtcgattggacaggtgaagaactgaattatggacaactcttacagtcgactgttaaactagcaacgcgaatgaccaaattaggagtgaagaaaggcgacatcattaccatattgtcccaaaatagcacgaaatgtatcttgacagtccttgcaggattttacattggggcaaaagtgaatccactgaatccagactacactccaggagaactgaagcatttctttgaagtttgtcgaccagttttggtcttctgcacaagaaaaaatgttggaaacgttctccagttgaaagatttatttcctgtgaacatcatactctacgacactgaaacttcagatgctttcgaaaattttgacaatttcctcgaagctggtacctttgatcctggctttagtcccatcgagctcgaccccgaagaagacgtcgctttgattttgacctcttcaggcacaacaggctttccaaaaagtgtccaactaactcacgctaacctcagagtcacgatgctctacatcggagatccttacttcctcgatgtcaacgaaaacgagacgcttctggcgtttcttccgtttttccacatttttggggtcgccatcgctctagcgagcatgatgtacgcagcaaaactagtagttttggaaaaaattgtcccagatcgcttcttgagtctgattcaacaccacagagtcacgaaactgttcacagtacctcctgttcttctgttcttggtgaagagtcctctcgtgcgaaaatacgatttgacgtctatcacagatgtgttgtgcggagcagccgcagtgtccaaagaggtggaagatttggtagaggcgcagctgaaaatcagttgtgttcggcaagtttatggtatgacagaagtaagtggagcagctactgtgattcccaaaaatgtaaaaaaacatggatcgtcggggaaagttgtgacgggacatcaaattaaagtttgcaaccccgaaactggtaagaccctgggagtaaatgagtttggcgagttgcgaatcaagggtggtggggtgatgaagggttatttgggtaaggagaaagaaactgaagaggcgttcgacgaagaggggtatttgagaactggcgatctgggatactatgacgaggaaggtttcttctttattgtagatcgtctgaaagaaatcatcaaatataaagggttccaagtttcacctgctgaattagaaaatcttctggtacaacatgaagcagtgaaagatgctggagtgattggtgttcccaacgagagggcaggagaagtaccgctagctttcgtggtcaagcaaccaaacgaagatgtgtgtgaagaagagctcgtccgttacattgcagaaaatgtttgtgtccagaagcgtctatatggtggggtacgatttattgaagaaattccaaaaagcagtagtggcaaaattttaaggagaaaattggttaatctgttgtaa

SEQ ID NO: 28433 - protein, 526 aa, Tenebrio molitor
MSDFVKVGPLDNYDLPKKSLGNIFFERIKKRNANRVAIVDWTGEELNYGQLLQSTVKLATRMTKLGVKKGDIITILSQNSTKCILTVLAGFYIGAKVNPLNPDYTPGELKHFFEVCRPVLVFCTRKNVGNVLQLKDLFPVNIILYDTETSDAFENFDNFLEAGTFDPGFSPIELDPEEDVALILTSSGTTGFPKSVQLTHANLRVTMLYIGDPYFLDVNENETLLAFLPFFHIFGVAIALASMMYAAKLVVLEKIVPDRFLSLIQHHRVTKLFTVPPVLLFLVKSPLVRKYDLTSITDVLCGAAAVSKEVEDLVEAQLKISCVRQVYGMTEVSGAATVIPKNVKKHGSSGKVVTGHQIKVCNPETGKTLGVNEFGELRIKGGGVMKGYLGKEKETEEAFDEEGYLRTGDLGYYDEEGFFFIVDRLKEIIKYKGFQVSPAELENLLVQHEAVKDAGVIGVPNERAGEVPLAFVVKQPNEDVCEEELVRYIAENVCVQKRLYGGVRFIEEIPKSSSGKILRRKLVNLL

SEQ ID NO: 28434 - DNA, 1638 bp, Tenebrio molitor
  CDS (1)..(1638)
atgcccaccgaagacaacaaatatgttatccacggacctgctccacttcaaccattgccaaagctttcgctaggaaaattaatttacgacagtttgctaactaatcccaacaaacatgcagcgttggtggatgctgctactggagaatccatatcttacagagaaattttggagaaaacttgttgtttagctgaaagtctgctgagaaatggatatggaagaaacacaatcgttgcagttagtagcgagaataatttacagttttacattcctgtcgtatcatgtatgtacgttggtgccatagtggcaccaataaatcacaactataccgatctggaaacaactcatgctttgaatatctctaaaccaaaaattatattctgttcaaaagctgtcgcccaaaaatacgttttcttgaaaaattcaacacttccatatattgaacgaatcgtagtaatcgatagtgatgataaagtttatggcgctgaaacactaaacagttttattaataccagtttgaaaggctatcccatgatgaatagatttcctgtggcagaattcgatcctgacgaacaagtagtcttcctcatgtgctcttcaggaaccacaggtctgccaaagggtgttatgcagactcactcgaatcttatggttcgctatatgcatacaatcgatccacggtacacgataaaaacggatgttttcttaggaattctcccattcttccacggatatggtctagttacaaacttttttgcactagtattaaatcagaaaatcgtggtaattaaaagattccgagaagagttgttcctcaaagcaattcaagatcacaaaatcgaaaatctgtggctagctcctcctttggtagtgcttcttgctaaaagtcctctggtcgaaaaatataatttgtcaagcatcaaggaagttgttagtggtgctgccccccttagtagagaaacagaagaagccgtaaagaagaggttgaacatcgacttgattcgccagggttatggtttaacagaagctactttaggtgtgataatgatgtctgctggagacaagaaacatggttcttccggtcgagtggtaacttatatgtcttgtaaagtgcgagatccggaaactggaagatctttaggtcccggcgaaataggagaattatgcttcaagggtcccatgcttatgaaaggatattacggaaatgatgaagccactaggaactcttttacttcagatgggtggctcttgacgggagatttgggatactacgacgaagataattacttttacgttgtcgacagattgaaagagttgatcaagtacaaaggatttcaagtagcgccagctgagttggaagctattttgttaaaccatcccaatatcaaagatgtaggtgttgtgggagtgccagatgaagaagtcggggagttacctttggcgtttgttgtcaaggacccacaatctaatttaactgaggatgacataataaaatatgtggcagagaaagtctcatctcagaaacggctacgtggaggtgttgtttttgtgcccgcaattcccaagaatccaagtggaaaaattttgcgtcgtgaattgagaaaactgttagggcaaatgctcaaatcaaaattgtaa

SEQ ID NO: 28435 - protein, 545 aa, Tenebrio molitor
MPTEDNKYVIHGPAPLQPLPKLSLGKLIYDSLLTNPNKHAALVDAATGESISYREILEKTCCLAESLLRNGYGRNTIVAVSSENNLQFYIPVVSCMYVGAIVAPINHNYTDLETTHALNISKPKIIFCSKAVAQKYVFLKNSTLPYIERIVVIDSDDKVYGAETLNSFINTSLKGYPMMNRFPVAEFDPDEQVVFLMCSSGTTGLPKGVMQTHSNLMVRYMHTIDPRYTIKTDVFLGILPFFHGYGLVTNFFALVLNQKIVVIKRFREELFLKAIQDHKIENLWLAPPLVVLLAKSPLVEKYNLSSIKEVVSGAAPLSRETEEAVKKRLNIDLIRQGYGLTEATLGVIMMSAGDKKHGSSGRVVTYMSCKVRDPETGRSLGPGEIGELCFKGPMLMKGYYGNDEATRNSFTSDGWLLTGDLGYYDEDNYFYVVDRLKELIKYKGFQVAPAELEAILLNHPNIKDVGVVGVPDEEVGELPLAFVVKDPQSNLTEDDIIKYVAEKVSSQKRLRGGVVFVPAIPKNPSGKILRRELRKLLGQMLKSKL

SEQ ID NO: 28436 - DNA, 1824 bp, Medicago truncatula
  CDS (1)..(1824)
atgaacaacatcttcaagatcatgctttggactcgttctctaacccacttcagatcaactcaccacaccttctcacgtaaattctcaaacttttctaaggaccctgatcgaggatcatgggaatcaatgcaagggctagttcattgccatgcaaattctgttcctttgtcacctatcaacttcttggagagagcagcaaaggtttgtagagacagaacatcacttgtttatggttctttgaagtataattggggtcaaactcatcaacgttgtctcaaacttgcttcttctcttacccagttagggatttcccgtggagatgtggttgccacactagcaccaaatgtccctgcaatgtatgagctgcattttgctgtaccaatggctggagccattctttgtacccttaattcgcgtttagacgcagctatggtttcagtcctgctcgagcattcacaagcgaagatcctttttgcagaccaccaactacttgagattgctcaaggagcattggacttgcttcgcgaaagaggaacaaaattgccaattatagtcttagtaaatgattccgatttctcatctccgatccgcattacgtcaacgacctacgagtatgagaagctaatggaagttggtgataatggtttcaatattgtaaaaccgcaaagtgaatgggatcctataagtataaattacacctcaggaaccacatctagacctaaaggagttgtctacagccatagaggtgcttatctaaattctttagcaacagttttactctttcaaatggacatctttcctgtttatctttggaatgttccgttgttccattgcaacggttggtgtctcccttggggagtggcagcacaatttggaacaaatatttgtctaaggaaagtctctccacggaacatatttgacaacataattcagcataaggtgacacacatgggaggagctcctacagtgcttaacatgattttgaattctgcgtcgactcatagaaaaccactcaatcacaaggttttagtgatgacaggtggttcacctccaccgccgcagattctttccaagattgaagaaatcggttttagcatttctcacctctatggcttgacagaaacgtacggtccggggagtttttgtgcgtggagacctgagtgggacacattgcctcctgaagaaagatcaaagatgaaagctaggcaaggtgtgccgcatgtggcactggaggaaattgatgttaaagattctgcaactatggaaagtgttctagctgacggaaaaacggttggcgagataatgtttagagggaatacagtgatgagtggatattttagagatttgaaagcaacagaagaagctttcaaagacggttggtttcatagcggggatctagctgtgaaacactctgatggttacatagaagttaaggatagattgaaggatataatagtatctgggggagaaaacattagctcggtcgaggtagaaactgttttgtatagtcatccggcagttcttgaggccgcagtagttgcccggccagatgatcattggggtcaaactccttgtgcttttttgaagctgaaagaggggtttgatcaaaatgctcaagaaataatcgccttttgtagggaacgtttgcctcactacatggctcctaaaacagtcatttttctagatatgccaaagacttcaacaggtaagatacaaaagtatattttaagggagaaagccaaggctttgggaagtatatgtatatccagccccttgaattgtgaaaaagctgttgttgattgctcaagtaagtttagggaatag

SEQ ID NO: 28437 - protein, 607 aa, Medicago truncatula
MNNIFKIMLWTRSLTHFRSTHHTFSRKFSNFSKDPDRGSWESMQGLVHCHANSVPLSPINFLERAAKVCRDRTSLVYGSLKYNWGQTHQRCLKLASSLTQLGISRGDVVATLAPNVPAMYELHFAVPMAGAILCTLNSRLDAAMVSVLLEHSQAKILFADHQLLEIAQGALDLLRERGTKLPIIVLVNDSDFSSPIRITSTTYEYEKLMEVGDNGFNIVKPQSEWDPISINYTSGTTSRPKGVVYSHRGAYLNSLATVLLFQMDIFPVYLWNVPLFHCNGWCLPWGVAAQFGTNICLRKVSPRNIFDNIIQHKVTHMGGAPTVLNMILNSASTHRKPLNHKVLVMTGGSPPPPQILSKIEEIGFSISHLYGLTETYGPGSFCAWRPEWDTLPPEERSKMKARQGVPHVALEEIDVKDSATMESVLADGKTVGEIMFRGNTVMSGYFRDLKATEEAFKDGWFHSGDLAVKHSDGYIEVKDRLKDIIVSGGENISSVEVETVLYSHPAVLEAAVVARPDDHWGQTPCAFLKLKEGFDQNAQEIIAFCRERLPHYMAPKTVIFLDMPKTSTGKIQKYILREKAKALGSICISSPLNCEKAVVDCSSKFRE

SEQ ID NO: 28438 - DNA, 1677 bp, Oryza sativa
  CDS (1)..(1677)
atggacaagctcggcgccaacccggccaactcgtgcgcgctcacgccgctgggcttcctggagcgcgccgccaccgtgttcggcgactgcccgtccgtcgtctaccacgacaccgtcttcacgtggtcgcagacccaccgccgctgcctccgcctcgcctccgcgctcgtctcctccctcggcatctcccgcggcgacgtcgtgtccgtgctcctgccgaacgtgccggcgatgtacgagatgcacttcgccgtgccgatgagcggcgccgtgctgaacagcatcaacacgcggctcgacgcgcgcacggtgtccgtcctgctccgccactccggctccaagctcatcttcgtcgacccggcgctgctccccgtcctccgcgacgcgctccgcctcctcccggcggggcacacggccccgcgcgtcgtcctcgtcgaggatccccacgagaaggagttccctcccgcccccgccgccgcgctgacgtacgagaggctcgtcgagaagggggacccggagttcgcgtgggtgcggccggcgagcgagtgggacccgatgatcctcaactacacctccggcaccacgtcggcgcccaagggggtggtgcactgccaccgggggatcttcctcatcaccgtcgactcgctggtcgactgggcggtgccgccgcggccgacgtacctgtggacgctccccatgttccacgccaatggctggagcttcccatgggggatggccgtggtgggcggcaccaacgtctgcctccgccgcgtcgacgccgccgaggtgttcgacacaatcgcgcgccgcggcgtcaaccacctgtgcggcgcgcccgtcgtgctcaacatgctggcgaacgcgcccgagggcgtgcggaagccgctcccggggaaggtgcggatcctcacggccggcgcgccgccgccggccgccgtgctgtaccgcacggaggcgatcggcttcgaggtcagccacgggtacgggctgacggagaccgcgggtctggtgctctcgtgcgcgtggaagggcgagtgggacaagctcccggcctccgagcgcgcgcggctcaaggcgaggcagggcgtgcgcacgccggggatggccgaggtggacgtcgtggacggcgagaccggccgcagcgtgccccgcgacgggtcgaccatgggcgagatcgtgctccgcggcggctgcatcacgctgggctacctcaacgacgaggcggcgacgaaggcggcgatccgggacaacgggtggttctacaccggcgacgtcggggtgatgcacccggacgggtacgtggagatccgggaccggtccaaggacgtgatcatcagcggcggggagaacatcagcagcgtggaggtggagtccgtgctgtacggccacccggcggtgaacgaggcggcggtggtggcgcggccggacgagttctggggggagacgccgtgcgcgttcgtcagcctcaagcagggcggcggcgcggtgacggcggcggacgtggtcgcgtggagccgggagcgcatgccgcggtacatggtcccaaagacggtgatcttccgcgacgagttaccgaagacgtccaccggaaagatccagaagtacgtgctccggaatatcgccaaggagatggggcccaccacgggcaccaacaccaaccgcaacagtaaaatgtag

SEQ ID NO: 28439 - protein, 558 aa, Oryza sativa
MDKLGANPANSCALTPLGFLERAATVFGDCPSVVYHDTVFTWSQTHRRCLRLASALVSSLGISRGDVVSVLLPNVPAMYEMHFAVPMSGAVLNSINTRLDARTVSVLLRHSGSKLIFVDPALLPVLRDALRLLPAGHTAPRVVLVEDPHEKEFPPAPAAALTYERLVEKGDPEFAWVRPASEWDPMILNYTSGTTSAPKGVVHCHRGIFLITVDSLVDWAVPPRPTYLWTLPMFHANGWSFPWGMAVVGGTNVCLRRVDAAEVFDTIARRGVNHLCGAPVVLNMLANAPEGVRKPLPGKVRILTAGAPPPAAVLYRTEAIGFEVSHGYGLTETAGLVLSCAWKGEWDKLPASERARLKARQGVRTPGMAEVDVVDGETGRSVPRDGSTMGEIVLRGGCITLGYLNDEAATKAAIRDNGWFYTGDVGVMHPDGYVEIRDRSKDVIISGGENISSVEVESVLYGHPAVNEAAVVARPDEFWGETPCAFVSLKQGGGAVTAADVVAWSRERMPRYMVPKTVIFRDELPKTSTGKIQKYVLRNIAKEMGPTTGTNTNRNSKM

SEQ ID NO: 28440 - DNA, 1686 bp, Aspergillus oryzae
  CDS (1)..(1686)
atgccggtctcctcacagtatccgccggttgacatccccaatgtcgacctttggacatttctatttgaacgcaaggataggacctttccagatgacaacatcatttatcaggatgccgacacacaacgattttacacctacaaaaccctaaaagatgcagcgcttgcctttggtcaaggactaaaagccatttatgattggcgcaaaggagatgttttggcgttgttcactcccaacagcattgacaccccggtggtgatgtggggagctcattgggctgggggcgtcgtatccccggcaaacccagcctacacgaccgaagaactggccttccagctgaagaactcgggagcgaaagctgtgattacgcaggttccccagctgtcggtagtaagagaggccgccaagcaagccaacatccccgaggaccgcatcatcctcattggagacaagcgcgacccagaagccaggttgaaacattttacgtctatccgaaacatttcgggggcaaccaggtatcgcaaaaccaagatcaatccggataaggatctgtcattcctggtttattcttcgggtaccactggtgttcctaagggtgtcatgctttcccataggaatatcgtcgccaactctcttcagttggctgcaggagaggcaggccatctgacttggaatggcggtgccgacggcaaaggagaccgggtactagcgtttctgccattcttccatatttacggtttgacctgtcttgtgcaccaaacactgtaccaaggctaccgacttgtggtgatggagagattcgatattgaaaaatggtgtgcccatgttcagaactaccgcatcacgtttagctacgtcgttcccccggtcgttttgttgttgagcaaacatcccatagtcgacaagtatgacctctctagtctccgcatgatgaactcgggtgctgccccactcacgcgcgagctcgtagaggccgtatatgcacggatcaaatgtggtatcaagcaaggctacggtctcagcgagaccagccctactactcacactcagccttgggaggaatggcgcactagcatcggatctgtcggcaaactgttgccgaacatggaagccaaatacatgaccatgcctgaggatgaatcggaaccgcgcgaggtatcagtaggcgaggtaggcgagttgtacatgaagggtcccaatatcttccaggggtaccacaacaacccagccgcaaccgccgattgtcttaccgacggatggttccgcaccggagacgtaggctaccaagacaagaacggaaatttctacatcacggaccgtgtcaaggagctcatcaagtacaagggcttccaggtggctccggcagagctggagggtatccttgtggaccacgaggcaatcgacgatgtcgccgttatcgggattgaaagtgaggctcacggcactgaggttccgcttgcttttgttgtgcggagtgcgaagagcaaagcctcaggcgccagcgcagaacaagaggcagctaatattatcaaatggcttgatggtaaggtcgcgtaccacaagcgactacgtggtggagtacgctttgtggacgcaatccccaagagcgtgagcggaaagatcttacggagagttctcaaggcgcaagcaaaggaggcggcggcggcacccaaggccaagctgtaa

SEQ ID NO: 28441 - protein, 561 aa, Aspergillus oryzae
MPVSSQYPPVDIPNVDLWTFLFERKDRTFPDDNIIYQDADTQRFYTYKTLKDAALAFGQGLKAIYDWRKGDVLALFTPNSIDTPVVMWGAHWAGGVVSPANPAYTTEELAFQLKNSGAKAVITQVPQLSVVREAAKQANIPEDRIILIGDKRDPEARLKHFTSIRNISGATRYRKTKINPDKDLSFLVYSSGTTGVPKGVMLSHRNIVANSLQLAAGEAGHLTWNGGADGKGDRVLAFLPFFHIYGLTCLVHQTLYQGYRLVVMERFDIEKWCAHVQNYRITFSYVVPPVVLLLSKHPIVDKYDLSSLRMMNSGAAPLTRELVEAVYARIKCGIKQGYGLSETSPTTHTQPWEEWRTSIGSVGKLLPNMEAKYMTMPEDESEPREVSVGEVGELYMKGPNIFQGYHNNPAATADCLTDGWFRTGDVGYQDKNGNFYITDRVKELIKYKGFQVAPAELEGILVDHEAIDDVAVIGIESEAHGTEVPLAFVVRSAKSKASGASAEQEAANIIKWLDGKVAYHKRLRGGVRFVDAIPKSVSGKILRRVLKAQAKEAAAAPKAKL

SEQ ID NO: 28442 - DNA, 1857 bp, Aspergillus oryzae
  CDS (1)..(1857)
atgaaccttgcaagcactgcccccgtggcggcgaggtttgctgacccagagctatgctcgtggaccactagaggtacccttgtgctacgtgttgagcgtctagatcgcatgaggctaacatttactcttttttaccctaagcctccattgctggaatcaaccattggggatcatttcgctcaaatcgttagcgcatatggtgaccgaacagctgtcatctgcaaacatcaaaatgaccgagtaacttatgccggtctcgatgcgaaaagcaacgccctcgcacggggcttggagtctgtaggcgtgcgcacaggcgaccgtgtgggagtgatgctgggaaattccatggaattctccattgcgacttatgcgttgtttaaactcggagccattctcgtcccaataaacccatcattcaacgcaacccaagtggtctcggcattaactcacctagaggctacccatatgatcgtcagcaccgaatctaatctgccgcgaaaagagccccggagcaacatcccaatcttacagcacctggtccaagaccttcacaaatcaaaactggaatccgcacttgtcccatccctgaagcatatcatcatagtcgacaactcctccggccgggttgacatctccgagtacagatctttgacgaagttttcctcggtgacatccgccgcaaaggcagatgaggccgcattgccatatcgagatctatcacctcatgacgtcgtaaacatccagttcacatccggcaccaccgccatgcccaaagcagcctgcctgacccatcgatcggttctcaacaacggttcccagatcggcgaccgcatgcgcctcaccccggaggatatcgtctgctgtcctccaccgctgttccattgcttcggctccgtgctaggatatatggctacggcaacgcacggctcggccgtcgtattccccaccgaatcattcaacgcccgggcagcgctcacggccgtccaagaggagagatgcaccgcgctttacggcgtcccgacaatgttcatcgaagaactcaccctgatcgatgacggcgaagtgcccaatgaaggattcggccatctgcgaacaggcatcgcagccggaagcagtgtgccagctgccctgatgcagagactgcacaaggtcttaaacctaacggaattgaccatctgctatggcatgacggaaaccagccccgtctccgccatgacgaccaccgacgatccgatcgacaagcgaatcaataccgtcggccgactcatgccgcatgtagaagcgaaaatcgtgaacccagccgatcggagccagattctccccgtcggtgtgcccggtgaactagcggtgagcggatacctcttgatgaaagaatactggggcgacccgcaacgcaccgcggaatcgatgatcgcggacgagaaggggaaggtctggatgcattccggcgacgaagcgaccatttcccctgacgggtatgtgacgattactggtcgaattaaagacctcattatccgcggcggagagaatatccacccacttgagatcgagaactgtatattgacgcacgctggcgtcatggatgtgtcggttgtcggcgtgcctgatgagaagtacggagaggtcgtggctgcttttattattcccaaagaacatcaggatgaggctgcgcctttgactgaggagaatatccgggaatgggtacgggggcggttgagcaatcaccttgtcccgaagtacgttttcaatttggaacacacgaccatcttccccaaaactgccagcggaaagatacagaagtttaaactgaaggaggatgctatcagaaccctcaaggaaaggaactcgttgagctaa

SEQ ID NO: 28443 - protein, 618 aa, Aspergillus oryzae
MNLASTAPVAARFADPELCSWTTRGTLVLRVERLDRMRLTFTLFYPKPPLLESTIGDHFAQIVSAYGDRTAVICKHQNDRVTYAGLDAKSNALARGLESVGVRTGDRVGVMLGNSMEFSIATYALFKLGAILVPINPSFNATQVVSALTHLEATHMIVSTESNLPRKEPRSNIPILQHLVQDLHKSKLESALVPSLKHIIIVDNSSGRVDISEYRSLTKFSSVTSAAKADEAALPYRDLSPHDVVNIQFTSGTTAMPKAACLTHRSVLNNGSQIGDRMRLTPEDIVCCPPPLFHCFGSVLGYMATATHGSAVVFPTESFNARAALTAVQEERCTALYGVPTMFIEELTLIDDGEVPNEGFGHLRTGIAAGSSVPAALMQRLHKVLNLTELTICYGMTETSPVSAMTTTDDPIDKRINTVGRLMPHVEAKIVNPADRSQILPVGVPGELAVSGYLLMKEYWGDPQRTAESMIADEKGKVWMHSGDEATISPDGYVTITGRIKDLIIRGGENIHPLEIENCILTHAGVMDVSVVGVPDEKYGEVVAAFIIPKEHQDEAAPLTEENIREWVRGRLSNHLVPKYVFNLEHTTIFPKTASGKIQKFKLKEDAIRTLKERNSLS

SEQ ID NO: 28444 - DNA, 1746 bp, Aspergillus oryzae
  CDS (1)..(1746)
atggtcttcactcctcagaaaggggcgggagaattacccgcaatccctgataatattcctatcagcgaatttatgctcaacgatcaatatggaagaaacccgcttcaaaagtcgagagatcccttcacttgtggaattactgggaaatcctactcaggagcccaggtggcggagcgagtcgattatctcgctcgagcattagcgaaggagttcaactgggccccaaatcagggtacggaatgggacaagacattggcggtcttcagtgtgaacacgattgatacacttcctttgtcctgggcgacccatcagttgggaggaattgtttcgcccgccaacgcggcttactctgcgcccgagctgaagcatcagttggttgattctcaagcgaaagctctattcacctgtgcccccttgctgtccactgccctggaggcggcgtccttggctggattcccgaaggaccgtatctatctgcttgaggttcccgccgaactcaccggtggcgcaagcatccctgcgcaatacaagaccgtctcacaactcattgaggcaggcagatcactacctaaattggagagactcaactggggtcctggagacggtgctcgccgaactgcattcttatgctattccagtgggacatctggcttacctaaaggagtgatgatttctcataagaacgttatcgcaaacgttctgcagatctccgctttcgagaagacccatcgagatgccctcgccgcaccaggaggtccccaacatactgaagtcgtgctgggcctgctcccccagagtcatatctatgccctagtggttatgtgtcatactggaccctatagaggtgaccaggtgattgtgttacccaaattcgagctgaaatcataccttgcctctattcaacacttcaagatcgggtcccttttcttggtcccgccaattatcattaccatgctccgaaaccacgaggtttgcaagaagtacgacctcagctcggtgaaatctctgttcactggggcagctcctctgggtatggaaacagccgaggatttccaaaagatgtaccccggtgttacagttcggcaaggctatggtttaaccgagacatgcacggtcgtggcctcgactcaccccaacgacatcttcctcggatcctccggtaccctcatccctggtgttgaagcacgcatcgtttccccagaaggccaagaaatcacaagctatgacactccaggtgaacttgtggtccgcagtccaagtgtggtactaggatacctcaacaatgagaaggctaacaaagaaacctttgaaaacggatggatgcgcactggtgatgaagccgtattccgcttaagcccgaagggaactgagcatgtgtttattgtggaccgtatcaaggagttaattaaggtcaagggcttgcaagttgcccctgcagagcttgaggcccacctactcacccatcctgccgtcgctgattgtgccgtcattgctattcccgacgaggctgccggtgaagttccgaaggccatcgtcgtcaaatctgcctcggctgataaggatgatgagaagacgatacagtcgatcaagaagtatgtggaagaatataaggctcggcacaagtggttgaagggtggtattcgcttcgttgaggctgttcccaagagtcccagtggcaagatcttgcgtcgcttgcttcgggaccaagagaaggaggagcgcaggcgcgctggtgcgaagctgtag

SEQ ID NO: 28445 - protein, 581 aa, Aspergillus oryzae
MVFTPQKGAGELPAIPDNIPISEFMLNDQYGRNPLQKSRDPFTCGITGKSYSGAQVAERVDYLARALAKEFNWAPNQGTEWDKTLAVFSVNTIDTLPLSWATHQLGGIVSPANAAYSAPELKHQLVDSQAKALFTCAPLLSTALEAASLAGFPKDRIYLLEVPAELTGGASIPAQYKTVSQLIEAGRSLPKLERLNWGPGDGARRTAFLCYSSGTSGLPKGVMISHKNVIANVLQISAFEKTHRDALAAPGGPQHTEVVLGLLPQSHIYALVVMCHTGPYRGDQVIVLPKFELKSYLASIQHFKIGSLFLVPPIIITMLRNHEVCKKYDLSSVKSLFTGAAPLGMETAEDFQKMYPGVTVRQGYGLTETCTVVASTHPNDIFLGSSGTLIPGVEARIVSPEGQEITSYDTPGELVVRSPSVVLGYLNNEKANKETFENGWMRTGDEAVFRLSPKGTEHVFIVDRIKELIKVKGLQVAPAELEAHLLTHPAVADCAVIAIPDEAAGEVPKAIVVKSASADKDDEKTIQSIKKYVEEYKARHKWLKGGIRFVEAVPKSPSGKILRRLLRDQEKEERRRAGAKL

SEQ ID NO: 28446 - DNA, 1641 bp, Aspergillus oryzae
  CDS (1)..(1641)
atggccaggatcctggaaccggagaaacgactcccgctgtcgaaccaagatctcctttcctatgtctttgaccggcctgcatatgaccggacacaatcaatctacatcgacgcccacaacccgtcccgctccatatcatggaaccaggctcgaaccatcatccgccagttgatcaagggactgcggaacgcagggcttcagaatggggattgtgtggcggttcactcactcaataatattttttatagtgtcgttgtcttagctatcgtgggatccggaggcatcttcaccggcaccaacccctcgtatacagcaggagagctacaacatcatcttaagacctctcaatccaagttcgtattctgcgagtccgagttcgtgtccccattgctggaatcggcaaagcaagccagtatccacaatgggaacatctgggtcttcgataccactggagatagcatccttccacctggtctgcaatcctggacccatctcctaaaacaaggtgaatccgactgggtccacttcgacgacctagtcatcgcgaagaaaacaaccgcagcccgattctttagcagtggaaccacaggtctcccgaaagcagtggaaataacgcaccacaacctactcgcccagcattccctggttttcgaagctcacccgaggccatattccatgtcccacctaattgtccttcctgccttccacgccgccattgccccgctcatgcatatcggagccctgcgatcgggatatgtgatgtacatcatgcgccggttcgagctcaactcatatcttgaattcgtggacaagtacaacataacggatctgattgtcgtgccgcctattcttacagccgttttgaagtccgaacacccagagaaagagaggcgtctgaagaaggtgaagaacatcgtctgtggtgctgcgcctctggacaaagctatacaaagtcaagcccgcgacctactacccaaggacacaccactaacccaagcatggggtatgaccgagacgtgttgcgcgtcgatgatatttccgtatcccgagaaagatgagactggttcggtaggacggctagttccgaatgttgaggccaagttaatcgatgaccaaggtagaaatatcactgcatacaatgtccccggtgagctctgcatccgtggccccaccgtaacacccggctactttgataatgtctctgcgaacagctccgcctttgatgacgacggttggctgaagacaggggacattgcaagctgcgatgaagcctcccgaaaatggtacattgtggaccggaagaaggagctgatcaaagtgagcgggtttcaggttgcgccgtcggaggtggaggccgttctgctgtctcatccaggggtagcggatgcagccgtggttggagctcgtaatccaggtgatgggactgagaggccttgtgcgtttgttgtgcccaagtcgggaatgaaggttaccagtgttgagttgaagctgtatgccgctcggcggttggcgaagtataaggagttatctggtggggttaagtttgtggatgcgataccgaggaatgtgagcgggaagattctgaggcgggtgctgagggatctgtgcgaggatgatggaggtttaaagtcgaagttgtag

SEQ ID NO: 28447 - protein, 546 aa, Aspergillus oryzae
MARILEPEKRLPLSNQDLLSYVFDRPAYDRTQSIYIDAHNPSRSISWNQARTIIRQLIKGLRNAGLQNGDCVAVHSLNNIFYSVVVLAIVGSGGIFTGTNPSYTAGELQHHLKTSQSKFVFCESEFVSPLLESAKQASIHNGNIWVFDTTGDSILPPGLQSWTHLLKQGESDWVHFDDLVIAKKTTAARFFSSGTTGLPKAVEITHHNLLAQHSLVFEAHPRPYSMSHLIVLPAFHAAIAPLMHIGALRSGYVMYIMRRFELNSYLEFVDKYNITDLIVVPPILTAVLKSEHPEKERRLKKVKNIVCGAAPLDKAIQSQARDLLPKDTPLTQAWGMTETCCASMIFPYPEKDETGSVGRLVPNVEAKLIDDQGRNITAYNVPGELCIRGPTVTPGYFDNVSANSSAFDDDGWLKTGDIASCDEASRKWYIVDRKKELIKVSGFQVAPSEVEAVLLSHPGVADAAVVGARNPGDGTERPCAFVVPKSGMKVTSVELKLYAARRLAKYKELSGGVKFVDAIPRNVSGKILRRVLRDLCEDDGGLKSKL

SEQ ID NO: 28448 - DNA, 1692 bp, Aspergillus oryzae
  CDS (1)..(1692)
atgcctttcaaatcgcgttggcaggtgcatgtcccggatgcgcacctggcaactgtcctgttcacatcgcccactcatccgttgtcaaagacgcacaggtgcttctctgaggcagctcgtcctgatacgcattatttcactacccatgacttccgactatggtcgaagcgttttgcggcgggattgcgcaaggctggtctccagtcgggcgatcgggtcttgctcttctccggcaacgatctcttcttccctgttgtttttatggggatcatcatggcgggaggtatcttctcgggggccaatcctacctatgtcgcaagggaattggcgtaccagctccaggatagcggcgcaacttacctcatttgcgctgaggggagtcttgacactggtattgaagcggcgcaggtagcaggactgagtcggggtcgggtgtttgtttttaacaatgccatctttgatgggcgtggggagggtaagatgggttgtcgctactggggtgaactggtggcgtctgcggaggaaggcagtcaatttgaatgggatgatctatcgactccggagaaggctaaccgtactctcgccttaaactattccagcggcacaacgggaaggcccaagggcgtggaaatctctcacaagaactattgcgccaacatgcttcaggcgaatcaatcgttttatctgaatccggactggaaggcaagaaatgctagggctcggttcctctgtttcctgccgatgtatcatgcgatggctcagaatattttcattgcgaatgcattaaagcgtgaggttcctgtgtatattatgcccaagttcgacttcatcaagatgctggaatatacggagaaattccgcatcacggaccttattctggtacctcccgtggtggttgccctagccaagcatcctgcggtcagaagcggcaaatatgatcttagcagtgtcgaggggattggcagcggtgcagcgcccctgggaagagaagtctgtgatgaagtggaggcgctctgggaacctggacgtgtcaatgtgaaacagggctggggaatgaccgagactacatgcgctatacttggctgggaccccaccgaaacaagtcacacagcgtcggttggagagctgaaccccaattgcgaagcaaagattatggccgacgacggggtcaccgagttaggacgtaaccaacggggtgaactctgggtccgaggcccgaacattatgaagggctattggcgaaacccacaggccacaaaggaaaccaagacggaggacggatggctgaagaccggagacatcgcatatgtggacgatcaggggaagttctacgttgttgaccgaaagaaggaactgatcaaagtgaaaggcaaccaagtcgcaccggcagagttagaggcccttttgctggagcacccggcagtagctgacgttgcggtcattggagtgtcggtgaacgatgacgagcgccctcgggcatatgtagtgctaaaacctggacagagcgcctccgcacaggatcttatcgcattcatggacgggaaagtctccgcgatcaagagaatcactggcggggtagttttcgttgatacaattcctaaaaacccctcaggcaaaatcctgcgaaaggtccttcgagaccgcgccaaagaggaagtggcctcaaacccgagtatcgccgcaaagctatag

SEQ ID NO: 28449 - protein, 563 aa, Aspergillus oryzae
MPFKSRWQVHVPDAHLATVLFTSPTHPLSKTHRCFSEAARPDTHYFTTHDFRLWSKRFAAGLRKAGLQSGDRVLLFSGNDLFFPVVFMGIIMAGGIFSGANPTYVARELAYQLQDSGATYLICAEGSLDTGIEAAQVAGLSRGRVFVFNNAIFDGRGEGKMGCRYWGELVASAEEGSQFEWDDLSTPEKANRTLALNYSSGTTGRPKGVEISHKNYCANMLQANQSFYLNPDWKARNARARFLCFLPMYHAMAQNIFIANALKREVPVYIMPKFDFIKMLEYTEKFRITDLILVPPVVVALAKHPAVRSGKYDLSSVEGIGSGAAPLGREVCDEVEALWEPGRVNVKQGWGMTETTCAILGWDPTETSHTASVGELNPNCEAKIMADDGVTELGRNQRGELWVRGPNIMKGYWRNPQATKETKTEDGWLKTGDIAYVDDQGKFYVVDRKKELIKVKGNQVAPAELEALLLEHPAVADVAVIGVSVNDDERPRAYVVLKPGQSASAQDLIAFMDGKVSAIKRITGGVVFVDTIPKNPSGKILRKVLRDRAKEEVASNPSIAAKL

SEQ ID NO: 28450 - DNA, 1749 bp, Aspergillus oryzae
  CDS (1)..(1749)
atgtctgacaatatctcttctttatcctttctccatggcccatccgagccagccctaaaatcatactctattgggcaactcctcaaccaacaagcagcccactttccaaccaaggaggcagtcatctttccaactgagggtactagatatacctatcaagagttgaatttaagagtacaaactgtttcccgcgcactcatagcgcatggagtcaaggccggtgaccgcatcggcgtcttctgcggtaactgcgtgggatatgtagaagttttcctggcagcaactagaatcggggcgattacagtattgctcaataatgcgtactcaactacggaatgcctcaatgtgctcagaactaccggctgctcgttgcttttcacagcaacgcatatcggacagcgtgacttgacatcttgtctaagagttctaaaagcttcgttagatggggacgaactccctgctttgaagcaaattattctgctgaagacagatggcgacatctcaaagcagttccagtcttttgcgagcttcctcggccaatccagcaccataccagactcgagactctgtgagatagagcaaaaagtccagcccgatcagacctgcactttccaatttacgagtggcacaaccggtgcccctaaaatcgccatgctaacacataggaacgtcatcagcaatgcccattccatcggccaccgtttactactatcagaaaacgatgtcatctgctgtccctaccctctattccacatttccggactggtaataggccttctttcctctctaacgtacggagccgcaattgtatacccttcacctacattcgatccttcggccgtactccacgaagtcgtgcgagaaaagtgcacggggcttcatggtgtgccgactatttttattgctcttcttgaacggcaccgtcagctcaagactagcccgatccacgtcagaacaggtcttataggtggcgcaccaattccctcagctttacttaaggagatgcataaggcatttgggttcgaagatttgacagtggcttacggaatgactgaaacatccccaatcagcttcatgtctcgatcagcagagcagccaagtgatgtggtggtagtgcatagagatatacttcctcacacgtttgccaaaatcatcgattcaactgggaacatcgtaccacgagggatacgcggcgaactctgtatcgcggggtccggcgtgcagaaaggatactatcagaatcctgaaaagactcgtgaggcgctcaaaactgatcactctggagttatgtggatgcatacgggtgacgaagcagttatggatacacagggacattgtgtcattactggtcggattaaggatattataatccggggagcggagaatatctatccggcagaaattgaagaagagttgaacaaacaccatgctatttctcagtcttgtgtcgtcggggtcaaacacgaaactttgggagaggaagtggcagcttttcttcagggcactcccggtcagcctcgcccttctggtgcggagatcattgaatggttacaattgagcttgggggcccagaaagcacccgcatgggtattttggctgggagatggtgatgtgcctgttgtctttccgattactgatagtgggaagatcaagaggaatgagatggcggatttgggaaatagacttgtgggaaaaattagggggagtgttccctccatgagctgtatgaccatcacagtcttgccttga

SEQ ID NO: 28451 - protein, 582 aa, Aspergillus oryzae
MSDNISSLSFLHGPSEPALKSYSIGQLLNQQAAHFPTKEAVIFPTEGTRYTYQELNLRVQTVSRALIAHGVKAGDRIGVFCGNCVGYVEVFLAATRIGAITVLLNNAYSTTECLNVLRTTGCSLLFTATHIGQRDLTSCLRVLKASLDGDELPALKQIILLKTDGDISKQFQSFASFLGQSSTIPDSRLCEIEQKVQPDQTCTFQFTSGTTGAPKIAMLTHRNVISNAHSIGHRLLLSENDVICCPYPLFHISGLVIGLLSSLTYGAAIVYPSPTFDPSAVLHEVVREKCTGLHGVPTIFIALLERHRQLKTSPIHVRTGLIGGAPIPSALLKEMHKAFGFEDLTVAYGMTETSPISFMSRSAEQPSDVVVVHRDILPHTFAKIIDSTGNIVPRGIRGELCIAGSGVQKGYYQNPEKTREALKTDHSGVMWMHTGDEAVMDTQGHCVITGRIKDIIIRGAENIYPAEIEEELNKHHAISQSCVVGVKHETLGEEVAAFLQGTPGQPRPSGAEIIEWLQLSLGAQKAPAWVFWLGDGDVPVVFPITDSGKIKRNEMADLGNRLVGKIRGSVPSMSCMTITVLP

SEQ ID NO: 28452 - DNA, 1551 bp, Aspergillus oryzae
  CDS (1)..(1551)
atgaccaccttagcgcagtccttctcctctcggagcgccgacattgcagttgtggttcccaagagacagacccccctgtcccctaatctcagcatcacctatcaacagctgcatgctcatgtggccgagttccaagctaaattggctaagctgggcgttggtcacggaggtgcggtgtccttggcgctggcaaactcgtacgaattcatcgtcgggtttctaggcgcgtcctggcagcgggcgatcgccgctccactaaatcccgcttataagcaggaggagttcgagttctatatcgatgaccttagttcgacgttagtgctgattcctaaggggtcgtatgcgcagaatggccccgccgtgcgtgctggaagaaaatacaatgctgcgattgcggagtgctactggaatggcacagaggtggttttagatgtgaaggaacaaggcaaattggcgggtagcgcgggtgtgactgtcggacaggcccagccggacgatgttgctcttgtgcttcatacaagtggcacgaccggcaggcccaaagctgttccactcacccacaagaatctcaccacgaccatgaggaatatccgggatacgtacaagctaacgccaaaggatcgtacatatttggtgatgcctcttttccatgtccatggcctcctagcagcattcctggcgcctctatactctggaggatccgtcattgtacctccaaagttctcggcccatgaattctggtcagacttcgtagcctacaacgcgaactggtacacagctgtgcctactatccaccagattctgcttaaaactcccctgcccaatcccatccccaatatccgcttcatccgctcatgttcctcaccattatcccccaaaaccttccaggatctggaaaagacgttcaacgcgcccgtcctggaggcgtacgcaatgaccgaagccgctcaccagatgaccagcaacccacttccgcccggaaagcgccaacccggcagcgtcggcctcggacagggtgtagagatcaagatcctcgatcaagatggcaacgaggttccccagggcaaggaggccgagatttgcgtgcgcggtgagaatgtaaccaaggggtatctgaacaacccatccgccaacaaatcttcgttcaccaaggacgggttcttccgcacgggagaccagggtaagaaggatccggacggcaacgtgatcatcaccgggcgtatcaaagagctcatcaacaagggcggagaaaagatcagccccatcgagctggacaacacgctcctacaccaccccaaggtagccgaggctgtgtgcttcgccatcccagacgaggggcactatggcgaggacatcggagctgcggttgtcctgaagggcaacaacacagccacggaggacgagttgaagtcgttcatggcagagaagttggcgaaattcaagacccccaagagggtctggattgttccacagattcccaagaccgcaacgggcaaaatccaacgccgcaaggtcgcagaggcgatgctgacacccaaggcaaagctgtaa

SEQ ID NO: 28453 - protein, 516 aa, Aspergillus oryzae
MTTLAQSFSSRSADIAVVVPKRQTPLSPNLSITYQQLHAHVAEFQAKLAKLGVGHGGAVSLALANSYEFIVGFLGASWQRAIAAPLNPAYKQEEFEFYIDDLSSTLVLIPKGSYAQNGPAVRAGRKYNAAIAECYWNGTEVVLDVKEQGKLAGSAGVTVGQAQPDDVALVLHTSGTTGRPKAVPLTHKNLTTTMRNIRDTYKLTPKDRTYLVMPLFHVHGLLAAFLAPLYSGGSVIVPPKFSAHEFWSDFVAYNANWYTAVPTIHQILLKTPLPNPIPNIRFIRSCSSPLSPKTFQDLEKTFNAPVLEAYAMTEAAHQMTSNPLPPGKRQPGSVGLGQGVEIKILDQDGNEVPQGKEAEICVRGENVTKGYLNNPSANKSSFTKDGFFRTGDQGKKDPDGNVIITGRIKELINKGGEKISPIELDNTLLHHPKVAEAVCFAIPDEGHYGEDIGAAVVLKGNNTATEDELKSFMAEKLAKFKTPKRVWIVPQIPKTATGKIQRRKVAEAMLTPKAKL

SEQ ID NO: 28454 - DNA, 1683 bp, Aspergillus oryzae
  CDS (1)..(1683)
atgcacttgattggccctgccgtctctactaagtggcattggatgaactgccatccattcagcggtgaagtagtgacgacccactatgacagctggagctccctgccgtgtggggacggccctataacgtggatctacatcgatgcgagcgactcctcgcggtcgatttcctacaatcaggctaaggttatcgtccgaaagctgattgccggcttgcgcgcatggggcgtacaaaaaggcgactgtgtagccatccattccttcaatgatatctactattctatgttggtcctggcgatcaacggcgccggcggtgtttacaccggcaccaatccctcctatacacccatggagcttggacaccacatccgagcatcgcatgctaagttcatcatctctgagccggagatcatcgccccgatccaggcggctatgaaggagacgggtatcccggagtcgaatttgctggtcttcgatgtccagggtcagactgttccggccggactgaagtcatggaaaggactcttttctgctggagaggaggattgggtacggtttgatgatctgaagacctgtgaagagactgccgccgccaggttgttcagcagtggaactacgggtctgcccaaggcaacgacgctcacgcatcgaaacttcattgcccagcatgaattggtgtttgagatcgagaagcgaccgtaccagatccgccgactcatggccctacccatgttccacgccgccgccgctccttccacccactggagtcctctcaagggtggtcacgtcgtacacgtcatgcgtcgctttgacctggtgagtttcatcacaaatgtcgaaaagtatcaaatcacagatcttgcggtagtaccgcccatcgcggtggcgcttgtcatgagtccgcaggtacaggagcggccatatctgaaaagtgtccgtgtagcttcgtgcggcgctgctccgttgagcaaggaagtccaagagaagctgcgtgtcatgctggcggatggtgcaccctgcacacaggtctggggcatgacggagacatgttgcattgcgacgagattcggggcctacgaacaggatgatacgggtagtgtggggagattgatacctaatgtagaggctaagctggtagatgatgacggaaacaatatctcggcgtatggggttcgaggcgagatttgtgtccgaggacctaccgttacaccgggatactttgaaaatgccgctgcgaatgcttcctcctttgatcaggatggctggtaccacaccggtgatatcgcatactgcgacaaggatacgcagaagtggtacatcgtggaccgcaagaaagagttgatcaaggttcgcgggttccaggtcgctccgcctgagctggaagctgttctgctctcgcatccgctcatcgtcgatgcggcggtcattggcttgtccggtgtgcttcccgatagtgagcttccgagggcttatgtgactcgacgtcctggaacgggtgacaagcttacagagaaggaggtgcaagattatcttggtcagagattggcgaagtataaggcgctgaccgggggtgtgagatttatggatgcgattccgaagaacgccagtggaaagatactgaaaagggtcttgagggaggaggcccagaaggaggttaaggcgggcttccggccgaagttgtaa

SEQ ID NO: 28455 - protein, 560 aa, Aspergillus oryzae
MHLIGPAVSTKWHWMNCHPFSGEVVTTHYDSWSSLPCGDGPITWIYIDASDSSRSISYNQAKVIVRKLIAGLRAWGVQKGDCVAIHSFNDIYYSMLVLAINGAGGVYTGTNPSYTPMELGHHIRASHAKFIISEPEIIAPIQAAMKETGIPESNLLVFDVQGQTVPAGLKSWKGLFSAGEEDWVRFDDLKTCEETAAARLFSSGTTGLPKATTLTHRNFIAQHELVFEIEKRPYQIRRLMALPMFHAAAAPSTHWSPLKGGHVVHVMRRFDLVSFITNVEKYQITDLAVVPPIAVALVMSPQVQERPYLKSVRVASCGAAPLSKEVQEKLRVMLADGAPCTQVWGMTETCCIATRFGAYEQDDTGSVGRLIPNVEAKLVDDDGNNISAYGVRGEICVRGPTVTPGYFENAAANASSFDQDGWYHTGDIAYCDKDTQKWYIVDRKKELIKVRGFQVAPPELEAVLLSHPLIVDAAVIGLSGVLPDSELPRAYVTRRPGTGDKLTEKEVQDYLGQRLAKYKALTGGVRFMDAIPKNASGKILKRVLREEAQKEVKAGFRPKL

SEQ ID NO: 28456 - DNA, 1782 bp, Aspergillus oryzae
  CDS (1)..(1782)
atggcttctacttcttctacagcccagtctcttctcaagaaacatccattacagcggatacacagtccatcccggggcttctctgccttggttcatcatttcacctccagcatgcaatacctcccaacaaaagattacgatatcccgaacatcgacctcctctcattaatatttgattcccccctctcacttaccacggaaaaaaccgttctccacgccgaagccgcaaatccaaccaacaacatcacgaaagcgcaagcccgaaccatcaccaaacgcctcgcgcatgtgttccgtgccgactttgggatcggaaacaatggcgccggaaaggacgcagttctttgtatctcctcgaaccaagtccttcttccagcggtgttctttgccataatcgctgctggaggcgtatacaccgcagcatcgacggcctttacacaatcagaactatctcgtcagatccaacagtcaaaaagtcaattgatcattgctagtccggacagcaaaacgaaagctctgaaagcagcacttgcctgcggaatccccgtggaacgagttctggtcctggagagctcaaatcacaagcatttactacgggatactgttgaccctgagagaaactatctttttcagaatactgaagagctggactgggaacgagtaacagatcgaaacgagctagaaacaagactcatctgccttttgttttcgagcggtactaccgggcccccaaaaggcgtgatgctgtctcacatgaaccttgtttctgaggcaattatcccgcaattggtccttcgcgagtccagaaaggggaaaccgcatcttgaagtcccttatcgaactatcggtcatctgcctaccgcgcacattgcgggctgtcagggatatttcattactcctgccgttgcgggaggtactgtgtactggatgccgaagttcaacattgaccagttcatggattattgtaagaagtaccaggttacgtttctggctactgcgccgccggtctatcttgctgttgcggagagttcacgagtcacggatcaatttaatagtttaatccgagcggaatcgggggccgcgccgttacccacggaggtccagcgacgtgcggaggagaagttgggttgttcaatcagtcaacgctggggaatgactgagtctactgggagcgtgactacgatgccttggggtgaagctgatagcacgggaagtatcagtcctttgcttccgaatacgagactccgcattgtggatgaacaggatagggatgttgaacaaggcatggagggagagatcttggttaaagggcccatggtcactaagggttatttcgagaaccaggaagctactgcagctgctttcgcgcccaacggttggttccgaacaggtgatattggcgtctggaaggatggcaaaatttacatggtggatagaaagaaggaacttataaaatacaaaggacttcaggtctccccggtagaagtagaggcctgtctccttagccatgacggcgtagcagatgctgctgtcattggagtgccagacccatcagcaccggggaatgaactcccccgagcatatatcgtgttagagaacgatagaatcatttctgaggaggaattgaagacccacgtcaagtcaaatatggcccgccataagcaacttcggggtggcgtggtgtttacgaaagaaattccgaaaagctcatccggaaagatacttcgacgactgctgagagatcaggcaagaaagtcggcggagccacgagcgaagatttag

SEQ ID NO: 28457 - protein, 593 aa, Aspergillus oryzae
MASTSSTAQSLLKKHPLQRIHSPSRGFSALVHHFTSSMQYLPTKDYDIPNIDLLSLIFDSPLSLTTEKTVLHAEAANPTNNITKAQARTITKRLAHVFRADFGIGNNGAGKDAVLCISSNQVLLPAVFFAIIAAGGVYTAASTAFTQSELSRQIQQSKSQLIIASPDSKTKALKAALACGIPVERVLVLESSNHKHLLRDTVDPERNYLFQNTEELDWERVTDRNELETRLICLLFSSGTTGPPKGVMLSHMNLVSEAIIPQLVLRESRKGKPHLEVPYRTIGHLPTAHIAGCQGYFITPAVAGGTVYWMPKFNIDQFMDYCKKYQVTFLATAPPVYLAVAESSRVTDQFNSLIRAESGAAPLPTEVQRRAEEKLGCSISQRWGMTESTGSVTTMPWGEADSTGSISPLLPNTRLRIVDEQDRDVEQGMEGEILVKGPMVTKGYFENQEATAAAFAPNGWFRTGDIGVWKDGKIYMVDRKKELIKYKGLQVSPVEVEACLLSHDGVADAAVIGVPDPSAPGNELPRAYIVLENDRIISEEELKTHVKSNMARHKQLRGGVVFTKEIPKSSSGKILRRLLRDQARKSAEPRAKI

SEQ ID NO: 28458 - DNA, 1710 bp, Aspergillus oryzae
  CDS (1)..(1710)
atgtcaggtgcggtatcgaggttgtcgggactcttgggtcattttgtccctggtgcagagcagcgggttaatttccatacgctgtcgccgacatctttcttgcccagggcggcggctattgaacccgaggctgtggccattcatcacgttactgcgaataaccaagttttgagacggacttatgccgagacggcggatcgtgcaaggggtcttgcctattatctgaagaagcatgggttcaagagagtcggtgttctgtgccctaatacgcctgcgtttttggagtcaatctttggaattgcagctgccggagcggtgaatgttgctgtaaattatcggctgaaggaggacgatatcgcttacatatttacgcactctgatgttgaggctattattgttgaccaggagttcctgtcgcttctgcagagttatcgtgcttcaaggcccagtatccctattattgttgatatggatacggatgctaccgaaggcgaattgtccggtccctttgatgaggtggttttggaaggcttgacgtatgacttggatacaggggccaaaggttggcctgggctcgaggcccaggctgcttctgaagatgacgttatcgcccttgcatacaccagcggtacgacggctcggccgaagggtgtcgagtatacccatcgtggctgctatcttgctgcgatgggcaatgtgattgaatctgggcttaattcgcaccgtggtcggtgtcggtatctgtggactttgccaatgttccatgcttgcgggtggacgttcccttgggctgtcacggcagtgcgtggtacccattactgcttgcggaagattgactacccgcaaatctggaagctattgaagcaggagcacatcacgcattttaatgctgctccgacggtgaataccctactctgcaattctaaggaggcagagccgttgcccgagcctgttcatgttacagtcgcggcgagtccgccgacgcctcatctcttcgagcagatgactaacttgaacctgcatcctgtgcatgtatacggcatgacagagacatatgggccgatcacgaaaggctattacctgccggcatgggacaacctgccctcaagtgaaaggtataagaagatggccaggcaaggacatggctttgtgaccagtctacccgtacgagttattaagacggatgttgccgagggcactgttattgatgttgctcgggatggtaaggagataggtgagattgttttcgtcgggaatatctgtgctcggggctactacaaagaccccgacgctacgcggaaactcttcgcgggtggcgttctccactccggagacttggctgtgtggcatgccgatggctcaatccagatccaagaccgggcgaaagacatcattatcagcggcggagagaatatctcatccgtagcgctggagtctatgctggtcacccacccggacatcctcgaggccggagtcgtagccgttcccgacagccattggggagagcgaccaaaggcatttgtgacggtgaagccagggaaattcttgaccggttcagaggtgatcgaatgggcgcgaaatgccagtgatatcagcaagttcatgattcctcgggaggtcgaagtcgtggcggaactgcccaagactagtaccggaaaagtgagaaagaacatcctccgcgactgggctaaaggagcgaaccgatcgtga

SEQ ID NO: 28459 - protein, 569 aa, Aspergillus oryzae
MSGAVSRLSGLLGHFVPGAEQRVNFHTLSPTSFLPRAAAIEPEAVAIHHVTANNQVLRRTYAETADRARGLAYYLKKHGFKRVGVLCPNTPAFLESIFGIAAAGAVNVAVNYRLKEDDIAYIFTHSDVEAIIVDQEFLSLLQSYRASRPSIPIIVDMDTDATEGELSGPFDEVVLEGLTYDLDTGAKGWPGLEAQAASEDDVIALAYTSGTTARPKGVEYTHRGCYLAAMGNVIESGLNSHRGRCRYLWTLPMFHACGWTFPWAVTAVRGTHYCLRKIDYPQIWKLLKQEHITHFNAAPTVNTLLCNSKEAEPLPEPVHVTVAASPPTPHLFEQMTNLNLHPVHVYGMTETYGPITKGYYLPAWDNLPSSERYKKMARQGHGFVTSLPVRVIKTDVAEGTVIDVARDGKEIGEIVFVGNICARGYYKDPDATRKLFAGGVLHSGDLAVWHADGSIQIQDRAKDIIISGGENISSVALESMLVTHPDILEAGVVAVPDSHWGERPKAFVTVKPGKFLTGSEVIEWARNASDISKFMIPREVEVVAELPKTSTGKVRKNILRDWAKGANRS

SEQ ID NO: 28460 - DNA, 1767 bp, Camellia sinensis
  CDS (1)..(1767)
  misc_feature (229)..(229): n is a, g, c or t
atgttgtccggggcttctgctgaaaccccaaaaccggagttctctcctcctccgccgcaaaacccacagtcttcatcttcccaaacccacgttttccgatcaaagcttccccacatacccatctccaaccacctacccctccacacttaccgcttccaaaatctctctcaattcccaaacagaccctgtctcctcatcggctccaccggaaaatcctactccttctccnaaacccacctcgtttcccgcaaagtcgcctccggattatcactcctcggcatcaaaaaaggcgatgtcatcatgcttctcctccaaaactgcgccgaattcgtcttcgcattcatgggtgcttcgatgatcggcgcagtcactaccactgccaacccattctacacttccgccgaagttttcaagcaattcaatgcttccaaatccaagctaatcattacccactctcaatacgtcgacaaactccgtgacgccggtgataatttcccaaactgggcgaaagaattcagtgtaatcacgatcgatgacccacctgaaaactgccttcatttctcagtactttcggaggctaatgagagcgaaatcccgacagtctcgatcgatccagacgaccctgtagctcttccattctcctccggaacgactggattaccaaagggtgtgatcctgacgcacaagagcttgatatcgagcgtggctcaacaagtggatggagagaacccaaatttgcgtttgaaaggggaagatatggtgttgtgcgtgcttcccctgtttcacatatactcgttgaattcggtgctgttgtgctcgctgagagcagggacaggggtgcttttgatgcacaagtttgagataggggcgttgctggagctgatacagaggcacagagtgtcggtggcggcggtggtgcccccgctggttctggcgttggcgaagaatccgatggtggtcactttcgacctgagctccattcggatggtgttgtcgggggcggcgccgctggggaaggagctggaggaggctctccgggccagagtaccgcaagccatttttggtcagggatatgggatgacagaggcagggccagtattatcaatgtgcctggcgtttgcaaagcagccattcccaacaaaatcaggttcatgcggaactgtggtcaggaacgccgagctgaaggtcattgaccctgaaactggctgctcccttggccccaaccactccggcgagatttgcatccgtggtcctcaaattatgaaaggatacttgaatcatgcggaggccacggctacaacaattgatgtggatggttggctccacactggggacattggctatgtagacgacgatgatgaggttattgttgatcgagtcaaggaactcatcaaattcaaaggcttccaggtgccaccagccgagcttgaggcccttcttgtgagccacccatccattgcggatgctgctgttgtcccgcaaaaagatgacgttgccggtgaagttcctgtagcatttgtggttcggtcaaatgggttagaacttacagaagatgctgttaaagaattcatagcaaagcaggtggtgttttacaagaaactgcacaaagtgtactttgttccatgccattcccaaagtctcctttctggaaagatattgagaaaagatctgagagccaaactaggccatgtccgcagcctctcaaattccctagaaactatatatatgtatctgtttgatttccatcttcgtgtaagcattaattag

SEQ ID NO: 28461 - protein, 588 aa, Camellia sinensis
  misc_feature (77)..(77): The Xaa at location 77 stands for Stop, Gln, Glu, or Lys.
MLSGASAETPKPEFSPPPPQNPQSSSSQTHVFRSKLPHIPISNHLPLHTYRFQNLSQFPNRPCLLIGSTGKSYSFSXTHLVSRKVASGLSLLGIKKGDVIMLLLQNCAEFVFAFMGASMIGAVTTTANPFYTSAEVFKQFNASKSKLIITHSQYVDKLRDAGDNFPNWAKEFSVITIDDPPENCLHFSVLSEANESEIPTVSIDPDDPVALPFSSGTTGLPKGVILTHKSLISSVAQQVDGENPNLRLKGEDMVLCVLPLFHIYSLNSVLLCSLRAGTGVLLMHKFEIGALLELIQRHRVSVAAVVPPLVLALAKNPMVVTFDLSSIRMVLSGAAPLGKELEEALRARVPQAIFGQGYGMTEAGPVLSMCLAFAKQPFPTKSGSCGTVVRNAELKVIDPETGCSLGPNHSGEICIRGPQIMKGYLNHAEATATTIDVDGWLHTGDIGYVDDDDEVIVDRVKELIKFKGFQVPPAELEALLVSHPSIADAAVVPQKDDVAGEVPVAFVVRSNGLELTEDAVKEFIAKQVVFYKKLHKVYFVPCHSQSLLSGKILRKDLRAKLGHVRSLSNSLETIYMYLFDFHLRVSIN

SEQ ID NO: 28462 - DNA, 1635 bp, Eucalyptus camaldulensis
  CDS (1)..(1635)
atggaggcgaagccgtcggagcagccccgcgagttcatcttccggtcgaagctccccgacatctacattcccgacaacctctccctccacgcctactgcttcgagaacatctccgagttcgccgaccgcccctgcgtcatcaacggggccaccggccggacctacacctatgccgaggtcgagctgatctcccgccgggtctcagccggcctcaacgggctcggcgtcggccagggcgacgtgatcatgctgctcctccagaactgccctgagttcgtgttcgcattcctcggcgcgtcctaccggggcgccatcagcacgaccgcgaacccgttctacaccccgggagagatcgccaagcaggcctcagctgcccaggccaagatcgtgatcacgcaggccgcgtacgccgacaaggtgaggccgttcgcggaggagaacgggctcagggtcgtgtgcatcgataccgcgccggagggctgcctgcacttctcggaattgatgcaggcggacgagaacgccgcccccgcggcggacgtcaagccggacgacgtcttggcactcccctattcgtcgggcacgacggggctccccaagggggtgatgctcacgcacaggggccaagtgaccagcgtggcgcagcaggtcgacggagacaaccccaacttgtacttccacaaggaggacgtgatcctgtgcacgctcccgttgttccacatatactccctcaactcggtgatgttctgcgcgctccgtgtcggcgccgccatcctgatcatgcagaagttcgagatcatggcgctgatggagctcgtgcagcggtaccgggtgacaatcctgcccatcgtcccgccgatcgtgctggcgatcgccaagagcgccgaggtggaccggtacgacctgtcgtcgatccggaccatcatgtcgggtgcggccccgatggggaaggagctcgaggacaccgtgcgagccaagctgccgaatgccaagctcggacagggctatgggatgacggaggcgggcccggtgctggcaatgtgcctggcatttgcaaaggagccgttcgagatcaagtctggcgcgtgcgggaccgtggtgaggaacgcggagatgaagatcgtcgacccggagacaggggcctcgctcccgcggaaccaggccggcgagatctgcatccggggtcaccagatcatgaaaggttatctgaacgaccccgaagcgaccgcgaataccatagacaaagaagggtggctgcacaccggcgacatcggctacatagacgatgacgacgagctcttcattgtcgatcggttgaaggaactcatcaagtacaagggcttccaggtcgctccggccgaattagaggcaatgctgattgcacacccaagtatctcggatgctgccgttgtgccgatgaaggatgaggttgccagtgaggttcctgttgcattcgtggtgaaatccaatggttccgtaatcactgaggacgaaatcaagcaatacatctcgaagcaggtcgtgttttacaagaggatcaaccgggttttcttcacggacgcaattccgaaagccccctccggcaaaatcttgaggaaggacctaagagcaaagttggcctccggtgtttacaattaa

SEQ ID NO: 28463 - protein, 544 aa, Eucalyptus camaldulensis
MEAKPSEQPREFIFRSKLPDIYIPDNLSLHAYCFENISEFADRPCVINGATGRTYTYAEVELISRRVSAGLNGLGVGQGDVIMLLLQNCPEFVFAFLGASYRGAISTTANPFYTPGEIAKQASAAQAKIVITQAAYADKVRPFAEENGLRVVCIDTAPEGCLHFSELMQADENAAPAADVKPDDVLALPYSSGTTGLPKGVMLTHRGQVTSVAQQVDGDNPNLYFHKEDVILCTLPLFHIYSLNSVMFCALRVGAAILIMQKFEIMALMELVQRYRVTILPIVPPIVLAIAKSAEVDRYDLSSIRTIMSGAAPMGKELEDTVRAKLPNAKLGQGYGMTEAGPVLAMCLAFAKEPFEIKSGACGTVVRNAEMKIVDPETGASLPRNQAGEICIRGHQIMKGYLNDPEATANTIDKEGWLHTGDIGYIDDDDELFIVDRLKELIKYKGFQVAPAELEAMLIAHPSISDAAVVPMKDEVASEVPVAFVVKSNGSVITEDEIKQYISKQVVFYKRINRVFFTDAIPKAPSGKILRKDLRAKLASGVYN

SEQ ID NO: 28464 - DNA, 1758 bp, Lithospermum erythrorhizon
  CDS (1)..(1758)
atgttgtctgtagcttcccctgaaacccaaaagccagagctttcctccattgctgcccccccttcttccaccccccaaaaccaatcctccatttctggagataacaactccaatgaaaccatcatcttcagatccaaactacctgatatacccatctccaataacctccctctccacacatactgcttccagaatgcttctgaataccccaacagaacatgcatcattgatagcaaaactggaaaacaatacactttttctgaaacagattcaatctgcagaaaagttgcagctggattatcaaatcttggcatccaaaaaggagatgtgatcatggtcctcctccaaaactgtgctgaattcgttttcaccttcatgggtgcttccataataggtgcagtcatcaccacaggaaaccccttctacacaactgcagaaatcttcaaacaagtcaacgtctccaacacaaaactcatcattactcaatccaactacgttgacaagctccgtaacaccaccataaacgaatccgacaacaaatatccaaaacttggagaggattttaaggtgatcacaattgatacccccccagaaaactgcctacccttttcactcctcattgaaaacacccaagaaaaccaagttacatcagtttccatcgactcaaacgacccaatagcattaccattttcctcaggcaccacagggttaccaaaaggagtgatcctaacacacaaaagcctcattacaagcgttgcacaacaagtagatggagacaacccaaacttgtacctaaaacatgatgatgtagtactatgtgtacttcctttgttccatatatactccctaaattcagtacttttgtgttcattaagagctggagcagcagtgttgatcatgcagaaatttgagataggggcattgttggaacttatacaaagccaccgtgtatcggtggcggcggtggtgcctccgctagtattggcgttggcaaagaatccaatggtggataaatatgatctgagttcgataagggtggtgttgtcgggggcggcgccgctggggagggagttggaactagcgttacttaatagagtcccacatgccatttttgggcagggttatggcatgactgaagctggaccagtactatcaatgtccccttcatttgcaaagcacccatacccagcaaaatccgggtcatgtggaactgtagttagaaatgcagacctcaaggtgattgaccccgaaaccggttcctccctcggccgaaaccaacctggagaaatttgcattcgtggcgaacagatcatgaaaggctatctcaacgaccccgaggcaactgccaggaccgttgacatcgaggggtggctccataccggtgacattggctatgtggacgacgatgatgaagtgttcattgttgatagggtgaaggaactcatcaaattcaaggggttccaagttccaccagctgagcttgaggctctcctcatttcccaccccaacattgctgatgctgctgttgtaccgcaaaaagatgctgctgctggagaagtccctgttgcttttgtggttccttctaatgatggctttgaattaacagaagaagctgtcaaagaattcatttctaaacaggttgtgttctacaaaaggttgcacaaggtgtactttgtccactctattccaaagtcgccgtccggcaagattttgaggaaagatctcagagccaaactggccgccgccgcctcctcttga

SEQ ID NO: 28465 - protein, 585 aa, Lithospermum erythrorhizon
MLSVASPETQKPELSSIAAPPSSTPQNQSSISGDNNSNETIIFRSKLPDIPISNNLPLHTYCFQNASEYPNRTCIIDSKTGKQYTFSETDSICRKVAAGLSNLGIQKGDVIMVLLQNCAEFVFTFMGASIIGAVITTGNPFYTTAEIFKQVNVSNTKLIITQSNYVDKLRNTTINESDNKYPKLGEDFKVITIDTPPENCLPFSLLIENTQENQVTSVSIDSNDPIALPFSSGTTGLPKGVILTHKSLITSVAQQVDGDNPNLYLKHDDVVLCVLPLFHIYSLNSVLLCSLRAGAAVLIMQKFEIGALLELIQSHRVSVAAVVPPLVLALAKNPMVDKYDLSSIRVVLSGAAPLGRELELALLNRVPHAIFGQGYGMTEAGPVLSMSPSFAKHPYPAKSGSCGTVVRNADLKVIDPETGSSLGRNQPGEICIRGEQIMKGYLNDPEATARTVDIEGWLHTGDIGYVDDDDEVFIVDRVKELIKFKGFQVPPAELEALLISHPNIADAAVVPQKDAAAGEVPVAFVVPSNDGFELTEEAVKEFISKQVVFYKRLHKVYFVHSIPKSPSGKILRKDLRAKLAAAASS

SEQ ID NO: 28466 - DNA, 1629 bp, Nicotiana tabacum
  CDS (1)..(1629)
atggagaaagatacaaaacatggcgatataattttcagatcaaaactccctgatatttacatccctaatcatcttcctttacactcttactgctttgaaaacatttcagagttcagttctcgaccttgtttaatcaatggagccaacaaacaaatttatacgtatgctgatgttgaactcagttcaagaaaagttgctgctggtcttcacaaacaagggatccaacaaaaggatacaatcatgatcctattgcctaactccccagaatttgtgtttgctttcattggtgcatcgtaccttggagctatttctacaatggccaatcctttgtttacggccgctgaggttgtgaagcaagtcaaggcttctggtgctaagatcattgtcacacaagcgtgtcatgttaacaaagtgaaagattatgctttggagaataatgttaagatcatatgcatcgactcggcaccggagggttgtctccacttctccgtgctaactcaggccgatgagcacgatattcctgaggtagaaatccaacccgatgatgtggtggcgttgccctactcctctgggacgactggattacctaaaggagtgatgttgacacacaagggacttgtcacaagcgtggcacaacaagtcgatggtgaaaatcggaatttgtatatccatagcgaggacgtgttgctttgtgtcttgcccttgtttcatatctattccctcaactccgttttgctttgtggattaagggttggagcagcgattttgattatgcagaaatttgatattgttccattcttggagttgatacaaaattacaaggtgacaatagggccgtttgtaccgcctattgtcttggccattgctaagagtcctatggttgatgattatgatctttcatcagtaagaactgtcatgtctggggctgcaccattaggaaaggagcttgaagacactgttcgagccaaatttcctaatgctaaacttggtcagggttatggtatgacagaagctggaccagtgttggcaatgtgcttggcatttgcaaaagaaccctttgaaataaaatcaggggcatgtgggacagttgtgagaaatgctgagatgaaaattgtggatcctgaaactggtaattctcttcccaggaatcagtctggagaaatttgcataagaggagaccaaatcatgaaaggctacctgaatgatccagaggccacagcaagaacaatagacaaagaaggatggttatatacaggtgacattggctatattgatgatgacgacgagctttttattgtggatcgattgaaggagctgattaaatacaaaggatttcaagttgcacctgctgagctcgaagctctccttctcaaccatccaacattttctgatgctgctgttgtccccatgaaagacgaacaagcggaagaagttccagtggcttttgttgttagatccagtggatccaccattactgaagatgaagtcaaggatttcatctcaaagcaggtgatattttataagaggataaagcgggtatttttcgtggatgctgttcctaaatctccatctggcaaaatccttcgaaaagatttgagagctaaactggctgctgggcttccaaattaa

SEQ ID NO: 28467 - protein, 542 aa, Nicotiana tabacum
MEKDTKHGDIIFRSKLPDIYIPNHLPLHSYCFENISEFSSRPCLINGANKQIYTYADVELSSRKVAAGLHKQGIQQKDTIMILLPNSPEFVFAFIGASYLGAISTMANPLFTAAEVVKQVKASGAKIIVTQACHVNKVKDYALENNVKIICIDSAPEGCLHFSVLTQADEHDIPEVEIQPDDVVALPYSSGTTGLPKGVMLTHKGLVTSVAQQVDGENRNLYIHSEDVLLCVLPLFHIYSLNSVLLCGLRVGAAILIMQKFDIVPFLELIQNYKVTIGPFVPPIVLAIAKSPMVDDYDLSSVRTVMSGAAPLGKELEDTVRAKFPNAKLGQGYGMTEAGPVLAMCLAFAKEPFEIKSGACGTVVRNAEMKIVDPETGNSLPRNQSGEICIRGDQIMKGYLNDPEATARTIDKEGWLYTGDIGYIDDDDELFIVDRLKELIKYKGFQVAPAELEALLLNHPTFSDAAVVPMKDEQAEEVPVAFVVRSSGSTITEDEVKDFISKQVIFYKRIKRVFFVDAVPKSPSGKILRKDLRAKLAAGLPN

SEQ ID NO: 28468 - DNA, 1611 bp, Populus tomentosa
  CDS (1)..(1611)
atgaatccacaagaagaattcatctttcgctcaaaattaccagacatctacatcccgaaaaaccttcccctgcattcatacgttcttgaaaacttgtctaaccattcatcaaaaccttgcctgataaatggggcgaatggagatgtctacacctatgctgacgttgagctcacagcaagaagagttgcttctggtcttaacaagattggtattcaacaaggtgacgtgatcatgctcttcctaccaagttcacctgaattcgtgcttgctttcctaggcgcttcacacagaggtgccattatcactgctgccaatcctttctccacccctgcagagctagcaaaacatgccaaggcctcgagagcaaagcttctgataacacaggcttgttactacgagaaggttaaagattttgcccgagaaagtgatgttaaggtcatgtgcgtggactctgccccggatgggtgcttgcacttttcagagctaacacaggcagacgaaaatgaagcgcctcaggtcgacattagtcccgatgatgtcgtagcattgccttattcatcagggactacagggttgccaaaaggggtcatgttaacgcacaaagggctaataaccagtgttgctcaacaggtagatggagacaatcctaacctgtattttcacagtgaagatgtgattctgtgtgtgctgcctatgttccatatctatgctctgaattcaataatgctctgcgggctgagagtcggtgcctcgattttgataatgccaaagtttgagattggttctttactgggattgattgagaagtacaaggtatctatagcaccggttgttccacctgtgatgatgtcaattgctaagtcacctgatcttgacaagcatgacttgtcttctttgaggatgataaaatctggaggggctccattgggcaaggaacttgaagatactgtcagagctaagtttcctcaggctagacttggtcagggatatggaatgaccgaggcaggacctgttctagcaatgtgcttggcatttgccaaggaaccattcgacataaaaccaggtgcatgtgggactgtagtcaggaatgcagagatgaagattgttgacccagaaacaggggcctctctaccgaggaaccagcctggtgagatctgcatccggggtgatcagatcatgaaaggatatcttaatgaccctgaggcaacctcaagaacaatagacaaagaaggatggctgcacacaggcgatatcggctacattgatgatgatgatgagcttttcatcgttgacagattgaaggaattgatcaagtataaagggtttcaggttgctcctgctgaactcgaagctctgttaatagcccatccagagatatccgatgctgctgtagtaggattgaaagatgagaatgcgggagaagttcctgttgcatttgtagtgaaatcagaaaagtctcaggccaccgaagatgaaattaagcagtatatttcaaaacaggtgatattctacaagagaataaaacgagttttcttcattgaagctattcccaaggcaccatctggcaagatcctgaggaagaatctgaaagaaaagttggcgggcatataa

SEQ ID NO: 28469 - protein, 536 aa, Populus tomentosa
MNPQEEFIFRSKLPDIYIPKNLPLHSYVLENLSNHSSKPCLINGANGDVYTYADVELTARRVASGLNKIGIQQGDVIMLFLPSSPEFVLAFLGASHRGAIITAANPFSTPAELAKHAKASRAKLLITQACYYEKVKDFARESDVKVMCVDSAPDGCLHFSELTQADENEAPQVDISPDDVVALPYSSGTTGLPKGVMLTHKGLITSVAQQVDGDNPNLYFHSEDVILCVLPMFHIYALNSIMLCGLRVGASILIMPKFEIGSLLGLIEKYKVSIAPVVPPVMMSIAKSPDLDKHDLSSLRMIKSGGAPLGKELEDTVRAKFPQARLGQGYGMTEAGPVLAMCLAFAKEPFDIKPGACGTVVRNAEMKIVDPETGASLPRNQPGEICIRGDQIMKGYLNDPEATSRTIDKEGWLHTGDIGYIDDDDELFIVDRLKELIKYKGFQVAPAELEALLIAHPEISDAAVVGLKDENAGEVPVAFVVKSEKSQATEDEIKQYISKQVIFYKRIKRVFFIEAIPKAPSGKILRKNLKEKLAGI

SEQ ID NO: 28470 - DNA, 1650 bp, Scutellaria baicalensis
  CDS (1)..(1650)
atggagactgtagaaaaccacggtgacgtcattttccagtcgaagctccccgacatatacatccccaagcacctcccattgcactcttactgcttcgaaaacatctccgagcacaggacgaagccatgtctcatcaacggcgccaccaatgaggtgcacacctacgaggaagtggagctcatctccaggaaggtggcggcggggctgagccacctcggcctccaccacggagacactatcatgatcctcctccccaactcgccggaattcgtcttcgccttcctgggcgcttcctacatcggcgccgtctccaccatggccaatccctttttcacccccgccgaggtcatcaagcaggccaaggcctccaacgccaagctcatcatcacgcaggcatgctacgtcaaaaaagtctgggattacgccgtcgagaacggcgtcaaagttatgtgcgtcgactctccgccgccggaggccgccggtgagtgcctggagttctcccagctgacctccgccgacgagggcgacatgccggaggtggagatcaactccgacgacgtggtggcgctgccgtactcctccggcacgacggggctgccgaaggccgtgatgctcacgcacaaagggctcgtcaccagcgtcgctcagcaagttgacggcgagaaccccaatctgtacattcacagcgacgacgtcatactctgcgttttgcccttgtttcacatttactccttaaactccgttctgctctgcgggttacgggtcggggccgccattctgatcatgcagaaattcgacattgttccctttttggagctgattcagagatacaaagttaccattgggcccttcgtgccgcccattgttttggcaattgtgaagagccccgtggtgggcaattacgacctttcatctatacggacggtgatgtcccgcgcggcgccgctcgggaaggagctggaggaggctgtcagaattaagtttccgaatgccaaacttggccagggatatggaatgacagaagcagggccagtgctagcgatgtgtttggcattcgcaaaagaagggttcgagataaaatcaggtgcatgcgggaccgtcgtaagaaacgctgagatgaaaatcgtcgacatagaaactgctgcctcacttggacgcaatcaacccggcgagatttgcatcagaggagatcagatcatgaaaggctatttgaatgatccggaatcaacagcaaggacaatagataaagaagggtggctacacacaggtgacatagggttcattgatgatgatgatgagctctttattgttgatcgtctcaaggaaataatcaaatacaaagggttccaagttgctccggccgaaatcgaggccctcctcctcaatcacccctccatttccgatgccgccgtggtctcaatgaaagatgaagaagcaggagaagttcctgttgcctttgttgtgaaatcaaatgggtccaccataactgaggatgatatcaagcaatttatatccaaacaggtgattttctacaagagaatacatcgtgtatttttcattgatgccattccaaagaatccatcaggcaaaatattgagaaaggatttgagggcaatattacccacaaaagcagctactctttcaaattga

SEQ ID NO: 28471 - protein, 549 aa, Scutellaria baicalensis
METVENHGDVIFQSKLPDIYIPKHLPLHSYCFENISEHRTKPCLINGATNEVHTYEEVELISRKVAAGLSHLGLHHGDTIMILLPNSPEFVFAFLGASYIGAVSTMANPFFTPAEVIKQAKASNAKLIITQACYVKKVWDYAVENGVKVMCVDSPPPEAAGECLEFSQLTSADEGDMPEVEINSDDVVALPYSSGTTGLPKAVMLTHKGLVTSVAQQVDGENPNLYIHSDDVILCVLPLFHIYSLNSVLLCGLRVGAAILIMQKFDIVPFLELIQRYKVTIGPFVPPIVLAIVKSPVVGNYDLSSIRTVMSRAAPLGKELEEAVRIKFPNAKLGQGYGMTEAGPVLAMCLAFAKEGFEIKSGACGTVVRNAEMKIVDIETAASLGRNQPGEICIRGDQIMKGYLNDPESTARTIDKEGWLHTGDIGFIDDDDELFIVDRLKEIIKYKGFQVAPAEIEALLLNHPSISDAAVVSMKDEEAGEVPVAFVVKSNGSTITEDDIKQFISKQVIFYKRIHRVFFIDAIPKNPSGKILRKDLRAILPTKAATLSN

SEQ ID NO: 28472 - DNA, 1650 bp, Scutellaria baicalensis
  CDS (1)..(1650)
atggagactgtagaaaaccacggtgacgtcattttccagtcgaagctccccgacatatacatccccaagcacctcccattgcactcttactgcttcgaaaacatctccgagcacaggacgaagccatgtctcatcaacggcgccaccaatgaggtgcacacctacgaggaagtggagctcatctccaggaaggtggcggcggggctgagccacctcggcctccaccacggagacactatcatgatcctcctccccaactcgccggaattcgtcttcgccttcctgggcgcttcctacatcggcgccgtctccaccatggccaatccctttttcacccccgccgaggtcatcaagcaggccaaggcctccaacgccaagctcatcatcacgcaggcatgctacgtcaaaaaagtctgggattacgccgtcgagaacggcgtcaaagttatgtgcgtcgactctccgccgccggaggccgccggtgagtgcctggagttctcccagctgacctccgccgacgagggcgacatgccggaggtggagatcaactccgacgacgtggtggcgctgccgtactcctccggcacgacggggctgccgaaggcgttgatgctcacgcacaaagggctcgtcaccagcgtcgctcagcaagttgacggcgagaaccccaatctgtacattcacagcgacgacgtcatactctgcgttttgcccttgtttcacatttactccttaaactccgttctgctctgcgggttacgggtcggggccgccattctgatcatgcagaaattcgacattgttccctttttggagctgattcagagatacaaagttaccattgggcccttcgtgccgcccattgttttggcaattgtgaagagccccgtggtgggcaattacgacctttcatctatacggacggtgatgtccggcgcggcgccgctcgggaaggagctggaggaggctgtcagaattaagtttccgaatgccaaacttggccagggatatggaatgacagaagcagggccagtgctagcgatgtgtttggcattcgcaaaagaagggttcgagataaaatcaggtgcatgcgggaccgttgtaagaaacgctgagatgaaaatcgtcgacatagaaactgctgcctcacttggacgcaatcaacccggcgagatttgcatcagaggagatcagatcatgaaaggctatttgaatgatccggaatcaacagcaaggacaatagctaaagaagggtggctacacacaggtgacatagggttcattgatgatgatgatgagctctttattgttgatcgtctcaaggaaataatcaaatacaaagggttccaagttgctccggccgaaatcgaggccctcctcctcaatcacccctccatttccgatgccgccgtggtctcaatgaaagatgaagaagcaggagaagttcctgttgcctttgttgtgaaatcaaatgggtccaccataactgaggatgatatcaagcaatttatatccaaacaggtgattttctacaagagaatacatcgtgtatttttcattgatgccattccaaagaatccatcaggcaaaatattgagaaaggatttgagggcaatattacccacaaaagcagctactctttcaaattga

SEQ ID NO: 28473 - protein, 549 aa, Scutellaria baicalensis
METVENHGDVIFQSKLPDIYIPKHLPLHSYCFENISEHRTKPCLINGATNEVHTYEEVELISRKVAAGLSHLGLHHGDTIMILLPNSPEFVFAFLGASYIGAVSTMANPFFTPAEVIKQAKASNAKLIITQACYVKKVWDYAVENGVKVMCVDSPPPEAAGECLEFSQLTSADEGDMPEVEINSDDVVALPYSSGTTGLPKALMLTHKGLVTSVAQQVDGENPNLYIHSDDVILCVLPLFHIYSLNSVLLCGLRVGAAILIMQKFDIVPFLELIQRYKVTIGPFVPPIVLAIVKSPVVGNYDLSSIRTVMSGAAPLGKELEEAVRIKFPNAKLGQGYGMTEAGPVLAMCLAFAKEGFEIKSGACGTVVRNAEMKIVDIETAASLGRNQPGEICIRGDQIMKGYLNDPESTARTIAKEGWLHTGDIGFIDDDDELFIVDRLKEIIKYKGFQVAPAEIEALLLNHPSISDAAVVSMKDEEAGEVPVAFVVKSNGSTITEDDIKQFISKQVIFYKRIHRVFFIDAIPKNPSGKILRKDLRAILPTKAATLSN

SEQ ID NO: 28474 - DNA, 1695 bp, Oryza sativa subsp
  CDS (1)..(1695)
atggccgaccgcgcgccgcctccgcctccgccgcccgccgggatcgactccaggagcggcttctgcgcggcgacgcggatcttccacagcacccgcgccccgggcgacctcccgccggagtcgctcccgatgaccgcggcggcctacgccttctccctcctgtcgtcgtcgacgctccccggccgccccgcgctcgtcgacgccgccactggcattgccatctcctacccgtccttcctcgccgccgtccgctccctcgcgggggggctctggtgctccctcggcctccgccccggggacgtcgcgctggttgtcgcgccctcgaggttggaggtccccgtgctcgacttcgcgctcatgtccatcggcgccgtcgtgtcgccggcgaacccggtgtccacgcccgaggagtacgcgcaccaggtcgcgctgtccaggccggtcgtcgcgttcgcggcgcccgaggtggccgccaagctgcccgagcatgtgaggtgcgtcgttatcgggtcggatgagtacgggaggctggcggcgtccgacggccgccgcgcggcggctccggcggcggtggcggtgaagcaatcggacacggcggcggtgctctactcgtcgggcaccacagggcgggtcaaggccgtcgcgatcacgcaccgcaacctcatcgcgctcatgtcgctgcacgccgacaaccgggagaaggtcgcgagggaggccgccgaggccggcgaggagccgccgccgccggcggtgacgctgctccccatccccctgttccacgtgttcgggttcatgatggtgctccgctccgtctccatgggggagacctccgtgctcatggagcggttcgacttcatcgccgcgctgcgcgccatcgagcgctaccgcgtgacgctgctgcccgcggcgccgcccgtgctcgtcgccatggtcaagtacgaggaggcgcgccgccgcgacctctcctccctgctggtcatcggcatcggcggcgctcccctaggccgcgaggtcgccgagcaattcgcttccgtcttccccaacgtggagcttgttcagggctacggtttaaccgaatcgtctggcgcggtggctgccacagtcgggccagaggaatcgaaggcatacggatcggtcgggaagctggggtcgcatttgcaggctaagattgtagatccctccaccggtgaggccctcggaccagggcagcgcggcgagctttgggtcagaggcccaatcgtcatgaaaggcagttacgtgggtgatgatgaggcgaccgcagcaacggttgactcagaaggctggttgaaaacaggtgacctctgctacttcaatgaagatggttttctatacatcgttgatcgactgaaggagttgataaagtacaagggataccaggtacctccagcagaactggagcatattctgcagtcccatcctggaatcgctgatgcggcagttatcccatatccagatgaagaagctggggaactaccaatggctttcatagtaaggcaaccaggttcaaatattaccaaggaacaagtcatggattatgtcgcaaaacaggttgcgccatacaagaaggtgcgacgagtggcttttgtcactgcaataccaaaatcgcctgcagggaagatccttcggcgggagcttgtgcagcaggccctgtcgatgggtgcctccaagctttga

SEQ ID NO: 28475 - protein, 564 aa, Oryza sativa subsp
MADRAPPPPPPPAGIDSRSGFCAATRIFHSTRAPGDLPPESLPMTAAAYAFSLLSSSTLPGRPALVDAATGIAISYPSFLAAVRSLAGGLWCSLGLRPGDVALVVAPSRLEVPVLDFALMSIGAVVSPANPVSTPEEYAHQVALSRPVVAFAAPEVAAKLPEHVRCVVIGSDEYGRLAASDGRRAAAPAAVAVKQSDTAAVLYSSGTTGRVKAVAITHRNLIALMSLHADNREKVAREAAEAGEEPPPPAVTLLPIPLFHVFGFMMVLRSVSMGETSVLMERFDFIAALRAIERYRVTLLPAAPPVLVAMVKYEEARRRDLSSLLVIGIGGAPLGREVAEQFASVFPNVELVQGYGLTESSGAVAATVGPEESKAYGSVGKLGSHLQAKIVDPSTGEALGPGQRGELWVRGPIVMKGSYVGDDEATAATVDSEGWLKTGDLCYFNEDGFLYIVDRLKELIKYKGYQVPPAELEHILQSHPGIADAAVIPYPDEEAGELPMAFIVRQPGSNITKEQVMDYVAKQVAPYKKVRRVAFVTAIPKSPAGKILRRELVQQALSMGASKL

SEQ ID NO: 28476 - DNA, 1611 bp, Streptomyces triostinicus
  CDS (1)..(1611): transl_table=11
atgctcgacggtttcgtcccctggccggaccacctcgcggatgagtaccgccggcggggaatctggctgggccggccgctcggtgacctgctgcacgactcgtgccggcggcacgccgaccgcgtggccgtggtctgcgacgggcacaggatgacctacgcggagctgtcccggcgggccgaccggctggcgggcggcctgatcggactgggcatcagaccgctcgaccgggtggtcgtccacctgcccaacatccccgagttcgtcgtcctggtcttcgctctgctgcgggccggagccatacccgtcctggcgctgcccgggcaccgcaagtccgagatatcccacctgtgcgcccactccggtgcggtggcctatgccgtgaaggacgagttcggcgggttcgactaccgcgaactcgcccgggagatccctccggtccggcacgtcctagtcagcggcgacgcccaggagttcaccgcgctggagtcggtgggcggcgacgacgtccccctgccccgcgtcgacccgtccgatccggcgctgttcctcctctccgggggcaccaccggactgccgaaactgatcccccgggcccatgacgactacgcctacgtcatgcgggccacggcggaggcgatgcacgtgggcgaggaggtggcctacctcgccgtcaatccggtcgcgcaccaggcggcgctcgcctgcccgggggtgttcgggagcctcctgctgggcggcaaggcggtcctgacgtcgagcgtgcggcccgacgaggtgttcccgctgatccgccgcgagcacgtcaccgtgaccacggtcgtgccctccgtgctgcggctgtgggccgactccgggcagaggcccgatctgtcgcacctgctcgtccaggtcggcagcgcgccgctcgacccggcgctcgcccgtcgggcgggagaagtcctcgggtgccggatcatgcgctggtacggcatcagcgagggtctgctgacccacaccaggttcgacgacccggaggacgtgatcatgggcacggacggccggcccatgtcacgggacgacgaggtccggatcgtcgacgagtccctgaaccccgtgcccgagggggaggcgggcgaaatgatcgcacgcggcccgtacacgatccgcggctactaccgggcccccgaggagaacacccgctcgttcacgccggacgggttcttccgcaccggcgacctcgtccggcgcacgcggaggggcgacatcacgatcgtcggacggatcaaggacgtcatcaaccgcgccggtgagaaggtgtcggcggaggaggtggagcggcagctgcgcacccacccgtccgtccaggacgcggccgtggtcggcgtgccggacaccgtgctcggcgagcggacgtacgccttcctcgtgctgaccggtgcgcagatcaggacgtcggcggtgaaggagttcctccgtggctgcggtctggccacgtacaagatccccgaccggatagtgcccctggaccagttgccgcgcaccccgatgggcaaggtggacaagaagacctgcgggcgctcgccgtctcgtcggccaggtgagcgtgccgtgacggcgcggatgccttga

SEQ ID NO: 28477 - protein, 536 aa, Streptomyces triostinicus
MLDGFVPWPDHLADEYRRRGIWLGRPLGDLLHDSCRRHADRVAVVCDGHRMTYAELSRRADRLAGGLIGLGIRPLDRVVVHLPNIPEFVVLVFALLRAGAIPVLALPGHRKSEISHLCAHSGAVAYAVKDEFGGFDYRELAREIPPVRHVLVSGDAQEFTALESVGGDDVPLPRVDPSDPALFLLSGGTTGLPKLIPRAHDDYAYVMRATAEAMHVGEEVAYLAVNPVAHQAALACPGVFGSLLLGGKAVLTSSVRPDEVFPLIRREHVTVTTVVPSVLRLWADSGQRPDLSHLLVQVGSAPLDPALARRAGEVLGCRIMRWYGISEGLLTHTRFDDPEDVIMGTDGRPMSRDDEVRIVDESLNPVPEGEAGEMIARGPYTIRGYYRAPEENTRSFTPDGFFRTGDLVRRTRRGDITIVGRIKDVINRAGEKVSAEEVERQLRTHPSVQDAAVVGVPDTVLGERTYAFLVLTGAQIRTSAVKEFLRGCGLATYKIPDRIVPLDQLPRTPMGKVDKKTCGRSPSRRPGERAVTARMP

SEQ ID NO: 28478 - DNA, 1629 bp, Betula platyphylla
  CDS (1)..(1629)
atggctatccaagcaaaagagcaagaattcattttccggtctaaacttccggacatttacattccaaaacatctccccatccactcctattgcttcgaaaacatatccaaggtcggctcgcgcccgtgtttgatcaatggcttgaccggcaaggtatacacgtattatgatgttgagctcaccgcgcgtaaggtcgcttccggccttagcaagctcggcattcagaagggagatgttgtcatgcttttgctacccaactcgccggaattcgccttcgtattcctcggggcttcttatttaggggccatgaccacggctgccaaccctttctgcacagccggggaggtctcaaagcaagcgaaatcggccaacgcaaaaatcgttgtcacccaagcttgttactacgacagagtgaaggactacacaaatgaaaacggtgttaagattatctgcatcgactcgcccccagaagactgcttgcatttctcggagctaactaaggccgacgagaacgacgtcgccgaggtggatattagccccgacgacgtcgtggcgctgccgtactcttcggggacgactgggttgccaaaaggggtgatgttaacgcacaaagggctggtgactagcgtggctcaacaagtggacggagaaaacccaaacctctattatcacagcgaggacgtgatcctgtgcgttttgccgctgtttcacatttactctctcaactcggtcttcctttgcggcctgcgagcgggtgcttcgattctgatattgcccaagtttgagattgtttcgttgttgcagctgatacagaaacataaggttactgtcatgcccattgtcccgccgattgtgctggccataactaagttcccagatctcgataagtacgacctgtcgtcggtaaagatgctcaagtccggcggagcgccgctggggaaggagattgaagaaactgtgaaagccaagtttcccaatgctctatttggtcagggatacggaatgacagaggcaggtccagttttggcaatgtgcttggcatttgccaaagaaccaatggaggtgaaatcaggagcatgtggtactgttgtgaggaatgcagaaatgaaaattgtcgaccccgaaaccggtgcctctttgccccgaaaccaaccaggagaaatatgcattagaggagatcagatcatgaaaggttatattaatgatccggaagccacggcaagcaccatagacaaagaaggttggttacacaccggcgacattggcttaattgacgacaatgatgagctctttatcgttgaccggttgaaggagctgatcaaatacaaagggttccaggtagcccccgctgagcttgaggccttgttgctcacccacccaaacatctctgatgccgccgtcgtcccaatgaaggacgatctagctggagaggtccctgtggcatttgtggcgagatcaaacgggtctcaagtcacagaggatgaaattaagcagtttgtctctaaacaggtggtgttttataaaagaataagccgcgtatttttcatcgatgtggttcccaagtcaccatcagggaagatattacgcaaggagttgagggcaaaactggcagctggcttttcaaattga

SEQ ID NO: 28479 - protein, 542 aa, Betula platyphylla
MAIQAKEQEFIFRSKLPDIYIPKHLPIHSYCFENISKVGSRPCLINGLTGKVYTYYDVELTARKVASGLSKLGIQKGDVVMLLLPNSPEFAFVFLGASYLGAMTTAANPFCTAGEVSKQAKSANAKIVVTQACYYDRVKDYTNENGVKIICIDSPPEDCLHFSELTKADENDVAEVDISPDDVVALPYSSGTTGLPKGVMLTHKGLVTSVAQQVDGENPNLYYHSEDVILCVLPLFHIYSLNSVFLCGLRAGASILILPKFEIVSLLQLIQKHKVTVMPIVPPIVLAITKFPDLDKYDLSSVKMLKSGGAPLGKEIEETVKAKFPNALFGQGYGMTEAGPVLAMCLAFAKEPMEVKSGACGTVVRNAEMKIVDPETGASLPRNQPGEICIRGDQIMKGYINDPEATASTIDKEGWLHTGDIGLIDDNDELFIVDRLKELIKYKGFQVAPAELEALLLTHPNISDAAVVPMKDDLAGEVPVAFVARSNGSQVTEDEIKQFVSKQVVFYKRISRVFFIDVVPKSPSGKILRKELRAKLAAGFSN

SEQ ID NO: 28480 - DNA, 1623 bp, Salvia miltiorrhiza
  CDS (1)..(1623)
atggaggttcccacgatgccggaagagatcgtattccgatccaagctccccgacatatacattccgaagcatctcccgttacactcatactgcttcgagaacatctccaagttcagctcgcggccgtgcattatcaacggcgcgacgggcgacgtgtacacgtacgaggaggtggagatgacggcgcgcaaggtggcgtcggggctgagccaggtgggcatccagcagggcgagacgatcatgctcctcctccccaacacgcccgagtacatcttcgcattcctcggcgcgtcctacataggcgcggtctccaccatggcgaatcccttcttcaccccggccgaggtgatcaagcaggccaaggcctccgcggccaagctcatcatcacgcaggcgtgctacgtggacaaggtgcgcgactacgcggcggaggccggggcgaaggtggtgtgcatcgacgcgccgccggccgggtgcctgacgttctcggagctgacggcggcggacgagcgggagatgccggcggtgaagatacacccggaggacgcggtggcgctgccgtattcgtcagggacgacggggctgccgaagggggtgatgctgacgcacaaggggctggtgacgagcgtggcgcagcaggtggacggggagaacccgaatttgtatatccatagcgaggacgtgatgctgtgcgtgctgccgctgtttcatatatactcgttgaactcggttttgctgtgcgggctgcgggtcggggcggccatcctcatcatgcagaagttcgagatcgtgccgtttctcgacctcatgcagaggtacaaagtcacgattgggcccttcgtgccgcccatagtgctggccatcgccaagagcccgctcgtcgccaaatacgacctttcctccgtgcggatggtcatgtccggcgccgcgccgctcgggaaggagctcgaggattctgtcaggaccaagtttcctaatgcaaaacttggacaggggtatgggatgactgaagcagggcctgtgctatcgatgtgcctagcgtttgcaaaagagccatttgagataaaatcaggagcatgtggaactgttgttagaaatgctgaaatgaaaatcattgatcctcaaactggtgtttctcttgggcgtaatcaatccggagagatttgcattagaggagaccagattatgaaaggttatctgaacgacccagagtcaacaaagaacaccatagacgaagacgggtggctgcacactggcgacatcggattcattgatgccgacgacgagctcttcatcgtggaccgattgaaggaaattataaaatacaaagggttccaagttgcgccagctgaaatcgaagccctcctcctcaataatccatacatctccgacgctgcagttgtctcaatgcaagatgagcaagctggagaagtcccagttgctttcgtcgtgagatcgaatggttctacaatcactgaggatgaaatcaagcaatttatctcgaaacaggttatcttctacaagagaataaatcgtgtatttttcattgatgcaattcccaagtctccatcaggaaaaatattgagaaaggatttgagagcaagattagcagctgcagtctaa

SEQ ID NO: 28481 - protein, 540 aa, Salvia miltiorrhiza
MEVPTMPEEIVFRSKLPDIYIPKHLPLHSYCFENISKFSSRPCIINGATGDVYTYEEVEMTARKVASGLSQVGIQQGETIMLLLPNTPEYIFAFLGASYIGAVSTMANPFFTPAEVIKQAKASAAKLIITQACYVDKVRDYAAEAGAKVVCIDAPPAGCLTFSELTAADEREMPAVKIHPEDAVALPYSSGTTGLPKGVMLTHKGLVTSVAQQVDGENPNLYIHSEDVMLCVLPLFHIYSLNSVLLCGLRVGAAILIMQKFEIVPFLDLMQRYKVTIGPFVPPIVLAIAKSPLVAKYDLSSVRMVMSGAAPLGKELEDSVRTKFPNAKLGQGYGMTEAGPVLSMCLAFAKEPFEIKSGACGTVVRNAEMKIIDPQTGVSLGRNQSGEICIRGDQIMKGYLNDPESTKNTIDEDGWLHTGDIGFIDADDELFIVDRLKEIIKYKGFQVAPAEIEALLLNNPYISDAAVVSMQDEQAGEVPVAFVVRSNGSTITEDEIKQFISKQVIFYKRINRVFFIDAIPKSPSGKILRKDLRARLAAAV

SEQ ID NO: 28482 - DNA, 1608 bp, Salvia miltiorrhiza
  CDS (1)..(1608)
atggagttgaaacaggaaagcgaacacatcttccgttcaaagcttccagacatcaatatacccacccatctccctctacacacatattgcttccaaaacctctccacccaccgggcccgcccctatctaatcaacgccgccaccggcgataccttcacccatgccggattcgagctcaccgcgcgcagagtcgccgccggcctccacaacctcggcatccgaaaatcggacgtcgtcacgcttctcctccacaactcgcccgaattcgcattcgcatttctcggcgcctccttcatcggcgcgatctccaccaccgccaatcctctctacaccgcatcggagatcgcgcttcaggctagaatctccagacctaagctcatagtcacccacgcttgccacgtggaaaaggtgaagcactacgccgccgaggccggcgccaaaatcgccacgatcgaccccccgccctcgccggagatcatccacttcgccgaactgaggagatccgacgagaagctgctcacgccgatcgagatccacgccgacgacacggtggcgctgccattctcctccggcaccaccggcctccccaagggagtaatgctgagccacaaaaacctagtcgcgtgcgtgtcgcagcaagtggacggcgagaatccggcagttcacatcgatcgtgaggatcggatgctctgcgtgttgccgctgttccacgtgtacagtatgatctcggtgatgctctgctgtctgcgtgtcggtgcggccgtggtgattatgcctaagtttgaaatcagtgagttaatggagttaatagagaaatacagggtgacgattgcaccatttgtgccaccgatattgctggcgattgcgaagagcccggcggcggcgaagttcgatttttcgtcggtgaggagagtcgtctgcggcgcggcgcccatggatagagaacttgagctagcactcaaagcgaagctccctaatgccgttattggccagggttatggtatgacagaagctggagtattatcgatgagcttagggttcgcgaagaggccattaaaattcaaagctggttcatgtggaactgtgattagaaacgcgcggatgaagatcgtggacccctccagcgccgcctctcttcctcggaatgagaccggggagatctgcatcaagggagacgctgtgatgaaagggtattacaatgatccggaggcgacgaggaggactattgatgaggaggggtggctgcacacgggcgatttagggttcgtggacgatgatgaggaagtgtacatcgtcgacaggttgaaggaattgatcaaatacaaaggctttcatattgcccctgctgaacttgaagctttgctcgtcgcacatccctctatatctgaagctgccgttgtgcctatggcggatgaggctgctggagaagttccagttgcatttgtagtgcgagcaaatgctgcatatattaccgagctacagatcaagagatatatagcgaaccaggtggcgccgtacaagcggatcaatcgtgtattttttaccgatacaattcctaaagcccccacgggtaaaattttaagaaaagatctacgagctagactttaa

SEQ ID NO: 28483 - protein, 535 aa, Salvia miltiorrhiza
MELKQESEHIFRSKLPDINIPTHLPLHTYCFQNLSTHRARPYLINAATGDTFTHAGFELTARRVAAGLHNLGIRKSDVVTLLLHNSPEFAFAFLGASFIGAISTTANPLYTASEIALQARISRPKLIVTHACHVEKVKHYAAEAGAKIATIDPPPSPEIIHFAELRRSDEKLLTPIEIHADDTVALPFSSGTTGLPKGVMLSHKNLVACVSQQVDGENPAVHIDREDRMLCVLPLFHVYSMISVMLCCLRVGAAVVIMPKFEISELMELIEKYRVTIAPFVPPILLAIAKSPAAAKFDFSSVRRVVCGAAPMDRELELALKAKLPNAVIGQGYGMTEAGVLSMSLGFAKRPLKFKAGSCGTVIRNARMKIVDPSSAASLPRNETGEICIKGDAVMKGYYNDPEATRRTIDEEGWLHTGDLGFVDDDEEVYIVDRLKELIKYKGFHIAPAELEALLVAHPSISEAAVVPMADEAAGEVPVAFVVRANAAYITELQIKRYIANQVAPYKRINRVFFTDTIPKAPTGKILRKDLRARL

SEQ ID NO: 28484 - DNA, 1662 bp, Agastache rugosa
  CDS (1)..(1662)
atgttgtcggttgcctccgccgaaactcagaatccagagctctcatctcacgctctgcagccccaaactcaatcatgtgaagaaactaatcatatcttcgtctccaaattacccaccattcccatctccaaccacctccctctccacacatactgctttgagaatttctcgcagtaccccgaccggccatgcctcctcgtcggcagcgacggaaaatcctactccttcgccgaaacacacctcatctgccggaaagtcgccgccggcctctccaacctcggaattaggaaaggcgacgtcgtcatggcgcttctccaaaactgcgccgaattcgtcttcactttcatgggagcttcgatgatcggcgcagtcatcaccaccgccaaccctttctgcacctccaaagagatcttcaagcagttcaacgcctccaaatcgaagatgatcgtcacgcaatcgatgtacgtcgacaagctccgcgacacaggcgatgattcccttcgtcttcggcgaggatttctccgtcgtcacgatcgacagcccgccggagaaatgcctgcatttctccgtgctaacggaggccgacgaggccgccgcccccggaggtcgagatcaatcccgacgacgccgtcgcgctgccgttctctcggaaccaccggattgcccaagggagtgattctgactcacaagagcttgatcaccagcatcgcgcagcaggtcgacggcgagaaccctaatttgtacctgaagccggacgacgtcgttctgtgcgttctgccgctgttccacatctactcgttgaattcggtgctgctctgttcgttgagagccggcgcgggggttctgctgatgcagaaattcgagatcggcgcgctgctggagctgattcaactgcaccgcgtctcggtggcggcggtggtgccgccgctggtgctggcgctggcgaagaatccattggtggataatttcgacttgagctcgatccggatggtgctgtcgggggcggcgccgcttgggaaggagctggaggcggcgctgctcagccgtctgccgcaggcggttttcggacagggttacggcatgactgaggccggtccggttttatctatgtctccgtgtttcgcaaaagtgccactaccaaccaagtccgggtcctgtggcaacgtcgtccgcaacgctgagctcaaggtcgtcgaccctgagaccggctgctccctcccccgcaaccaaccgggtgaaatttgcattcgtggaccccagatcatgaaagggtacttaaatgatgccgaggccactgctagaaccgtagacgtcgatggttggctccataccggcgacattgggtatgtggatgaggacgacgacgttttcattgtcgacagagtcaaggaactcatcaaattcaaaggctttcaggtaccaccagctgaactggaggctcttctcatctcacattcccaaatttttgatgctgccgttgtacctcaaaaagacgacgccgctggtgaagttcctgtggcttttgtagttccggcgaatggatcggaactcactgaagaagctgtgaaagaattcgtttccaaacaggttgtgttttacaagagactgcacaaagtgtattttgttcatgccattcccaagtccccatctggcaaaatttga

SEQ ID NO: 28485 - protein, 553 aa, Agastache rugosa
MLSVASAETQNPELSSHALQPQTQSCEETNHIFVSKLPTIPISNHLPLHTYCFENFSQYPDRPCLLVGSDGKSYSFAETHLICRKVAAGLSNLGIRKGDVVMALLQNCAEFVFTFMGASMIGAVITTANPFCTSKEIFKQFNASKSKMIVTQSMYVDKLRDTGDDSLRLRRGFLRRHDRQPAGEMPAFLRANGGRRGRRPRRSRSIPTTPSRCRSLGTTGLPKGVILTHKSLITSIAQQVDGENPNLYLKPDDVVLCVLPLFHIYSLNSVLLCSLRAGAGVLLMQKFEIGALLELIQLHRVSVAAVVPPLVLALAKNPLVDNFDLSSIRMVLSGAAPLGKELEAALLSRLPQAVFGQGYGMTEAGPVLSMSPCFAKVPLPTKSGSCGNVVRNAELKVVDPETGCSLPRNQPGEICIRGPQIMKGYLNDAEATARTVDVDGWLHTGDIGYVDEDDDVFIVDRVKELIKFKGFQVPPAELEALLISHSQIFDAAVVPQKDDAAGEVPVAFVVPANGSELTEEAVKEFVSKQVVFYKRLHKVYFVHAIPKSPSGKI

SEQ ID NO: 28486 - DNA, 1668 bp, Zea mays
  CDS (1)..(1668)
  misc_feature (603)..(603): n is a, g, c or t
atgggttccgtagacgcggcgatcgcggtgccggtgccggcggcggaggagaaggcggtggaggagaaggcgatggtgttccggtccaagcttcccgacatcgagatcgacagcagcatggcgctgcacacctactgcttcgggaagatgggcgaggtggcggagcgggcgtgcctgatcgacgggctgacgggcgcgtcgtacacgtacgcggaggtggagtccctgtcccggcgcgccgcgtcggggctgcgcgccatgggggtgggcaagggcgacgtggtgatgagcctgctccgcaactgccccgagttcgccttcaccttcctgggcgccgcccgcctgggcgccgccaccaccacggccaacccgttctacaccccgcacgaggtgcaccgccaggcggaggcggccggcgcccggctcatcgtgaccgaggcctgcgccgtggagaaggtgcgggagttcgcggcggagcggggcatccccgtggtcaccgtcgacgggcgcttcgacggctgcgtggagttcgccgagctgatcgcggccgaggagctggaggctgacgccgacatccaccccgacgacgtcgtcgcgctgccntactcctccggcaccaccgggctgcccaagggcgtcatgctcacccaccgcagcctcatcaccagcgtcgcgcagcaggttgatggcgagaacccgaacctgtacttccgcaaggacgacgtggtgctgtgcctgctgccgctgttccacatctactcgctgaactcggtgctgctggccggcctgcgcgcgggctccaccatcgtgatcatgcgcaagttcgacctgggcgcgctggttgacctggtgcgcaggtacgtgatcaccatcgcgcccttcgtgccgcccatcgtggtggagatcgccaagagcccccgcgtgaccgccggcgacctcgcgtccatccgcatggtcatgtccggcgccgcgcccatgggcaaggagctccaggacgccttcatggccaagatccccaatgccgtgctcgggcaggggtacgggatgacggaggcaggccccgtgctggcgatgtgcctggccttcgccaaggagccgtacccggtcaagtccgggtcgtgcggcaccgtggtgcggaacgcggagctgaagatcgtcgaccccgacaccggcgccgccctcggccggaaccagcccggcgagatctgcatccgcggggagcagatcatgaaaggttacctgaacgaccccgagtcgacgaagaacaccatcgaccaggacggctggctgcacaccggcgacatcggctacgtggacgacgacgacgagatcttcatcgtcgacaggctcaaggagatcatcaagtacaagggcttccaggtgccgccggcggagctggaggcgctcctcatcacgcacccggagatcaaggacgccgccgtcgtctcaatgaacgacgaccttgctggtgaaatcccggtcgccttcatcgtgcggaccgaaggttctcaagtcaccgaggatgagatcaagcaattcgtcgccaaggaggtggttttctacaagaagatccacaaggtcttcttcaccgaatccatccccaagaacccgtcgggcaagatcctgaggaaggacttgagagccaggctcgccgccggtgttcactga

SEQ ID NO: 28487 - protein, 555 aa, Zea mays
MGSVDAAIAVPVPAAEEKAVEEKAMVFRSKLPDIEIDSSMALHTYCFGKMGEVAERACLIDGLTGASYTYAEVESLSRRAASGLRAMGVGKGDVVMSLLRNCPEFAFTFLGAARLGAATTTANPFYTPHEVHRQAEAAGARLIVTEACAVEKVREFAAERGIPVVTVDGRFDGCVEFAELIAAEELEADADIHPDDVVALPYSSGTTGLPKGVMLTHRSLITSVAQQVDGENPNLYFRKDDVVLCLLPLFHIYSLNSVLLAGLRAGSTIVIMRKFDLGALVDLVRRYVITIAPFVPPIVVEIAKSPRVTAGDLASIRMVMSGAAPMGKELQDAFMAKIPNAVLGQGYGMTEAGPVLAMCLAFAKEPYPVKSGSCGTVVRNAELKIVDPDTGAALGRNQPGEICIRGEQIMKGYLNDPESTKNTIDQDGWLHTGDIGYVDDDDEIFIVDRLKEIIKYKGFQVPPAELEALLITHPEIKDAAVVSMNDDLAGEIPVAFIVRTEGSQVTEDEIKQFVAKEVVFYKKIHKVFFTESIPKNPSGKILRKDLRARLAAGVH

SEQ ID NO: 28488 - DNA, 1626 bp, Allium cepa
  CDS (1)..(1626)
atgggttcaatatcaatggatcaagaaacgatattcaggtcgaaacttccggatatttacatccccgaccatctacctctccactcctactgcttccagcacattcaagagttctccgacaaaccctgcatcatagatggcataactgaaaaggtgtatacttacgcagacgtcgagctaacatcaaaacgtgtggcagtcggtctgcgcgacttgggcatcagaaaaggccatgtcatcatgatcctcctacccaactctccggagttcgccttctccttcctcggagcttcctacctcggcgccatgtccacaacagcgaatccttactacaccccagctgagatcaaaaagcaggcaatgggatccggcgttagggtcataataacagaatcctgctacgtgcccaagatcaaagacttagaacacaacgtaaagatcgtagtcatcgatgagttggtcgatgaacacagtacatgcatccccttttcacaactgtcttccgctgatgaaaggaagctcccggaggtggaaatcagtcctgacgatgtggtggcacttccttattcatcgggaactacagggctaccgaaaggagttatgctgacacatgaaggcttgattacaagcgtggctcagcaggtggatggagagaatccgaatttgtatttcagaagcgacgatgtgcttttgtgtgtattaccgctttttcacatatattcgctgaactcggttttgttgtgtggactgagggcggggtcgacgattttgttgatgaggaagtttgatttgactaaagtggtggagttggttggaaaatacagggtgacgatagcgccatttgtgcctcctatttgtattgaaattgctaagaatgacatggttggaatgtgtaatttgttgaacattaggatggttatgtcgggggcggcacccatggggaaggagttggaggataagttgaaggagaagatgcctaatgccgtacttggccagggttacggaatgactgaagcaggtcctgtaatatcaatgtgtcctggctttgcaaaacatccaactcaagccaaatccggatcatgtggaactatcgttagaaatgcagaactaaaagtgatggatccagaaacaggcttttctcttggccgcaaccttcctggagaaatttgcatccgtggtccccagataatgaaaggttatcttaatgaccctgaggcaacttcttcaactatagacttagaaggttggctacatactggagatattggttatgttgatgatgatgatgaagtattcattgttgacagagttaaggaactgatcaaatttaaagggtttcaggtaccgccggctgagctcgagtctctgcttgttagtcacccttgtattgcagatgcagctgtgattcctcaaaaagatgaagttgccggtgaggttcctgttgcatttgttgttaaagcgagtggttcagacattactgaagacgctgtgaaggaattcatttcaaagcaggtggtgttttacaagagattgcagacggtttattttgttcacgcaattccaaaatctccttcaggaaagatattaaggaaggatctgagagctcgactttcttcgtttacatag

SEQ ID NO: 28489 - protein, 541 aa, Allium cepa
MGSISMDQETIFRSKLPDIYIPDHLPLHSYCFQHIQEFSDKPCIIDGITEKVYTYADVELTSKRVAVGLRDLGIRKGHVIMILLPNSPEFAFSFLGASYLGAMSTTANPYYTPAEIKKQAMGSGVRVIITESCYVPKIKDLEHNVKIVVIDELVDEHSTCIPFSQLSSADERKLPEVEISPDDVVALPYSSGTTGLPKGVMLTHEGLITSVAQQVDGENPNLYFRSDDVLLCVLPLFHIYSLNSVLLCGLRAGSTILLMRKFDLTKVVELVGKYRVTIAPFVPPICIEIAKNDMVGMCNLLNIRMVMSGAAPMGKELEDKLKEKMPNAVLGQGYGMTEAGPVISMCPGFAKHPTQAKSGSCGTIVRNAELKVMDPETGFSLGRNLPGEICIRGPQIMKGYLNDPEATSSTIDLEGWLHTGDIGYVDDDDEVFIVDRVKELIKFKGFQVPPAELESLLVSHPCIADAAVIPQKDEVAGEVPVAFVVKASGSDITEDAVKEFISKQVVFYKRLQTVYFVHAIPKSPSGKILRKDLRARLSSFT

SEQ ID NO: 28490 - DNA, 1587 bp, Streptomyces griseus subsp
  CDS (1)..(1587): transl_table=11
gtgccgttcgacctcgcgcgggtgccggaggtgcccctggacggtctcctgcgccgggccgccgcggcggcgcccgaccgggtcgcggtgcgcaccccgacggggacgacgacgtacgcggaactggacggccgagccgacgactgcgccaggtccttgagccgggcggccggcggaagcggcaccgccgtcgggctggtggcctccctcgacccgtcgttcgcggtcgcctactacggcgccgtgcgcgcggaccacgtcgtcgtgctgatcaacccgcacctgcggggtgacgccctcgcccacgtcctctccgtcgcagggacgacggtggtggtggccccgcccgagttcgccgagcgggtcgcccaggtgcgggggaagctcccgcacctgcgtgacgtcctctccccggacgtgctcgtccagggccgcgcggggcccggcggaaggggccgcgatgccccggggagcgccccgcacctggactcggtggcgtgcgtccagttcaccagcgggaccacgggggaaccgaaggccgttcagctgacacaccgcaacctggtggtcaacgccgcacagatcgcctccgtccacggcctggacggcgacgcggtgaccctcaacaacctgccgctctaccacccgatgcacctcaacgccgcggtgtacgcgggagcgacccaggtgctgtgcccgtcacccgatccggcggaggcgatcgaggccgcgaaccgccaccgcgcgacgcactattacagccttcccgtacggctggcgcacctggcggccgacccccggctgccgggcctccggctggagacggtccgcgcggtcttctccggcggttcggcgctgctgcccgcccaggcccgtaccctggggacgcacttcggcatcccggtcgtgcaggggtacggactggccgagacctccccgctcacacacggcgagccgccggcccggccccggcccggctccgtgggccctgaggtgcccggcaccgaatgccgggtggtggacatggaccggcgcaccccgctcccggccgggcgggacggcgagatccaggtccgtggaccgcagctcatgcgtggctacctcggcgccgccggccccgcggtcgacgccgacggctggttctccaccggtgacatcggccaccgggaccaggacggctacctgtacctggtggaccggatcaaggacgtcttcaagtacgagaactggctggtgtcacccacggagatcgagcaggtcctcatcacgcacccggccgtacgggactgcgcggtggtcgaccacccggaacctttcagcggcgcggtggcccacgccttcgtcgtcctcgacgaggatgccgcactgcccggtccggcggagctcgccgcccatgtgaacgatcaggtcccctactaccagcagatcaagtacctcgacgtggtggaacgcgtcccccgttccccgaacggcaagatcctccgccgcgaactgcgcgcacgtgccgcgcacaccgaccgggccgaccgcctgcaccccggcgcggccggccgtcctcactccgacctcataggagagaacccgtga

SEQ ID NO: 28491 - protein, 528 aa, Streptomyces griseus subsp
MPFDLARVPEVPLDGLLRRAAAAAPDRVAVRTPTGTTTYAELDGRADDCARSLSRAAGGSGTAVGLVASLDPSFAVAYYGAVRADHVVVLINPHLRGDALAHVLSVAGTTVVVAPPEFAERVAQVRGKLPHLRDVLSPDVLVQGRAGPGGRGRDAPGSAPHLDSVACVQFTSGTTGEPKAVQLTHRNLVVNAAQIASVHGLDGDAVTLNNLPLYHPMHLNAAVYAGATQVLCPSPDPAEAIEAANRHRATHYYSLPVRLAHLAADPRLPGLRLETVRAVFSGGSALLPAQARTLGTHFGIPVVQGYGLAETSPLTHGEPPARPRPGSVGPEVPGTECRVVDMDRRTPLPAGRDGEIQVRGPQLMRGYLGAAGPAVDADGWFSTGDIGHRDQDGYLYLVDRIKDVFKYENWLVSPTEIEQVLITHPAVRDCAVVDHPEPFSGAVAHAFVVLDEDAALPGPAELAAHVNDQVPYYQQIKYLDVVERVPRSPNGKILRRELRARAAHTDRADRLHPGAAGRPHSDLIGENP

SEQ ID NO: 28492 - DNA, 1518 bp, Streptomyces thioluteus
  CDS (1)..(1518): transl_table=11
atgctcgttccgctcaccacggccgatttcctcgaccgcgccgaggcaaccgccgccgcccgcaccgcacttgtcgacgagccgcaccagccggccgccgcgctgcccaccagtacgtacggggagacgctgcggcgcgtccgcgcctggcaggccggcctggacgcgctggggatcgacgagggcgaacgggtcgccgtcgtcagccccaactcggcccggctgctggagctcctctacgcggtcacggcgagcggacgcatctgcgtcccggtgaactaccggctcacgcccgaggagatctcctacatcctgcgccagtgcgacgcgtccgtcgtcttcgtcgaccccgacgtcgaggcggtcctgggctcggtcgacgtgccgaagcggttcgtcctcggcgagcagaccgagaccgaggtcatgcggttcgacgtcgccccccgcccctggtcacggcccgacgagaacgcggtcgcgaccctcaactacacctcgggcacctccgcccgccccaagggcgtcgcgctcacccaccgcagcatctggctcaacgcgatgaccttcggcgtccacgcccggatctgggagggggacgtctacctccacaccctgcccacgttccactgcaacggctggggcgtgccgttcctcctcgccgggctcggcgccaagcaggtcctgatccgccggatcgacggcgcggagatcctgcgccgcgtccaggagcacggcgtgacgctggccttcggcgcccccgccgtgtgggacgcggtgctccaggccgcccgcgactggccgggcgagatccccggccgcggccgggtccgcgtggtctgcgcgggagcccccgtcagcgcacagctggtctcccgcatagagaacgaactgggctgggagttcctccaggtctacggcctcaccgagacgacgctgctcaccttcaaccggcgcctgccggacgcccccggggacggcgggctgacgagggccggcgcccccgccctgggcgtgcggctgcgcaccggggagcgcggcgaggtgctggcgcgctccaacatggtgctcgacagctactggcgcgacgagcaggccaatgaagccgcgctggaggacggctggttccgcaccggcgacgtgggcgccttcgacgacgaggggcacctggccctcttcgaccgggtgaaggacgtcatcgtcaccggcggcgagagcgtgtcctcggtggaggtcgaggactgcctccagggccacccctccatcgccgaagtggccgtcatcggcgtcccggacgagcggtggggcgagaccgtcaaggcggtcgtcgtccccgccgacggggcccgggtcaccgaggaagaggtcatcacctactgcaaacagcagctggcccggtacaaggcgcccacgtccgtggacttccgggacgccctgccccggaccagcaacggcaagatccagaagggccggctcagggagccctactgggccggccacgaccggcggatccactga

SEQ ID NO: 28493 - protein, 505 aa, Streptomyces thioluteus
MLVPLTTADFLDRAEATAAARTALVDEPHQPAAALPTSTYGETLRRVRAWQAGLDALGIDEGERVAVVSPNSARLLELLYAVTASGRICVPVNYRLTPEEISYILRQCDASVVFVDPDVEAVLGSVDVPKRFVLGEQTETEVMRFDVAPRPWSRPDENAVATLNYTSGTSARPKGVALTHRSIWLNAMTFGVHARIWEGDVYLHTLPTFHCNGWGVPFLLAGLGAKQVLIRRIDGAEILRRVQEHGVTLAFGAPAVWDAVLQAARDWPGEIPGRGRVRVVCAGAPVSAQLVSRIENELGWEFLQVYGLTETTLLTFNRRLPDAPGDGGLTRAGAPALGVRLRTGERGEVLARSNMVLDSYWRDEQANEAALEDGWFRTGDVGAFDDEGHLALFDRVKDVIVTGGESVSSVEVEDCLQGHPSIAEVAVIGVPDERWGETVKAVVVPADGARVTEEEVITYCKQQLARYKAPTSVDFRDALPRTSNGKIQKGRLREPYWAGHDRRIH

SEQ ID NO: 28494 - DNA, 1656 bp, Nicotiana sylvestris
  CDS (1)..(1656)
atgggaactcgtgcagtagaaagctcacagcagcaagaatgtgaacatattttccggagtagatatcctccggttcaagtaccggacaatgtgaccctcccggattttgtgcttcacaatgtagagttatacactgacaaaatggcatttgtggatgctaccactggcaaaggctacacttatggccaagttgcaagagacataaggaggttcgccaaggccttgagatcccttggcttaaggaaaggacgggtggtggtggtagttcttccaaatgtaccagaatatgctattgttgctcttggaatcatggctgctggtggcgtcttctccggtgcaaatccagcagctcattcatcagaaatcgtgaaacaagttgaatctgctgatggcaagcttattgtctctgatctaccaacctatcacaaggttaaagattgtgggctgccagtaataatactaggtgaagaacatgtagaaggaacaattcattgggatgaattgcttgaagctgcagagcgtgccggttccagaactgatcacataacaaaccatgaagatgaaatggtgcagcaaaatgatttatgtgcactgcccttctcgtcaggcactacggggctgtccaagggagtgatgttaacccacagaaatctagtagcaaacctctgctctacactcttcagtgttagcccagaaatggtaggccaagttacaacactgggtttgataccattcttccacatttatgggataactggaatctgttgtgcaaccattagaaacaaagggaaagtggtagtcttgcgtaggtacgaactgagggcatttctaaatgcactcattacacatgaagtcacatttgcaccaattgtgccacctatcatcttggcacttgttaagaatcctattgtggatgaatttgatctcagcaagcttaagcttagatccatcatgacagcggcagccccacttgcccctgagattcttaatgaatttgaaaagaaatttcccgatgttcaggtccaagaggcatatgggatgactgagcacagctgcattactctttctcatagtgaccagcatactgctaaaagaaattctgttggttttattctacctaatttggaggtaaagttcgttgatcctgataccggtagatctctccccaaaaacaaaccaggcgagatatgtgtcaaaagccaatgtgttatgaagggttactacaaaaatgaatttgagacttgccttaccattgataaggatggatggcttcagactggtgacattggctacattgacgatgatggagatatcttcctagtcgatcgtatcaaagagcttatcaagtacaagggattccaagttgctccagctgagttagaagggatccttctcacacatccttcagtagaagatgctgcagtagttgggctgccagatgaagaagcaggagagataccagtggcatgggtagtcttgaactcaaaagcaaaagaaagcgaagaggacattatcaactacattgcatcgactgttgcacagtataaacgagtgagagtggtgcagttcgttgatagtattccaaaatctccttctggaaaaatactgagaagacttatcaaggataagatgctagagagacttaagaatgcatag

SEQ ID NO: 28495 - protein, 551 aa, Nicotiana sylvestris
MGTRAVESSQQQECEHIFRSRYPPVQVPDNVTLPDFVLHNVELYTDKMAFVDATTGKGYTYGQVARDIRRFAKALRSLGLRKGRVVVVVLPNVPEYAIVALGIMAAGGVFSGANPAAHSSEIVKQVESADGKLIVSDLPTYHKVKDCGLPVIILGEEHVEGTIHWDELLEAAERAGSRTDHITNHEDEMVQQNDLCALPFSSGTTGLSKGVMLTHRNLVANLCSTLFSVSPEMVGQVTTLGLIPFFHIYGITGICCATIRNKGKVVVLRRYELRAFLNALITHEVTFAPIVPPIILALVKNPIVDEFDLSKLKLRSIMTAAAPLAPEILNEFEKKFPDVQVQEAYGMTEHSCITLSHSDQHTAKRNSVGFILPNLEVKFVDPDTGRSLPKNKPGEICVKSQCVMKGYYKNEFETCLTIDKDGWLQTGDIGYIDDDGDIFLVDRIKELIKYKGFQVAPAELEGILLTHPSVEDAAVVGLPDEEAGEIPVAWVVLNSKAKESEEDIINYIASTVAQYKRVRVVQFVDSIPKSPSGKILRRLIKDKMLERLKNA

SEQ ID NO: 28496 - DNA, 1719 bp, Arabidopsis thaliana
  CDS (1)..(1719)
atggataatctagtgttatgtgaagcaaacaatgttcctctaacgcccataacgttcttgaagagagcttcggagtgttatcccaaccgaacttcgataatctacgggcaaactcgcttcacttggcctcagacttatgaccgttgctgtcgtctagctgcttctctcctctctcttaacatcacccgaaacgacgttgtctcgattttggccccaaacgtacctgccatgtacgagatgcactttagcgttcccatgaccggagccgtacttaaccccattaacacccgtcttgacgccaaaaccatagccatcattctccgccacgccgagccaaagatcttatttgtggactacgagtttgctcctttgatccaagaagtcctccgtctcatacccactgaccagtcacaagcgcatccgcggatcatattaattaacgagattgattccactacaaagcctttctccaaggagttagactacgagggtctcatccgaaaaggagaacctacgccatcctcctccgcaagcatgttccgtgtccacaacgagcatgaccctatctccttgaactacacgtcaggtaccacggcagacccaaaaggtgtggtgattagccaccgaggagcctacttgagcgctttgagctccattattggctgggaaatggggattttccctgtctacctctggacactacctatgtttcattgcaatggatggacgcacacgtggtccgtcgctgctcgtggtggtactaatgtatgcatcagacatgtcactgctccagagatctataagaacatagaattgcatggcgtgactcacatgtcatgtgttcctacggtctttaggtttctccttgaaggaagtcgaaccgaccagtcacccaagtcctcgccggttcaggtgttgactggaggttcttctcctccggctgtccttataaagaaagttgagcagctggggtttcacgtgatgcatggctatgggcttacagaggccaccggcccggttctcttttgtgaatggcaagacgagtggaacaaactaccagagcatcaacagatggagctacaacaaaggcaaggtgtaaggaacctaaccctagccgacgttgacgtgaagaacacgaaaactctagagagtgtcccacgcgacgggaagacaatgggagaaattgttattaaaggaagcagtctaatgaaagggtatctaaagaaccctaaagcaacatctgaagcatttaaacacggatggcttaacacgggagacataggtgtgattcatcctgatggatatgtagagatcaaagatcgatccaaagacatcatcatctcgggaggtgagaacataagtagtattgaggtcgagaaagttctttacatgtatcagcaagtgctcgaggccgcggttgtggccatgcctcatcctctatggggtgaaaccccgtgtgcgtttgttgttctaaagaagggtgatgaggaatcggtgactagtgaaggagatctcattaagtattgccgtgagaatatgccgcattttatgtgtccgaaaaaggtggtgttctttcaagagctgccaaagaatagtaacggaaagatcctaaagtctaagttgagagacatcgctaaggcattggtggtcagggaggacgatgccggctccaagaaagttcatcaacgcagtatcgaacacgttagttcgaggctttag

SEQ ID NO: 28497 - protein, 572 aa, Arabidopsis thaliana
MDNLVLCEANNVPLTPITFLKRASECYPNRTSIIYGQTRFTWPQTYDRCCRLAASLLSLNITRNDVVSILAPNVPAMYEMHFSVPMTGAVLNPINTRLDAKTIAIILRHAEPKILFVDYEFAPLIQEVLRLIPTDQSQAHPRIILINEIDSTTKPFSKELDYEGLIRKGEPTPSSSASMFRVHNEHDPISLNYTSGTTADPKGVVISHRGAYLSALSSIIGWEMGIFPVYLWTLPMFHCNGWTHTWSVAARGGTNVCIRHVTAPEIYKNIELHGVTHMSCVPTVFRFLLEGSRTDQSPKSSPVQVLTGGSSPPAVLIKKVEQLGFHVMHGYGLTEATGPVLFCEWQDEWNKLPEHQQMELQQRQGVRNLTLADVDVKNTKTLESVPRDGKTMGEIVIKGSSLMKGYLKNPKATSEAFKHGWLNTGDIGVIHPDGYVEIKDRSKDIIISGGENISSIEVEKVLYMYQQVLEAAVVAMPHPLWGETPCAFVVLKKGDEESVTSEGDLIKYCRENMPHFMCPKKVVFFQELPKNSNGKILKSKLRDIAKALVVREDDAGSKKVHQRSIEHVSSRL

SEQ ID NO: 28498 - DNA, 1737 bp, Arabidopsis thaliana
  CDS (1)..(1737)
atggataatttggcgttatgtgaagcaaacaatgttcctctaactcccataacgttcttgaagagagcttcggagtgttatccgaatcgaacttcgataatatacggaaaaactcgtttcacttggcctcagacctatgaccgttgctgtcgtctagccgcttctctcatatctcttaatatcggcaagaacgatgtggtatccgttgttgctccaaacacaccggccatgtatgagatgcactttgccgttcccatggctggagctgtacttaaccctatcaacactcgtctagacgcaacatccattgccgcaatcctccgccacgccaagcccaagattttattcatagaccgcagttttgagccattggctcgagaaatcctccagttattatcatctgaagactcaaacctaaacttgccggtcatatttatccacgagattgatttccctaaaagggtttcgtccgaggagtcagactacgagtgtctcatccagaggggagagcctacgccctcgttgttggcacgcatgttctgtattcaagacgagcatgatccaatctctttaaactacacatcgggtaccacagccgacccaaaaggtgttgtgattagccaccgaggagcatatttaagcacattaagcgcgattattggttgggaaatggggacatgccctgtctacctttggactctgcctatgtttcattgcaatggatggacgtttacatggggaactgcggcccgtgggggtactagtgtgtgtatgaggcatgtgactgccccggagatctataaaaacatagaaatgcataacgtgacgcatatgtgttgtgttcctacggtttttaacattcttctgaaaggaaattcacttgacctgtcacataggtctgggccggtccatgttcttaccggaggttcaccgcctcccgctgctcttgtcaagaaagttcagcggttggggtttcaagtgatgcatgcctatggtttgaccgaggccactggtccggttctgttttgtgagtggcaagatgagtggaacagattacctgagaatcaacagatggagttaaaagcaaggcaagggctaagcatcttaggcctaactgaagttgacgtgagaaacaaggaaactcaagagagtgttccgcgagatgggaagacgatgggagaaatcgttatgaaaggaagcagcataatgaaaggctatctgaagaatcccaaagctacatatgaagcatttaaacacggatggctcaactcaggagacgtaggtgtgattcatcctgatggacacgtagagatcaaagatcggtccaaagacataatcatatctggaggcgaaaacattagtagtgttgaagtcgagaatattatttataagtacccaaaagtgcttgagactgccgtcgtggccatgcctcaccctacatggggagaaaccccatgtgcatttgttgttctagaaaagggtgagactaataatgaagatcgtgaagataaacttgtgaccaaagagagagatttgattgagtattgccgtgaaaatcttccacattttatgtgtccgagaaaagtggtgtttttggatgaattgcccaaaaacgggaatggaaagatccttaagcctaagctaagagacattgctaaaggtttggttgctgaggatgaggtcaatgttagatctaaagttcaacggccggttgaacactttacttcgcggctttga

SEQ ID NO: 28499 - protein, 578 aa, Arabidopsis thaliana
MDNLALCEANNVPLTPITFLKRASECYPNRTSIIYGKTRFTWPQTYDRCCRLAASLISLNIGKNDVVSVVAPNTPAMYEMHFAVPMAGAVLNPINTRLDATSIAAILRHAKPKILFIDRSFEPLAREILQLLSSEDSNLNLPVIFIHEIDFPKRVSSEESDYECLIQRGEPTPSLLARMFCIQDEHDPISLNYTSGTTADPKGVVISHRGAYLSTLSAIIGWEMGTCPVYLWTLPMFHCNGWTFTWGTAARGGTSVCMRHVTAPEIYKNIEMHNVTHMCCVPTVFNILLKGNSLDLSHRSGPVHVLTGGSPPPAALVKKVQRLGFQVMHAYGLTEATGPVLFCEWQDEWNRLPENQQMELKARQGLSILGLTEVDVRNKETQESVPRDGKTMGEIVMKGSSIMKGYLKNPKATYEAFKHGWLNSGDVGVIHPDGHVEIKDRSKDIIISGGENISSVEVENIIYKYPKVLETAVVAMPHPTWGETPCAFVVLEKGETNNEDREDKLVTKERDLIEYCRENLPHFMCPRKVVFLDELPKNGNGKILKPKLRDIAKGLVAEDEVNVRSKVQRPVEHFTSRL

SEQ ID NO: 28500 - DNA, 1641 bp, Arabidopsis thaliana
  CDS (1)..(1641)
atggcttcagtgaattctcgaagtggtttctgcaactcaaactcaacattctacagcaaacgaacaccaatcccactcccgccaaatccatcactcgacgtcactactttcatttcttcacaagctcatcgtggccgtatcgccttcatcgacgcttccacaggtcaaaacctcaccttcaccgagctatggcgtgccgtggaatccgtcgccgattgtctctccgagatagggattcgcaaaggccacgtcgtcctcctcctctccccaaactcaattttattccccgtcgtttgtctctccgtcatgtcactaggcgcaatcatcaccaccacgaatccactcaacacttcaaacgagatcgctaaacagattaaggattcaaatccagtcctcgccttcaccacatcgcagcttctcccgaaaatctccgccgccgcaaagaagctcccgatcgtgcttatggacgaggaacgagttgactcagtgggtgatgtgagaagattggtggagatgatgaagaaggaaccgagtgggaaccgagtcaaggagcgagttgaccaggatgatacggcgactttgctttactcttcaggaaccacgggaatgagcaaaggagtgatctcgtctcaccgtaacttaatcgcgatggttcaaaccatcgtgaatcgatttggatctgatgatggagagcaacgattcatctgcactgttcctatgtttcacatctacggtttaactgcgttcgctactggattactcgcttacggatctacgatcatcgttctctctaaattcgagatgcacgagatgatgtcagcgattggcaagtatcaagccacgtctttgcctctcgtgcctccgattcttgtggcgatggttaacggtgcagatcagattaaggctaagtatgatttgagctctatgcatactgttttatgcggcggagctccgttgagtaaggaagtgactgaaggattcgcggagaagtatccgacggttaagattttacaaggttatgggttgactgagtcaacgggtataggagcttctacggatactgttgaggaaagtcggagatacggtaccgctgggaaattgtcggcaagtatggaagggaggattgttgatccggttactggtcagattcttggaccgaaacaaaccggtgagctttggctcaagggtccttccataatgaaaggttatttcagcaatgaggaagctacgagttcgactcttgattctgaaggatggttaagaactggagatctttgctatatcgatgaagatggattcatattcgtggttgatcggttaaaggaactgatcaagtacaagggttatcaggttgctccagctgagctagaggctttgttgcttactcatcctgaaatcactgatgctgcagtgatcccgtttccggacaaagaagtggggcaatttccaatggcatacgtcgtaaggaaaactgggagcagcttatcagagaagacaataatggagtttgtagcgaaacaagtagcaccatacaagaggatacgaaaagttgctttcgtatcttcaataccaaagaacccttcaggcaagattctacgcaaagatctcatcaagatagcaacttccaactccaagctttga

SEQ ID NO: 28501 - protein, 546 aa, Arabidopsis thaliana
MASVNSRSGFCNSNSTFYSKRTPIPLPPNPSLDVTTFISSQAHRGRIAFIDASTGQNLTFTELWRAVESVADCLSEIGIRKGHVVLLLSPNSILFPVVCLSVMSLGAIITTTNPLNTSNEIAKQIKDSNPVLAFTTSQLLPKISAAAKKLPIVLMDEERVDSVGDVRRLVEMMKKEPSGNRVKERVDQDDTATLLYSSGTTGMSKGVISSHRNLIAMVQTIVNRFGSDDGEQRFICTVPMFHIYGLTAFATGLLAYGSTIIVLSKFEMHEMMSAIGKYQATSLPLVPPILVAMVNGADQIKAKYDLSSMHTVLCGGAPLSKEVTEGFAEKYPTVKILQGYGLTESTGIGASTDTVEESRRYGTAGKLSASMEGRIVDPVTGQILGPKQTGELWLKGPSIMKGYFSNEEATSSTLDSEGWLRTGDLCYIDEDGFIFVVDRLKELIKYKGYQVAPAELEALLLTHPEITDAAVIPFPDKEVGQFPMAYVVRKTGSSLSEKTIMEFVAKQVAPYKRIRKVAFVSSIPKNPSGKILRKDLIKIATSNSKL

SEQ ID NO: 28502 - DNA, 1698 bp, Arabidopsis thaliana
  CDS (1)..(1698)
atggcggttaagcacggcgtcgacggcgacggcagcgtaatcgaatcgagaactctggcggtagatcgaaaaagcggtttctgcgaatcaacatcgatattctacagcaaacgtgagccaatggctctcccgccaaaccaatttctcgacgtcacgtctttcattgcatcacagcctcatcgcggcaaaaccgtattcgtcgacgccgtaaccggtcgtcaactaagcttccctgagctctggctcggtgtcgaaagagtcgcgggttgtctttacgcattaggtgtacgcaaaggaaatgtcgtcattatactctctccaaactcaatcctcttcccgatcgtctccctctccgtaatgtcactcggcgcaatcataaccaccgctaatccgatcaacacgtccgacgaaatctccaaacagataggcgattcgcgtcctgttctcgccttcaccacatgcaaactcgtctccaaactcgccgccgcgtcgaattttaatctcccggtggttctcatggacgactaccacgttccttcgcaaacttacggtgaccgcgtgaaactagtcgggaggttagagacgatgattgaaacagaaccgagtgagtcacgagttaagcaacgagtcaaccaggacgacacggcggctctgttatactcatcaggtacgacggggacgagtaaaggagtaatgctgagtcaccgtaacctaatcgcattggtacaagcataccgggcccggttcggtttagagcagcgaaccatttgcacaatcccaatgtgtcacatcttcggattcggtggtttcgcgacggggctaatcgcgttaggatggacaatcgttgttcttcctaaattcgacatggctaagcttctctcggcggtggagactcatcgttcttcgtacctttctcttgtaccgccgattgtagtagctatggttaacggagcaaatgagattaattccaagtatgatctgagctcgttgcacactgtggtggctggaggagctccgttgagtagagaggtgacggagaagttcgttgagaattatcccaagtttaagatcctacaagggtatggtttgactgagtcaacggctatagctgcttctatgtttaataaagaggagactaagaggtatggagcttctggcttactggctccgaatgtggaaggtaagattgtggatccggatacgggtcgggttttgggtgtgaatcaaacgggtgagctgtggattcgaagtcctactgtgatgaaaggttatttcaagaataaagaagctactgcttctaccattgattcagaaggatggttgaaaactggagatttgtgttacattgacggtgatgggtttgtctttgttgttgatagattaaaggagctcatcaaatgcaatggttatcaggttgctccagctgaactagaggcattgttgcttgctcatccagagattgctgatgcagcagtaatacccatccctgacatgaaagctgggcaatatccagtggcatatatcgtaagaaaagttggaagtaacttatccgagagcgaaatcatgggatttgtcgcaaaacaggtatcaccgtacaagaagattcgcaaagtcacatttttggcttcaatccccaaaaatccttcgggcaagattttaagaagagaacttacaaagctcacaacttcaaaactctag

SEQ ID NO: 28503 - protein, 565 aa, Arabidopsis thaliana
MAVKHGVDGDGSVIESRTLAVDRKSGFCESTSIFYSKREPMALPPNQFLDVTSFIASQPHRGKTVFVDAVTGRQLSFPELWLGVERVAGCLYALGVRKGNVVIILSPNSILFPIVSLSVMSLGAIITTANPINTSDEISKQIGDSRPVLAFTTCKLVSKLAAASNFNLPVVLMDDYHVPSQTYGDRVKLVGRLETMIETEPSESRVKQRVNQDDTAALLYSSGTTGTSKGVMLSHRNLIALVQAYRARFGLEQRTICTIPMCHIFGFGGFATGLIALGWTIVVLPKFDMAKLLSAVETHRSSYLSLVPPIVVAMVNGANEINSKYDLSSLHTVVAGGAPLSREVTEKFVENYPKFKILQGYGLTESTAIAASMFNKEETKRYGASGLLAPNVEGKIVDPDTGRVLGVNQTGELWIRSPTVMKGYFKNKEATASTIDSEGWLKTGDLCYIDGDGFVFVVDRLKELIKCNGYQVAPAELEALLLAHPEIADAAVIPIPDMKAGQYPVAYIVRKVGSNLSESEIMGFVAKQVSPYKKIRKVTFLASIPKNPSGKILRRELTKLTTSKL

SEQ ID NO: 28504 - DNA, 1737 bp, Podospora anserina
  CDS (1)..(1737)
atgtctgccgtacaaaatcccgtcgaagaggccgttgtcctcccacaacctcagaggctgtcccttctcaagggcccaacagatcctcctcttgtcgacctcaccctcggagaactcctcaaccttcagtgtctgcaccacggaaacagagagggaattgtgattccatggacaggagcgagatggacctacaacgagctcaatcaccacagtcggctgctggccgccgcccttctagagatgggcatcggtgttggtgacagagtcggcatcatggctggcaactgcgaacaatatgctgctgttttcttcgccgccaccaggataggagccattctcgtcatcatgaacaacacttatacccctactgaggccttgtacggtctcgacttctcggaatgcaaggttttcttcaccaccaagaagattggccgtctcgatcaaggcccactactcacacaacttgctgccagagcgactggccccaaggttgtgatccttcgcggtgattccgagggttacccaatctacaaggagcttctcacccaaggagccagggtagatcccgagcgccttcatcatgctgagagcaaggtgcttcctcaccttgtttgcaacctccagttcaccagcggcacaaccggtcttcccaaagctgcaatgctcactcatcacaacattgtcaacaactccaggttcatcggagaccgcatgagactcacacacaacgacgttctctgctgcccgcctcctctgttccactgcttcggtctggtgcttggcctcatggccgtcatcactcacggtggaaagatcatctaccctgccgaggtgttcgacgcacctgctaccctccgcaccatcattggggaacagtgcaccgctgttcatggcgtccccgccatgttcgacagtcttttggctcttcccgaagccaagaatctcaaggcggccgacctccgactccgcaccggcatcgtggccggcgcccccgtccctcgccacctgatggagctcatggtctccaagctcggcatgaaggagttcacatccagctacggtctcaccgaggcctctcccacttgcttcaacgctttcaccgacgaccccatcgacacccgtctcaccaccgttggcactctgatgcctcacgcccgagccaagattgtggaccgcgacggtgtgattgtgcccattggcacccggggtgagctctgcatcggcgggtaccagctccaggccggctactggaacaactcggaaaagaccaacgactgcatgatgaaggacgaggccggcgtcttgtggctgcacaccggtgacgaggccgtctttgacgagcgtggatactgcaccattaccggtcggttcaaggacatcatcattcgaggaggggagaacatctacccgctcgagattgaggaacggctggtcgcccacccgtccatctccatggctgtggttgtcgggctgaaggatgcacactatggcgaggttgtcggtgcgtttcttcagcttgaccctgctcacactgctagcacgaagcccactgttgaggaggtgcgtgagtggtgtaggcggaagctggggaagcacaaggcgcccactcatgtgttttggctgggccacgatggggttcctgctgcggtgccattgacggggagtggaaaggtgagaaagttcgagatggctcagttggggaataagttgcttgagggtgtcaaggcgaagctttga

SEQ ID NO: 28505 - protein, 578 aa, Podospora anserina
MSAVQNPVEEAVVLPQPQRLSLLKGPTDPPLVDLTLGELLNLQCLHHGNREGIVIPWTGARWTYNELNHHSRLLAAALLEMGIGVGDRVGIMAGNCEQYAAVFFAATRIGAILVIMNNTYTPTEALYGLDFSECKVFFTTKKIGRLDQGPLLTQLAARATGPKVVILRGDSEGYPIYKELLTQGARVDPERLHHAESKVLPHLVCNLQFTSGTTGLPKAAMLTHHNIVNNSRFIGDRMRLTHNDVLCCPPPLFHCFGLVLGLMAVITHGGKIIYPAEVFDAPATLRTIIGEQCTAVHGVPAMFDSLLALPEAKNLKAADLRLRTGIVAGAPVPRHLMELMVSKLGMKEFTSSYGLTEASPTCFNAFTDDPIDTRLTTVGTLMPHARAKIVDRDGVIVPIGTRGELCIGGYQLQAGYWNNSEKTNDCMMKDEAGVLWLHTGDEAVFDERGYCTITGRFKDIIIRGGENIYPLEIEERLVAHPSISMAVVVGLKDAHYGEVVGAFLQLDPAHTASTKPTVEEVREWCRRKLGKHKAPTHVFWLGHDGVPAAVPLTGSGKVRKFEMAQLGNKLLEGVKAKL

SEQ ID NO: 28506 - DNA, 1629 bp, Arabidopsis thaliana
  CDS (1)..(1629)
atggaagagccaagtgccgctaactcgttaccattgacactgttaggctttcttgagagagcagccaccgtgtatggagactgtacctccatcgtttacggcaattccaccgtgtacacatggcgagaaacgaatcaccgttgcctctgcgtcgcgtctgctctgtcttccattggaataggaagatccgacgttgtctctgtcctatctgctaatactccggaaatgtacgagctccagttttccgttccgatgtctggcgcgatccttaacaacatcaatacccgcctcgacgcgcgaaccgtctctgttcttctccgccattgcgagtctaagctgctcttcgtcgacttcttttactccgatctcgctgtcgaagcgatcacgatgttgctcaatccgccgattctcgtcctaatcgccaatgaggaggaggaagaaggaggagctgaagtaacggagcgttcaaaattctgttacttgtacagtgatctaatcactagagggaatccggattttaaatggatccgacccggaagtgaatgggacccgattgtggtcaattacacatcaggtacgacgtcgtctcctaaaggagtggttcattgccacaggggtatattcgtcatgacgcttgattccctaaccgattgggccgtaccgaaaaccccggtttacttatggaccttaccgatatttcacgccaacggttggacctatccatggggaatcgccgccgtcggaggaactaacgtctgtgtgcgtaaactccacgcgccgtcaatataccatctaatccgtgatcacggcgtgactcacatgtacggcgcaccaatagtgcttcagattctatcggcgagtcaagaatctgatcagcctcttaagagtccggtcaatttcttaaccgccggttcttctccgccagctacggtgcttctccgcgccgagtctctaggtttcatcgtcagtcacggttacggattaacggagacagccggtgtgatcgtctcctgcgcgtggaagccaaactggaatcggttaccggcgagtgatcaagcgcaattgaaatcacggcaaggagtgagaaccgtcggatttagcgaaatcgatgtagtggatccagaatcaggtcggagcgtggagagagacggagaaacagtcggagaaatagtgttgagagggagttcaatcatgctcggatacttaaaaaatccgatcggaactcaaaattcgtttaaaaacgggtggttcttcaccggagacctcggtgtgattcacggggatggttacttagagattaaagatagatcgaaagatgtgattatttcaggaggagagaatgtgagtagtgtggaagtggaggcggtgttgtacacgaatccggcggtgaatgaagcggcggtggtggctagacctgacgagttttggggagagacgccgtgtgcttttgttagtttaaaacccgggttgacccggaaaccaacggataaggagattatagagtattgcaaatataaaatgccacgttacatggctcctaaaacggtctcgtttcttgaagagttaccaaagacttccactgggaagattataaagtcattgcttaaagagattgccaaaaacatgtaa

SEQ ID NO: 28507 - protein, 542 aa, Arabidopsis thaliana
MEEPSAANSLPLTLLGFLERAATVYGDCTSIVYGNSTVYTWRETNHRCLCVASALSSIGIGRSDVVSVLSANTPEMYELQFSVPMSGAILNNINTRLDARTVSVLLRHCESKLLFVDFFYSDLAVEAITMLLNPPILVLIANEEEEEGGAEVTERSKFCYLYSDLITRGNPDFKWIRPGSEWDPIVVNYTSGTTSSPKGVVHCHRGIFVMTLDSLTDWAVPKTPVYLWTLPIFHANGWTYPWGIAAVGGTNVCVRKLHAPSIYHLIRDHGVTHMYGAPIVLQILSASQESDQPLKSPVNFLTAGSSPPATVLLRAESLGFIVSHGYGLTETAGVIVSCAWKPNWNRLPASDQAQLKSRQGVRTVGFSEIDVVDPESGRSVERDGETVGEIVLRGSSIMLGYLKNPIGTQNSFKNGWFFTGDLGVIHGDGYLEIKDRSKDVIISGGENVSSVEVEAVLYTNPAVNEAAVVARPDEFWGETPCAFVSLKPGLTRKPTDKEIIEYCKYKMPRYMAPKTVSFLEELPKTSTGKIIKSLLKEIAKNM

SEQ ID NO: 28508 - DNA, 1638 bp, Arabidopsis thaliana
  CDS (1)..(1638)
atggaacttttactcccacacgcttcaaactcatgtcctctcactgttcttggcttcttagaacgagccgcctctgtcttcggcgactctccttcactcctccacacaaccactgttcatacttggtctgaaactcattctcgatgtctccgtatagcttcaactctctcttccgcttccctcggaatcaaccgcggccaagttgtctctgttattggtccaaacgtcccatctgtctacgagcttcagttcgcagttccgatgtcaggcgcagtcctcaacaacatcaacccacgtttagacgctcatgcactctccgtccttctacgtcacagcgaatccaagctcgtgtttgttgaccatcacttaagctctttagtcctcgaagctgtctcgtttttgcccaaggatgagagacctcgtctcgtcatactcaacgacggaaacgacatgccatcatcttcatcagctgatatggattttcttgacacgtacgaagggtttatggagagaggagacctgaggttcaagtgggtacgtcctaaaagcgagtggactccaatggtgcttaactacacctcaggaactacgtcgtccccaaagggagtggtgcatagccacagatcggttttcatgagcactattaactctttgctagactggtctttgcctaaccgtccggtatacctgtggacactgccgatgttccatgccaatggttggagctacacatgggccacagcagctgtgggagccagaaacatctgtgtcacaagagttgatgtgccgactattttcaacttgatcgacaagtatcaagtgacccacatgtgcgctgcgccaatggttctcaacatgttgactaatcacccagcccagaaaccgcttcagagcccagttaaggttatgactgctggagctccaccaccagctacagtcatctccaaggctgaggcgcttggtttcgacgtgagtcacggttacgggatgacagaaacaggcggtctggttgtctcgtgcgcattgaagcctgagtgggatcgtctagaaccagacgagagagcaaaacagaaatcaaggcaaggaattagaactgcagtattcgcggaagtcgatgttagagacccaatatccgggaagagcgtgaagcatgatggagcaactgtgggagagatcgtcttcagaggcggttcggtcatgctaggttattacaaagacccagaaggcaccgcagcaagtatgagagaagacggatggttctacaccggagacattggagtaatgcacccagacggttacttggaagtcaaagacagatcaaaggatgtggtcatttgcggaggagagaacatcagcagcacggaactcgaggcagttctgtacacaaaccccgcaattaaggaagcagctgtggtagctaagccagacaagatgtggggagaaactccatgtgcatttgtcagcctgaagtatcatgacgggtctgtgactgagagagagatacgggagttttgtaaaaccaagctgccaaagtatatggttccaaggaatgtggttttcctggaagagcttccaaagacttctactggaaagattcaaaagtttcttctcagacaaatggctaagtccttgccttga

SEQ ID NO: 28509 - protein, 545 aa, Arabidopsis thaliana
MELLLPHASNSCPLTVLGFLERAASVFGDSPSLLHTTTVHTWSETHSRCLRIASTLSSASLGINRGQVVSVIGPNVPSVYELQFAVPMSGAVLNNINPRLDAHALSVLLRHSESKLVFVDHHLSSLVLEAVSFLPKDERPRLVILNDGNDMPSSSSADMDFLDTYEGFMERGDLRFKWVRPKSEWTPMVLNYTSGTTSSPKGVVHSHRSVFMSTINSLLDWSLPNRPVYLWTLPMFHANGWSYTWATAAVGARNICVTRVDVPTIFNLIDKYQVTHMCAAPMVLNMLTNHPAQKPLQSPVKVMTAGAPPPATVISKAEALGFDVSHGYGMTETGGLVVSCALKPEWDRLEPDERAKQKSRQGIRTAVFAEVDVRDPISGKSVKHDGATVGEIVFRGGSVMLGYYKDPEGTAASMREDGWFYTGDIGVMHPDGYLEVKDRSKDVVICGGENISSTELEAVLYTNPAIKEAAVVAKPDKMWGETPCAFVSLKYHDGSVTEREIREFCKTKLPKYMVPRNVVFLEELPKTSTGKIQKFLLRQMAKSLP

SEQ ID NO: 28510 - DNA, 1665 bp, Arabidopsis thaliana
  CDS (1)..(1665)
atggagggaactatcaaatctccggccaactacgttcctctcactccgatcagcttcctcgatagatctgctgtcgtctacgctgacagagtctccatcgtttatggctccgtcaagtacacgtggcgccagactcgtgaccgctgcgtcagaatcgcctccgctctctcccagctcggaatctctaccggagatgtggtttcagtgttggctccaaacgttccagctatggttgaattgcattttggtgttcctatggctggagctttgctctgtacactcaacattcgtcatgattcatcacttgttgctgtcttgcttagacattcagggacaaaagtgatttttgcagatcatcagtttctccaaatagctgaaggagcttgtgaaatcctctcaaataaaggtgacaaggtcccgattttggtcttgatcccagagcctcttactcaatctgtttcaaggaagaagagatctgaggaaatgatggaatacgaagatgttgtagcgatggggaaatcggacttcgaggttatacgaccaacagatgagtgtgatgctatatctgttaattacacaagcggtaccacttcaagccccaaaggtgttgtttatagtcacagaggtgcttatttgaattctctggctgcggttttactcaacgaaatgcactcctcgcctacttatctatggactaatcccatgtttcactgcaatggctggtgcttattgtggggtgttactgctattggtgggactaatatatgtttgaggaatgttacggccaaggctatatttgataatatttcccagcataaggtgactcatatgggaggtgcgccgacgatattgaatatgatcatcaatgcgcctgaatctgagcagaaaccgcttcccgggaaggtgtcttttataaccggtgctgcaccgccaccagctcatgtgattttcaagatggaagagttggggttttctatgtttcattcctatgggttaactgaaacttatggaccaggcacaatctgtacatggaagcctgagtgggactctttgcctagagaagaacaggcgaaaatgaaagctcgacaaggcgtgaatcatttagggctcgaggaaatacaagttaaagaccctgtaaccatgagaactttgccagctgatggtgtgactatgggtgaagttgtcttcagaggaaacacggtgatgaatggttacttaaagaaccctgaagcaaccaaggaagcttttaaaggaggttggttttggagtggcgacttaggtgttaaacaccctgacggatacatagagctgaaagacagatcgaaagacattataatctctggaggagaaaacattagctcgattgaagtcgagtctactctgttcactcacccttgtgttcttgaagcagctgtagttgcgaggcctgatgagtattggggtgagactgcttgtgcatttgtgaaacttaaagacgggtctaaggccagtgcggaggagcttattagctattgcagggaccggcttccacattatatggctccgaggagtattgtgtttgaggatcttcctaaaacatcgactggaaaagtccagaagtttgttctgaggaccaaggctaaggctttggtaagcttatcaaagaaaggcagaagcaagttatga

SEQ ID NO: 28511 - protein, 554 aa, Arabidopsis thaliana
MEGTIKSPANYVPLTPISFLDRSAVVYADRVSIVYGSVKYTWRQTRDRCVRIASALSQLGISTGDVVSVLAPNVPAMVELHFGVPMAGALLCTLNIRHDSSLVAVLLRHSGTKVIFADHQFLQIAEGACEILSNKGDKVPILVLIPEPLTQSVSRKKRSEEMMEYEDVVAMGKSDFEVIRPTDECDAISVNYTSGTTSSPKGVVYSHRGAYLNSLAAVLLNEMHSSPTYLWTNPMFHCNGWCLLWGVTAIGGTNICLRNVTAKAIFDNISQHKVTHMGGAPTILNMIINAPESEQKPLPGKVSFITGAAPPPAHVIFKMEELGFSMFHSYGLTETYGPGTICTWKPEWDSLPREEQAKMKARQGVNHLGLEEIQVKDPVTMRTLPADGVTMGEVVFRGNTVMNGYLKNPEATKEAFKGGWFWSGDLGVKHPDGYIELKDRSKDIIISGGENISSIEVESTLFTHPCVLEAAVVARPDEYWGETACAFVKLKDGSKASAEELISYCRDRLPHYMAPRSIVFEDLPKTSTGKVQKFVLRTKAKALVSLSKKGRSKL

SEQ ID NO: 28512 - DNA, 1656 bp, Streptomyces virginiae
  CDS (1)..(1656): transl_table=11
atgctggatggatgcgtgccgtggccccctgatgccgccgagcgctaccgcgaggccgggtactggcgcggtgagacgctcggtgccctgctgcgcggttgggccgagaggtacggggaccgggtcgccctggtgggtgacgacggcacccgggtgacgtaccgcgaactggacatgtggtgcgaccggctggccgccggttttgccgggcagggtgtggcgccgcgcgagcgcgtgctggtgcagctgccgaacaccccgtcgttcgtggcggtctgtttcgccctgttccggctgggcgcggtgccggttttcgcgctgccgtcgtacgcagtgcggagctgcggcacctggcggagctgtccggtgcggtcgcgatggtggatcccggacgaggtcagggggttcgaccaccgtgcgctcgtgcgcgacctgctgccggagctcccgcgcgtggcccgggtcttcgtggcgggcgatccgggcggagaggaggacggcctggtcgcgctggcggccctggagcaggatccggtcgcactgcccgagccggacgcctccgacgtcgcgttcttcctgttgtccggcggtacgaccgcgctgccgaagatgatcccccgcacccacgacgactacgcgtaccagacccggatcaccgccgggatctgcgaactcggcgaggacaccgtctacctggcggtgctgccggtggagttcaacttcccgtggggttgtcccggcatcatcggcgtactgggcgtcggcggccgggtggtgttcgcgccggacccgaccccgcagacctgcttcccgctgatcgagcgggagcgggtcaccatgacctcggtcatcccgaccatcgtgcacctgtggctggacgcggccgggcgcaccggccacgacctgtccagcctggacgtcgtacaggtaggcagttccaagctgcacgacgaggtcgccgcccggatcgagcccgagctcggggtgcggctccagcaggtgttcggcatggcggaggggctgctgaccttcacccgctacgacgacccgcggcaggtcgtcctgaccacccagggccggccggtgtcgccggccgacgagatccgggtggtggacggcgacgaccgcgaggtgccggacggtacggtcggcgagctgctgacccggggcccgtacacgctgcgcggctactaccgtgctccggagcacaacgcctcggcattcaccgcggacgggttctaccgcagcggtgacctggtccgcaggacccccaccggtgagatcgtggtcgagggccgggtcaaggacgtggtgatccgcggcggcgacaaggtgtccgcgacggaggtcgagggccatctgacggcgcacccgggcgtgcagcaggccgcggtggtcgcgaagcccgaccgcgtactgggcgaaaagatctgcgcctacgtggttgccgaccgggacgggccggcgcccactctgccgggagtgcgccggctcctgcgcgcccgcggcctggccgacttcaaactgccggaccgactggaggtggtggaggtcttcccgctgaccggtctgaacaaggtggacaagaaggtcctcgcggcccgggccgggctcctgcacagtggtggcggtgcgggccgaggagatgcgcggtga

SEQ ID NO: 28513 - protein, 551 aa, Streptomyces virginiae
MLDGCVPWPPDAAERYREAGYWRGETLGALLRGWAERYGDRVALVGDDGTRVTYRELDMWCDRLAAGFAGQGVAPRERVLVQLPNTPSFVAVCFALFRLGAVPVFALPSYAVRSCGTWRSCPVRSRWWIPDEVRGFDHRALVRDLLPELPRVARVFVAGDPGGEEDGLVALAALEQDPVALPEPDASDVAFFLLSGGTTALPKMIPRTHDDYAYQTRITAGICELGEDTVYLAVLPVEFNFPWGCPGIIGVLGVGGRVVFAPDPTPQTCFPLIERERVTMTSVIPTIVHLWLDAAGRTGHDLSSLDVVQVGSSKLHDEVAARIEPELGVRLQQVFGMAEGLLTFTRYDDPRQVVLTTQGRPVSPADEIRVVDGDDREVPDGTVGELLTRGPYTLRGYYRAPEHNASAFTADGFYRSGDLVRRTPTGEIVVEGRVKDVVIRGGDKVSATEVEGHLTAHPGVQQAAVVAKPDRVLGEKICAYVVADRDGPAPTLPGVRRLLRARGLADFKLPDRLEVVEVFPLTGLNKVDKKVLAARAGLLHSGGGAGRGDAR

SEQ ID NO: 28514 - DNA, 1641 bp, Glycine max
  CDS (1)..(1641)
atggcaccttctccacaagaaatcatcttccgatccccactccccgatattccgatccccacacatctcccattgtactcttactgcttccaaaacttgtcacagttccatgaccgtccatgcctcatcgacggcgacaccggcgagaccctcacctacgccgacgtcgacctcgctgctcgccgcatcgcctccggcctccacaaaatcggcatccgccagggtgacgtcatcatgctcgtcctacgcaactgcccgcagttcgccctcgccttcctcggcgccacccaccgtggcgccgtcgtcaccacagccaaccccttctacacgccggcggagcttgcgaagcaagcgacggccacgaaaaccaggctcgtcataacgcaatccgcgtacgtagagaaaatcaagagtttcgcggacagcagcagcgatgtcatggtgatgtgcattgatgatgatttttcttatgaaaacgacggcgttttgcatttctcaacgctcagtaacgccgacgaaacggaagcccctgccgttaagattaaccctgacgagctcgttgcgcttccgttttcttctggcacgtctgggctccccaagggcgttatgttatcgcataaaaacttggtcaccacgatagcgcagttagttgacggcgaaaacccgcaccaatacactcacagcgaggatgtgctactctgtgtgttgcctatgtttcatatctatgcgctcaattccattttgctctgcgggattcgttccggtgcggccgtgcttattttgcagaagtttgagatcactactctgttggagctcatcgagaagtacaaggtgacggttgcgtcgtttgtgccgcccatcgttttggcgttggttaagagcggagagactcatcgctacgacctgtcgtctattcgcgctgtggtcaccggcgcggcacccttaggaggggaacttcaagaagccgttaaggctaggctaccacacgctacttttggacagggatatgggatgacagaagcaggaccacttgccattagcatggcatttgcaaaagtaccctctaagattaaaccaggtgcatgcggaaccgttgtgagaaacgccgagatgaaaatcgtggatacagaaacgggtgattcacttccaagaaacaaacacggtgaaatttgcataataggcacaaaggtcatgaaaggatatctaaatgacccagaggctacagagagaactgtagacaaagaaggatggttacacacaggagatattggtttcattgatgatgatgatgaactcttcattgttgatcggttaaaggaattgatcaaatacaaaggattccaagtggctcctgctgagcttgaagcattgttgattgcccacccaaacatttctgatgctgccgttgtaggcatgaaagatgaagctgcaggggaaattccagttgcatttgttgtaaggtcaaatggttctgagatagccgaggatgaaatcaagaaatacatttcacaacaggtggttttttacaagagaatatgtagagttttcttcacggactctattcctaaagcaccctcaggcaaaattctgcgaaaggtattaactgcaagacttaacgaaggtttggtggtggccaattag

SEQ ID NO: 28515 - protein, 546 aa, Glycine max
MAPSPQEIIFRSPLPDIPIPTHLPLYSYCFQNLSQFHDRPCLIDGDTGETLTYADVDLAARRIASGLHKIGIRQGDVIMLVLRNCPQFALAFLGATHRGAVVTTANPFYTPAELAKQATATKTRLVITQSAYVEKIKSFADSSSDVMVMCIDDDFSYENDGVLHFSTLSNADETEAPAVKINPDELVALPFSSGTSGLPKGVMLSHKNLVTTIAQLVDGENPHQYTHSEDVLLCVLPMFHIYALNSILLCGIRSGAAVLILQKFEITTLLELIEKYKVTVASFVPPIVLALVKSGETHRYDLSSIRAVVTGAAPLGGELQEAVKARLPHATFGQGYGMTEAGPLAISMAFAKVPSKIKPGACGTVVRNAEMKIVDTETGDSLPRNKHGEICIIGTKVMKGYLNDPEATERTVDKEGWLHTGDIGFIDDDDELFIVDRLKELIKYKGFQVAPAELEALLIAHPNISDAAVVGMKDEAAGEIPVAFVVRSNGSEIAEDEIKKYISQQVVFYKRICRVFFTDSIPKAPSGKILRKVLTARLNEGLVVAN

SEQ ID NO: 28516 - DNA, 1644 bp, Glycine max
  CDS (1)..(1644)
atggctgatgatggaagcaggagggaattgatattcaggtcgaagcttccggatatctacatccccaaacatatgcccctccactcttactgcttcgagaatttgagagagtgtggttcacgcccctgcctgatcaatgcccccacgggagacgtctacagctaccacgaggtggacagcaccgccagaaaggtggcgagggggctgaagaaagagggcgtggaacagggccaggtcatcatgatcctcctccccaattgccccgaattcgtcttctcgtttcttggcgcatcccaccgcggtgccatggccactgccgccaaccctttcttcacccccgccgagattgcaaagcaagcccatgcctccaatgccaagctcctcatcacccaggcctcttactacgacaaagtcaaggacctccgcgacatcaagctcgtattcgtcgactcttgtcccccccatacagaggagaagcagcatctccatttctcacatctgtgtgaggataacggtgacgctgatgttgatgttgatgttgatatcaagcccgatgacgtggttgcattgccttattcttcgggaacaactggtcttcccaagggagtgatgctgagccacaaggggctggtgaccagcattgctcagcaggttgacggtgataatcccaacctctattaccactgccacgacaccatcctctgcgtgcttcccctctttcacatttactctctcaactccgttcttctctgtggcttgcgtgccaaggctaccattctcctcatgcccaagttcgatattaactccttgcttgctctcattcacaagcacaaagtcactattgcccctgtcgtccctcccattgttctcgccatttccaaatcacccgatctccacaagtacgacctgtcttccatcagagtcttgaagtccgggggagcccctctgggtaaggaactcgaagacactctcagagctaaattccccaacgccaaacttggccagggatacggaatgactgaggcagggcctgtgctaacaatgtctttagcttttgctaaagaaccgatagacgtgaaaccaggtgcatgtggaaccgttgtaagaaatgcagagatgaagattgtcgatcctgaaaccggtcattctttacccagaaaccaatccggtgaaatttgcataagaggcgaccagattatgaaaggttatctaaatgatggagaggctacagagagaaccatagacaaagatggttggttgcacacaggtgacatcggttacatcgacgatgacgatgagttattcatcgttgacaggctcaaggaattgatcaaatacaaaggatttcaagtggctccagctgaacttgaagcccttcttctcactcatcctaagatctctgatgctgctgttgttccaatgaaggatgaagccgcgggagaggtacctgttgcatttgtggtcatatcaaatggttataccgacacaaccgaggatgaaattaagcagtttatctccaaacaggtggtgttttacaaaagaataaaccgagtattcttcattgatgcaattcccaagtcaccgtcaggcaaaatcttgcgcaaggatctaagagcaaagatagcggcaagtgttccaaaatga

SEQ ID NO: 28517 - protein, 547 aa, Glycine max
MADDGSRRELIFRSKLPDIYIPKHMPLHSYCFENLRECGSRPCLINAPTGDVYSYHEVDSTARKVARGLKKEGVEQGQVIMILLPNCPEFVFSFLGASHRGAMATAANPFFTPAEIAKQAHASNAKLLITQASYYDKVKDLRDIKLVFVDSCPPHTEEKQHLHFSHLCEDNGDADVDVDVDIKPDDVVALPYSSGTTGLPKGVMLSHKGLVTSIAQQVDGDNPNLYYHCHDTILCVLPLFHIYSLNSVLLCGLRAKATILLMPKFDINSLLALIHKHKVTIAPVVPPIVLAISKSPDLHKYDLSSIRVLKSGGAPLGKELEDTLRAKFPNAKLGQGYGMTEAGPVLTMSLAFAKEPIDVKPGACGTVVRNAEMKIVDPETGHSLPRNQSGEICIRGDQIMKGYLNDGEATERTIDKDGWLHTGDIGYIDDDDELFIVDRLKELIKYKGFQVAPAELEALLLTHPKISDAAVVPMKDEAAGEVPVAFVVISNGYTDTTEDEIKQFISKQVVFYKRINRVFFIDAIPKSPSGKILRKDLRAKIAASVPK

SEQ ID NO: 28518 - DNA, 1713 bp, Glycine max
  CDS (1)..(1713)
atgacaacggtagctgcttctcttgatgccaaagaggtgtctacctccaaaactgaccaaaaccaagtgtgtgactgtgatccccaaactagccatgtcttcaaatcaaaattaccagatatcccaatctccaaccacctccctctccacgcttactgctttcagaaactatcccaattctccgaccgcccatgcctcatcgtcggacccgccgccaaaacctacacctactccgagacacacctcatttcacgcaagattgccgccggattgtccaacctcggaatccgcaagggcgacgtggtcatgatccttctccagaactccgccgagttcgtcttctccttcctcgctgcctccatgatcggcgccgtcgccaccacagccaatccgttctacaccgccgcggagatcttcaagcagtttaccgtctccaagacgaagctgatcataacgcaggcaatgtacgtggacaagcttcgcaaccacgacgacggcgcgaagctcggcgaggacttcaaggttgtgaccgtcgacgacccgccggaaaattgcctccacttctcggtgctctcggaggcgaacgagagcgacgcgccggaggttgatatccaacccgacgacgcggtggcgatgccgttctcttccggcacgacgggtttacctaaaggagtggttctcacgcacaagagtttaacaaccagtgtggcgcaacaagttgacggagagaaccctaacctctacctcaccaccgaggacgtgctcctatgcgtgcttccgttgtttcacatattctccctcaacagtgtgcttttgtgcgcgcttagggccgggagtgcggttttgttgatgcagaagttcgagattgggacgctgttggagctcatacagcggcaccgcgtgtcggtggcgatggtggtgccgccgctggtgctggcgttggcgaagaatccgatggtggcggattttgacctgagttcaatacggttagtgctgtcgggagctgctcccttggggaaggagctcgtggaagctctccggaacagggtgcctcaagccgttttgggacaggggtacgggatgacagaagcaggaccagtgctgtccatgtgcttgggctttgcaaagcaacctttcccaacaaaatcaggctcttgtggtaccgtagtcagaaatgcagaactcagggttgttgaccctgaaactggtcgttctcttggctacaatcaacccggtgaaatttgcatcagagggcaacagatcatgaaaggatatctgaacgatgagaaagcgacagcattgaccatagattcagagggttggcttcacaccggtgatgttggctatgtagatgaagatgatgaaattttcattgttgacagggtgaaagaactcatcaaatataaaggcttccaggtgccccctgcagaacttgaagggcttcttgtaagccatccctccattgcagacgcagctgtagtcccacaaaaggatgttgctgctggtgaagttcctgttgccttcgttgtgagatcaaacggctttgatctaactgaagaggctgtaaaagagtttatagctaaacaggtagtgttttacaaaagactgcacaaagtttattttgtacatgctattcccaagtctccatcaggaaagatattaaggaaagacctcagagcaaagctagaaaccgccgccactcagacgccttaa

SEQ ID NO: 28519 - protein, 570 aa, Glycine max
MTTVAASLDAKEVSTSKTDQNQVCDCDPQTSHVFKSKLPDIPISNHLPLHAYCFQKLSQFSDRPCLIVGPAAKTYTYSETHLISRKIAAGLSNLGIRKGDVVMILLQNSAEFVFSFLAASMIGAVATTANPFYTAAEIFKQFTVSKTKLIITQAMYVDKLRNHDDGAKLGEDFKVVTVDDPPENCLHFSVLSEANESDAPEVDIQPDDAVAMPFSSGTTGLPKGVVLTHKSLTTSVAQQVDGENPNLYLTTEDVLLCVLPLFHIFSLNSVLLCALRAGSAVLLMQKFEIGTLLELIQRHRVSVAMVVPPLVLALAKNPMVADFDLSSIRLVLSGAAPLGKELVEALRNRVPQAVLGQGYGMTEAGPVLSMCLGFAKQPFPTKSGSCGTVVRNAELRVVDPETGRSLGYNQPGEICIRGQQIMKGYLNDEKATALTIDSEGWLHTGDVGYVDEDDEIFIVDRVKELIKYKGFQVPPAELEGLLVSHPSIADAAVVPQKDVAAGEVPVAFVVRSNGFDLTEEAVKEFIAKQVVFYKRLHKVYFVHAIPKSPSGKILRKDLRAKLETAATQTP

SEQ ID NO: 28520 - DNA, 1611 bp, Populus tomentosa
  CDS (1)..(1611)
atgaatccacaagaagaattcatctttcgctcaaaattaccagacatctacatcccgaaaaaccttcccctgcattcatacgttcttgaaaacttgtctaaacattcatcaaaaccttgcctgataaatggcgcgaatggagatgtctacacctgtgctgacgttgagctcacagcaagaagagttgcttctggtctcaacaagattggtattcaacaaggtgacgtgatcatgctcttcctaccaagttcacctgaattcgtgcttgctttcctaggcgcttcacacagaggtgccatcaccactgctgccaatcctttctccacccctgcagagctagcgaaacatgccaaggcctcgagagcaaagcttctgataacacaggcttgttactacgagaaggttaaagattttgccagagaaagtgatgttaaggtcatgtgcgtggactctgccccggatgggtgcttgcacttctcagagctaacacaggcagacgaaaatgaagcgcctcaggtcgacattagtcctgatgatgtcgtggcattgccttattcatcagggactacagggttgccaaaaggggtcatgttaacgcacaaagggctaataaccagtgtggctcaacaggtagatggagacaatcctaacctgtattttcacagtgaagatgtgattctgtgtgtgctccctatgttccatatctatgctctgaattcaataatgctgtgtgggctgagagtcggtgcctcgattttgataatgccaaagtttgagattggtactttgctgggattgattgagaagtacaaggtatctatagcaccggttgttccacctgtgatgttggcaattgctaggtcacctgatcttgacaagcatgacttgtcttctctgaggatgataaaatctggaggggctccattgggcaaggaacttgaagatactgtcagagctaagtttcctcaggctagacttggtcagggatatggaatgaccgaggcaggacctgttctagcaatgtgcttggcatttgccaaggaaccattcgacataaaaccaggtgcatgtgggactgtagtcaggaatgcagagatgaagattgttgacccagaaacaggggcctctctaccgaggaaccagcctggtgagatctgcatccggggtgatcagatcatgaaaggatatcttaatgaccctgaggcaacctcaagaacaatagacaaagaaggatggttgcacacaggcgatatcggctacattgatgatgatgatgagcttttcatcgttgacaggttgaaggaattgatcaagtataaagggtttcaggttgctcctgctgaactcgaagctttgttaatagcccatccagagatatccgatgctgctgtagtaggaatgaaagatgaggatgcaggagaagttcctgttgcatttgctgtgaaatcagaaaagtctcaggccaccgaagatgaaattaagcagtatatttcaaaacaggtgatattctacaagagaataaaacgagttttcttcattgaagctattcccaaggcaccatctggcaagatcctgaggaagaatctgaaagagaagttgccaggcatataa

SEQ ID NO: 28521 - protein, 536 aa, Populus tomentosa
MNPQEEFIFRSKLPDIYIPKNLPLHSYVLENLSKHSSKPCLINGANGDVYTCADVELTARRVASGLNKIGIQQGDVIMLFLPSSPEFVLAFLGASHRGAITTAANPFSTPAELAKHAKASRAKLLITQACYYEKVKDFARESDVKVMCVDSAPDGCLHFSELTQADENEAPQVDISPDDVVALPYSSGTTGLPKGVMLTHKGLITSVAQQVDGDNPNLYFHSEDVILCVLPMFHIYALNSIMLCGLRVGASILIMPKFEIGTLLGLIEKYKVSIAPVVPPVMLAIARSPDLDKHDLSSLRMIKSGGAPLGKELEDTVRAKFPQARLGQGYGMTEAGPVLAMCLAFAKEPFDIKPGACGTVVRNAEMKIVDPETGASLPRNQPGEICIRGDQIMKGYLNDPEATSRTIDKEGWLHTGDIGYIDDDDELFIVDRLKELIKYKGFQVAPAELEALLIAHPEISDAAVVGMKDEDAGEVPVAFAVKSEKSQATEDEIKQYISKQVIFYKRIKRVFFIEAIPKAPSGKILRKNLKEKLPGI

SEQ ID NO: 28522 - DNA, 1623 bp, Amorpha fruticosa
  CDS (1)..(1623)
atggcatttgagacagaagaaccaaaggaattcatcttcaggtcaaaattaccagaaatcccaatctccaaacaccttccccttcactcttactgctttgagaacctctcagaattcgggtcacgtccatgcttgatcagtgccccaacaggggacgtgtacacctactatgacgtggaactcaccgctagaagagttgcctctggactcaacaaattgggtgtccaacaaggtgatgtcatcatgctccttcttcctaattcaccagaatttgtgttctccttcttgggtgcctcttaccgtggtgccatgatcactgctgccaacccattcttcacatccgctgagattgcaaaacaggccaaagcctccaacaccaagttgcttataacacaagcttcttactacgacaaggttaaggatttggatgtgaagttggtgttcgtggactctccccctgatgggcacatgcactattcagagctgcgtgaggctgatgagagtgacatgcctgaggtgaagaccaaccctgatgatgtggtggcacttccctattcgtcagggacaacagggttgcccaaaggggtgatgttatctcacaaagggttggcgaccagcatagcacaacaagttgatggggaaaaccccaacctctactttcacaatgaggatgtcatattgtgtgtgcttccactctttcatatatattctctcaattctgttctgttgtgtgggttgagagccaaggctgctattttgctgatgccaaagtttgagatcaatgccttgttgggtctcattcagaaacaccgagtaacaattgcccctattgtcccacccattgttttggccattgccaagtcaccggatcttgaaaagtatgatctctcttccattagggtgttgaaatctggaggggcttctctgggcaaagaactcgaagacactgtgagggctaaattccccaaggccaaacttggacagggatacggaatgactgaggcagggccagtgctaacaatgtgcttagcatttgctaaggaaccgatagatgtaaaaccaggtgcatgtggaaccgttgtaagaaatgcagagatgaagattgtggatcctgaaactggtaattcgttgccacgaaaccagtccggtgaaatttgcataagaggcgaccagatcatgaaaggttatctaaatgatcaagaggctacgcagagaaccatagacaaagaagggtggttgcatacaggtgacatcggctacatcgacgatgacgatgagttattcatcgttgacaggcttaaggaattgatcaaatacaaaggatttcaggtggctcctgctgaactcgaagcccttcttctctctcatcccaagatcaccgatgctgctgtggttccaatgaaggatgaagcagctggagaggtacctgttgcatttgtggtgagatcaaatggtcacacagacacaaccgaggatgaaattaagcagtttatctccaaacaggtggtgttttataaaagaataagcagagtattcttcattgatgcaattcccaagtcaccgtcaggtaaaatcttacgaaaggatctaagagcaaagcttgcagcaggtgttccaaattga

SEQ ID NO: 28523 - protein, 540 aa, Amorpha fruticosa
MAFETEEPKEFIFRSKLPEIPISKHLPLHSYCFENLSEFGSRPCLISAPTGDVYTYYDVELTARRVASGLNKLGVQQGDVIMLLLPNSPEFVFSFLGASYRGAMITAANPFFTSAEIAKQAKASNTKLLITQASYYDKVKDLDVKLVFVDSPPDGHMHYSELREADESDMPEVKTNPDDVVALPYSSGTTGLPKGVMLSHKGLATSIAQQVDGENPNLYFHNEDVILCVLPLFHIYSLNSVLLCGLRAKAAILLMPKFEINALLGLIQKHRVTIAPIVPPIVLAIAKSPDLEKYDLSSIRVLKSGGASLGKELEDTVRAKFPKAKLGQGYGMTEAGPVLTMCLAFAKEPIDVKPGACGTVVRNAEMKIVDPETGNSLPRNQSGEICIRGDQIMKGYLNDQEATQRTIDKEGWLHTGDIGYIDDDDELFIVDRLKELIKYKGFQVAPAELEALLLSHPKITDAAVVPMKDEAAGEVPVAFVVRSNGHTDTTEDEIKQFISKQVVFYKRISRVFFIDAIPKSPSGKILRKDLRAKLAAGVPN

SEQ ID NO: 28524 - DNA, 1611 bp, Populus tomentosa
  CDS (1)..(1611)
atgaatccacaagaagaattcatctttcgctcaaaattaccagacatctacatcccgaaaaaccttcccctgcattcatacgttcttgaaaacttgtctaaccattcatcaaaaccttgcctgataaatggcgcgaatggagatgtctacacctatgctgacgttgagctcacagcaagaagagttgcttctggtctgaacaagattggtattcaacaaggtgacgtgatcatgctcttcctaccaagttcacctgaattcgtgcttgctttcctaggcgcttcacacagaggtgccattatcactgctgccaatcctttctccacccctgcagagctagcaaaacatgccaaggcctcgagagcaaagcttctgataacacaggcttgttactacgagaaggttaaagattttgcccgagaaagtgatgttaaggtcatgtgcgtggactctgccccggatgggtgcttgcacttttcagagctaacacaggcagacgaaaatgaagcgcctcaggtcgacattagtcccgatgatgtcgtagcattgccttattcatcagggactacagggttgccaaaaggggtcatgttaacgcacaaagggctaataaccagtgttgctcaacaggtagatggagacaatcctaacctgtattttcacagtgaagatgtgattctgtgtgtgctgcctatgttccatatctatgctctgaattcaataatgctctgcgggctgagagtcggtgcctcgattttgataatgccaaagtttgagattggttctttactgggattgattgagaagtacaaggtatctatagcaccggttgttccacctgtgatgatgtcaattgctaagtcacctgatcttgacaagcatgacttgtcttctttgaggatgataaaatctggaggggctccattgggcaaggaacttgaagatactgtcagagctaagtttcctcaggctagacttggtcagggatatggaatgaccgaggcaggacctgttctagcaatgtgcttggcatttgccaaggaaccattcgacataaaaccaggtgcatgtgggactgtagtcaggaatgcagagatgaagattgttgacccagaaacaggggcctctctaccgaggaaccagcctggtgagatctgcatccggggtgatcagatcatgaaaggatatcttaatgaccctgaggcaacctcaagaacaatagacaaagaaggatggctgcacacaggcgatatcggctacattgatgatgatgatgagcttttcatcgttgacagattgaaggaattgatcaagtataaagggtttcaggttgctcctgctgaactcgaagctttgttaatagcccatccagagatatccgatgctgctgtagtaggattgaaagatgaggatgcgggagaagttcctgttgcatttgtagtgaaatcagaaaagtctcaggccaccgaagatgaaattaagcagtatatttcaaaacaggtgatattctacaagagaataaaacgagttttcttcattgaagctattcccaaggcaccatctggcaagatcctgaggaagaatctgaaagaaaagttggcaggcatataa

SEQ ID NO: 28525 - protein, 536 aa, Populus tomentosa
MNPQEEFIFRSKLPDIYIPKNLPLHSYVLENLSNHSSKPCLINGANGDVYTYADVELTARRVASGLNKIGIQQGDVIMLFLPSSPEFVLAFLGASHRGAIITAANPFSTPAELAKHAKASRAKLLITQACYYEKVKDFARESDVKVMCVDSAPDGCLHFSELTQADENEAPQVDISPDDVVALPYSSGTTGLPKGVMLTHKGLITSVAQQVDGDNPNLYFHSEDVILCVLPMFHIYALNSIMLCGLRVGASILIMPKFEIGSLLGLIEKYKVSIAPVVPPVMMSIAKSPDLDKHDLSSLRMIKSGGAPLGKELEDTVRAKFPQARLGQGYGMTEAGPVLAMCLAFAKEPFDIKPGACGTVVRNAEMKIVDPETGASLPRNQPGEICIRGDQIMKGYLNDPEATSRTIDKEGWLHTGDIGYIDDDDELFIVDRLKELIKYKGFQVAPAELEALLIAHPEISDAAVVGLKDEDAGEVPVAFVVKSEKSQATEDEIKQYISKQVIFYKRIKRVFFIEAIPKAPSGKILRKNLKEKLAGI

SEQ ID NO: 28526 - DNA, 1572 bp, Capsicum annuum
  CDS (1)..(1572)
atggagtgtttgacgctaactggattcttgaaacatgtggctgaaaagtaccctagtcatcgtgcgatttccgtttccggcaggctcgatatcactcatgcacgccttcaacaactcgttgaacgtgccgcttctcagattgtagctgccggtgtaaagcctggcgatgtcgtcgctctcactttccccaacacaatcgagttcgtgatcatgtttttagctgtaattcgagctcgagctacagcagcgccactgaattcagcgtacatggcagaagaattcgagttttatttatctgattcagaatcgaaactcttattaactgcaaaagaaggaaacgaagcagctcaagctgctgcctccaagctaaaaatccctcgtattagtgtaactctctctcaacccgactctgatgtcgctttctccccagctccacccgaatcggaccttgaatcgatgtccaaaatcgttaacgaaccatcagatgttggacttttccttcatacatcaggcaccactagcaggccaaaaggtgttcctctggctcagctgaatttgttgtcttcagtaaacaatatcaaatcggtgtacaaactgagtgacacggattctactgtgattgtgttgccgttgtttcacgttcacgggttaattgcggggttactgagctcacttggagccggagcagccgtgacacttccagctgcagggagattttcagcttcgactttttggtcagacatgaaaaaatacaacgcaacatggtacacagctgtgcctactattcaccaaattctattggatcgtcacctcagcaaacccgaatcggattacccaaagcttcggttcattcggagctgtagtgcagcactggctccatcagtgatggcgcggctagaagaagcattcgcggctcctgttttggaggcgtatgcaatgactgaggcaacccatttgatggcttcgaaccccttacccgaggatggcccacatattcccgggtcagttgggaaacccgtgggtcaagagatgggcattttgaatgagaatggggagttacaagggcctaatgctaaaggggaagtttgtataaggggtccaaatgtgacaaagggatacaagaacaatccagaggcaaataaatcagctttccagtttggttggtttcacactggagatgtggggtatttggactctgatggatacttgcatttggttggaagaatcaaggagttgatcaaccgcggaggggagaaaatatcacctattgaattggatgcagtcctagtttctcatccagaaattgctcaggctgttgcttttggagtccctgacgacaagtatggtgaagagataaactgtgcagttattccaagagaagggtcaaacatcgatgaagcagaggtgctgagattttgcaagaagaatttggcagcctttaaggtcccaaagaaggtcttcatgactgattctcttccaaaaactgcatcaggaaaaattcaacgccgactcgttgcagagcacttccttgcacagatttcaactgctaaagtccccaagtttggagcatag

SEQ ID NO: 28527 - protein, 523 aa, Capsicum annuum
MECLTLTGFLKHVAEKYPSHRAISVSGRLDITHARLQQLVERAASQIVAAGVKPGDVVALTFPNTIEFVIMFLAVIRARATAAPLNSAYMAEEFEFYLSDSESKLLLTAKEGNEAAQAAASKLKIPRISVTLSQPDSDVAFSPAPPESDLESMSKIVNEPSDVGLFLHTSGTTSRPKGVPLAQLNLLSSVNNIKSVYKLSDTDSTVIVLPLFHVHGLIAGLLSSLGAGAAVTLPAAGRFSASTFWSDMKKYNATWYTAVPTIHQILLDRHLSKPESDYPKLRFIRSCSAALAPSVMARLEEAFAAPVLEAYAMTEATHLMASNPLPEDGPHIPGSVGKPVGQEMGILNENGELQGPNAKGEVCIRGPNVTKGYKNNPEANKSAFQFGWFHTGDVGYLDSDGYLHLVGRIKELINRGGEKISPIELDAVLVSHPEIAQAVAFGVPDDKYGEEINCAVIPREGSNIDEAEVLRFCKKNLAAFKVPKKVFMTDSLPKTASGKIQRRLVAEHFLAQISTAKVPKFGA

SEQ ID NO: 28528 - DNA, 1737 bp, Arabidopsis thaliana
  CDS (1)..(1737)
atggataatttggcgttatgtgaagcaaacaatgttcctctaactcccataacgttcttgaagagagcttcggagtgttatccgaatcgaacttcgataatatacggaaaaactcgtttcacttggcctcagacctatgaccgttgctgtcgtctagccgcttctctcatatctcttaatatcggcaagaacgatgtggtatccgttgttgctccaaacacaccggccatgtatgagatgcactttgccgttcccatggctggagctgtacttaaccctatcaacactcgtctagacgcaacatccattgccgcaatcctccgccacgccaagcccaagattttattcatataccgcagttttgagccattggctcgagaaatcctccagttattatcatctgaagactcaaacctaaacttgccggtcatatttatccacgagattgatttccctaaaagggtttcgtccgaggagtcagactacgagtgtctcatccagaggggagagcctacgcccttgttgttggcacgcatgttctgtattcaagacgagcatgatccaatctctttaaactacacatcgggtaccacagccgacccaaaaggtgttgtgattagccaccgaggagcatatttaagcacattaagcgcgattattggttgggaaatggggacatgccctgtctacctttggactctgcctatgtttcattgcaatggatggacgtttacatggggaactgcggcccgtgggggtactagtgtgtgtatgaggcatgtgactgccccggagatctataaaaacatagaaatgcataacgtgacgcatatgtgttgtgttcctacggtttttaacattcttctgaaaggaaattcacttgacctgtcacataggtctgggccggtccatgttcttaccggaggttcaccgcctcccgctgctcttgtcaagaaagttcagcggttggggtttcaagtgatgcatgcctatggtttgaccgaggccactggtccggttctgttttgtgagtggcaagatgagtggaacagattacctgagaatcaacagatggagttaaaagcaaggcaagggctaagcatcttaggcctaactgaagttgacgtgagaaacaaggaaactcaagagagtgttccgcgagatgggaagacgatgggagaaatcgttatgaaaggaagcagcataatgaaaggctatctgaagaatcccaaagctacatatgaagcatttaaacacggatggctcaactcaggagacgtaggtgtgattcatcctgatggacacgtagagatcaaagatcggtccaaagacataatcatatctggaggcgaaaacattagtagtgttgaagtcgagaatattatttataagtacccaaaagtgcttgagactgccgtcgtggccatgccttaccctacatggggagaaaccccatgtgcatttgttgttctagaaaagggtgagactaataatgaagatcgtgaagataaacttgtgaccaaagagagagatttgattgagtattgccgtgaaaatcttccacattttatgtgtccgagaaaagtggtgtttttggatgaattgcccaaaaacgggaatggaaagatccttaagcctaagctaagagacattgctaaaggtttggttgctgaggatgaggtcaatgttagatctaaagttcaacggccggttgaacactttacttcgcggctttga

SEQ ID NO: 28529 - protein, 578 aa, Arabidopsis thaliana
MDNLALCEANNVPLTPITFLKRASECYPNRTSIIYGKTRFTWPQTYDRCCRLAASLISLNIGKNDVVSVVAPNTPAMYEMHFAVPMAGAVLNPINTRLDATSIAAILRHAKPKILFIYRSFEPLAREILQLLSSEDSNLNLPVIFIHEIDFPKRVSSEESDYECLIQRGEPTPLLLARMFCIQDEHDPISLNYTSGTTADPKGVVISHRGAYLSTLSAIIGWEMGTCPVYLWTLPMFHCNGWTFTWGTAARGGTSVCMRHVTAPEIYKNIEMHNVTHMCCVPTVFNILLKGNSLDLSHRSGPVHVLTGGSPPPAALVKKVQRLGFQVMHAYGLTEATGPVLFCEWQDEWNRLPENQQMELKARQGLSILGLTEVDVRNKETQESVPRDGKTMGEIVMKGSSIMKGYLKNPKATYEAFKHGWLNSGDVGVIHPDGHVEIKDRSKDIIISGGENISSVEVENIIYKYPKVLETAVVAMPYPTWGETPCAFVVLEKGETNNEDREDKLVTKERDLIEYCRENLPHFMCPRKVVFLDELPKNGNGKILKPKLRDIAKGLVAEDEVNVRSKVQRPVEHFTSRL

SEQ ID NO: 28530 - DNA, 1740 bp, Populus jackii
  CDS (1)..(1740)
atgatgtccgtggccacggttgagcccccgaaaccggaactctcccccccacaaaaccaaaacgcaccatcctctcatgaaactgatcatattttcagatcaaaactaccagatataaccatctcgaaccacctccctctgcacgcatactgctttgaaaacctctctgatttctcagataggccatgcttgatttcaggttccacgggaaaaacctactcttttgccgaaactcacctaatatctcgaaaggtcgctgctgggttatccaatttgggcatcaagaaaggcgatgtaatcatgaccctgctccaaaactgcccagaattcgtcttctccttcatgggtgcttccatgattggtgcagtcaccaccactgtgaaccctttctacactccaggtgaaatattcaagcaattctctgcttctcgtgcgaaactgattatcacccagtctcaacatgtgaacaagctaagagatagtgattaccatgaaaacaaccaaaaaccggaggaagatttcatagtaatcaccattgatgacccaccagagaactgtctacatttcaatgtgcttgttgaggctaacgagagtgaaatgccaacagtttcaatccatccggatgatcctgtggcattaccattctcttcagggacaacagggctcccaaaaggagtgatactgactcacaagagcttgataacaagtgtggctcaacaagttgatggagagatcccaaatttatacttgaaacaagatgatgtcgttttatgcgttttacctttgtttcacatcttttcattgaacagcgtgttgttatgctcgttgagagccggttctgctgtacttttaatgcaaaagtttgagatcggatcactgctagagctcattcagaaacacaatgtttcggttgcggctgtggtgccaccactggtgctggcgttggccaagaacccaatggtggcgaacttcgacttgagttcgatcagggtagtcctctcaggggctgcgccactggggaaggagctcgaggaggccctcaggagcagggttccacaggccatcctgggacagggttatgggatgacagaggcggggccagtgctatcaatgtgcttagccttctcaaagcaacctttacccaccaagtctggatcatgtggaacagtggttagaaacgcagagctcaaggtcattgaccctgagaccggtagctctcttggtcgcaaccaacctggtgaaatctgcatccggggatcccaaatcatgaaaggatatttgaatgacgcggaagccacggcaaacatcatagacgttgagggttggctccacactggagatataggttatgtcgacgacgacgacgagattttcattgttgatagagtgaaggaaatcataaaattcaaaggcttccaggtgccgccagcggagcttgaggctctccttgtaaaccacccttcaattgcggatgcggctgttgttccccgagataacttgtatggaaacaacaggcaaaaagacgaggttgctggtgaagttcctgtcgcgtttgtggtccgctcaaatgatcttgaccttaatgaagaggctgtaaaagactacattgcaaagcaggtggtgttctacaagaaactgcacaaggtgttcttcgttcattctattcccaaatcggcttctggaaagattctaagaaaagacctcagagccaagcttgccacagccaccaccatgtcctag

SEQ ID NO: 28531 - protein, 579 aa, Populus jackii
MMSVATVEPPKPELSPPQNQNAPSSHETDHIFRSKLPDITISNHLPLHAYCFENLSDFSDRPCLISGSTGKTYSFAETHLISRKVAAGLSNLGIKKGDVIMTLLQNCPEFVFSFMGASMIGAVTTTVNPFYTPGEIFKQFSASRAKLIITQSQHVNKLRDSDYHENNQKPEEDFIVITIDDPPENCLHFNVLVEANESEMPTVSIHPDDPVALPFSSGTTGLPKGVILTHKSLITSVAQQVDGEIPNLYLKQDDVVLCVLPLFHIFSLNSVLLCSLRAGSAVLLMQKFEIGSLLELIQKHNVSVAAVVPPLVLALAKNPMVANFDLSSIRVVLSGAAPLGKELEEALRSRVPQAILGQGYGMTEAGPVLSMCLAFSKQPLPTKSGSCGTVVRNAELKVIDPETGSSLGRNQPGEICIRGSQIMKGYLNDAEATANIIDVEGWLHTGDIGYVDDDDEIFIVDRVKEIIKFKGFQVPPAELEALLVNHPSIADAAVVPRDNLYGNNRQKDEVAGEVPVAFVVRSNDLDLNEEAVKDYIAKQVVFYKKLHKVFFVHSIPKSASGKILRKDLRAKLATATTMS

SEQ ID NO: 28532 - DNA, 1623 bp, Populus jackii
  CDS (1)..(1623)
atggacgccataatgaattcacaagaagaattcatctttcgctcaaaattaccagacatctacatcccgaaaaaccttcctctgcattcatacgttcttgaaaacttgtctaaatattcatcaaaaccttgcctgataaatggcgcaaacggagatgtctacacctatgctgacgttgagctcacagcaagaagagttgcttctggtcttaacaagattggtattcaacaaggtgacgtgatcatgctcttcctaccaagttcacctgaattcgtgcttgctttcctaggcgcttcacacagaggtgccattgtcaccgctgccaatcctttctccacccctgcagagctagcaaaacatgccaagcctccaagaacaaagcttttgataacacaggcttgttactacgacaaggttaaagattttgcacgagaaagtgatgttaaggtcatgtgcgtagactctgccccagatgggtgcttgcacttttcagagctaacacaggctgacgaaaatgaagtgccccaggtcgactttagtcctgatgatgttgtagcattgccttattcatcagggactacagggttaccaaaaggggtcatgctaacgcacaaagggctaataaccagtgtggctcaacaagtagatggagacaatcctaacctgtattttcacagtgaagatgtgattttgtgtgtgttgcctatgttccatatctatgctctgaattcaataatgctttgtgggctgagagttggtgcctcgattttgataatgccaaagtttgatattggtactctgctgggattgattgagaagtacaaggtatctatagcaccagttgttccacctgtgatgttggcaattgctaagtcacctgattttgacaagcacgacttgtcttctttgaggatgataaaatctggaggggctccattgggcaaggaacttgaagatactgtcagagctaagtttcctcaggccagacttggtcagggatatggaatgaccgaggcaggacctgttctagcaatgtgcttggcatttgccaaggaaccatttgacataaaaccaggtgcatgtgggactgtcgtcaggaatgcagaaatgaagattgttgacccagaaacaggggcctctctacggaggaaccagcctggtgagatctgcatccggggtgatcagatcatgaaaggatatcttaatgaccctgaggcaacctcaagaacaatagacaaagaaggatggttgcacacaggcgatatcggctacattgatgacgatgatgagcttttcatcgttgacagattgaaggaattgatcaaatataaagggtttcaggttgctcctgctgaactcgaagctttgttactagcccatccacagatatccgatgctgctgtagtaggaatgaaagatgaggatgcaggagaagttcctgttgcatttgtagtgaaatcagaaaagtctcaggccaccgaagatgaaattaagcagtatatttcaaaacaggtgatattctacaagagaataaaacgagttttcttcattgaagcaattcccaaggcgccatcaggcaaaatccttaggaagaatctgagagaaacgttgccaggcatataa

SEQ ID NO: 28533 - protein, 540 aa, Populus jackii
MDAIMNSQEEFIFRSKLPDIYIPKNLPLHSYVLENLSKYSSKPCLINGANGDVYTYADVELTARRVASGLNKIGIQQGDVIMLFLPSSPEFVLAFLGASHRGAIVTAANPFSTPAELAKHAKPPRTKLLITQACYYDKVKDFARESDVKVMCVDSAPDGCLHFSELTQADENEVPQVDFSPDDVVALPYSSGTTGLPKGVMLTHKGLITSVAQQVDGDNPNLYFHSEDVILCVLPMFHIYALNSIMLCGLRVGASILIMPKFDIGTLLGLIEKYKVSIAPVVPPVMLAIAKSPDFDKHDLSSLRMIKSGGAPLGKELEDTVRAKFPQARLGQGYGMTEAGPVLAMCLAFAKEPFDIKPGACGTVVRNAEMKIVDPETGASLRRNQPGEICIRGDQIMKGYLNDPEATSRTIDKEGWLHTGDIGYIDDDDELFIVDRLKELIKYKGFQVAPAELEALLLAHPQISDAAVVGMKDEDAGEVPVAFVVKSEKSQATEDEIKQYISKQVIFYKRIKRVFFIEAIPKAPSGKILRKNLRETLPGI

SEQ ID NO: 28534 - DNA, 1671 bp, Arabidopsis thaliana
  CDS (1)..(1671)
atgaaaatggagggaactatcaaatctccggccaactacgttcctctcactccgatcagcttcctcgatagatctgctgtcgtctacgctgacagagtctccatcgtttatggctccgtcaagtacacgtggcgccagactcgtgaccgctgcgtcagaatcgcctccgctctctcccagctcggaatctctaccggagatgtggtttcagtgttggctccaaacgttccagctatggttgaattgcattttggtgttcctatggctggagctttgctctgtacactcaacattcgtcatgattcatcacttgttgctgtcttgcttagacattcagggacaaaagtgatttttgcagatcatcagtttctccaaatagctgatggagcttgtgaaatcctctcaaataaaggtgacaaggtcccgattttggtcttgatcccagagcctcttactcaatctgtttcaaggaagaagagatctgaggaaatgatggaatacgaagatgttgtagcgatggggaaatcggacttcgaggttatacgaccaacagatgagtgtgatgctatatctgttaattacacatcaggtaccacttcaagccccaaaggtgttgtttatagtcacagaggtgcttatttgaattctctggctgcggttttactcaacgaaatgcactcctcgcctacttatctatggactaatcccatgtttcactgcaatggctggtgcttattgtggggtgttactgctattggtgggactaatatatgtttgaggaatgttacggccaaggctatatttgataatatttcccagcataaggtgactcatatgggaggtgcgccgacgatattgaatatgatcatcaatgcgcctgaatctgagcagaaaccgcttcccgggaaggtgtcttttataaccggtgctgcaccgccaccagctcatgtgattttcaagatggaagagttggggttttctatgtttcattcctatgggttaactgaaacttatggaccaggcacaatctgtacatggaagcctgagtgggactctttgcctagagaagaacaggcgaaaatgaaagctcgacaaggcgtgaatcatttagggctcgaggaaatacaagttaaagaccctgtaaccatgagaactttgccagctgatggtgtgactatgggtgaagttgtcttcagaggaaacacggtgatgaatggttacttaaagaaccctgaagcaaccaaggaagcttttaaaggaggttggttttggagtggcgacttaggtgttaaacaccctgacggatacatagagctgaaagacagatcgaaagacattataatctctggaggagaaaacattagctcgattgaagtcgagtctactctgttcactcacccttgtgttcttgaagcagctgtagttgcgaggcctgatgagtattggggtgagactgcttgtgcatttgtgaaacttaaagacgggtctaaggccagtgcggaggagcttattagctattgcagggaccggcttccacattatatggctccgaggagtattgtgtttgaggatcttcctaaaacatcgactggaaaagtccagaagtttgttctgaggaccaaggctaaggctttggtaagcttatcaaagaaaggcagaagcaagttatga

SEQ ID NO: 28535 - protein, 556 aa, Arabidopsis thaliana
MKMEGTIKSPANYVPLTPISFLDRSAVVYADRVSIVYGSVKYTWRQTRDRCVRIASALSQLGISTGDVVSVLAPNVPAMVELHFGVPMAGALLCTLNIRHDSSLVAVLLRHSGTKVIFADHQFLQIADGACEILSNKGDKVPILVLIPEPLTQSVSRKKRSEEMMEYEDVVAMGKSDFEVIRPTDECDAISVNYTSGTTSSPKGVVYSHRGAYLNSLAAVLLNEMHSSPTYLWTNPMFHCNGWCLLWGVTAIGGTNICLRNVTAKAIFDNISQHKVTHMGGAPTILNMIINAPESEQKPLPGKVSFITGAAPPPAHVIFKMEELGFSMFHSYGLTETYGPGTICTWKPEWDSLPREEQAKMKARQGVNHLGLEEIQVKDPVTMRTLPADGVTMGEVVFRGNTVMNGYLKNPEATKEAFKGGWFWSGDLGVKHPDGYIELKDRSKDIIISGGENISSIEVESTLFTHPCVLEAAVVARPDEYWGETACAFVKLKDGSKASAEELISYCRDRLPHYMAPRSIVFEDLPKTSTGKVQKFVLRTKAKALVSLSKKGRSKL

SEQ ID NO: 28536 - DNA, 1692 bp, Pseudomonas aeruginosa
  CDS (1)..(1692): transl_table=11
gtgcgtgcaagacccgagcaatgtgtcgatgaggtggctgccatgatggttccgaccctcgagcacgagcttgctcccaacgaagccaaccatgtcccgctgtcgccgctgtcgttcctcaagcgtgccgcgcaggtgtacccgcagcgcgatgcggtggtctatggcgcaaggcgctacagctaccgccagttgcacgagcgcagttgcgccctggccagtgccctggagcgggtcggcgtacaagcgggcgagcgggtggcgatactggcgccgaatatcccggaaatgctcgaggcccactatggcgtacccggtgccggggcggtgctggtatgcatcaacattcgcctggaggcacgcagcatcgccttcatcctgcgccactgcgcggccagggtgctgatctgcgaccgtgagttcggtgccgtggcccagcaggcgctggccatgctcgatgcgccgcccttgctggtgggcatcgacgatgatcaggccgagcgagccgacctcgcccacgacctggactatgaggcgtttctggcccagggcgacccggggcggccgctgagtgcgccgcagaacgaatggcagtcgatcgccatcaactacacctccggcaccacgggggatcccaagggcgtggtcctgcatcaccgcggcgcctacctcaacgcctgcgccggcgcgctgatcttccagttggggccgcgcagcgtctacctgtggaccttgccgatgttccactgcaacggctggagccatacctgggcggtgacgctgtccggtggcacgcacgtatgcctgcgcaaggtccagccagatgcgatccacgccgccattgccgagcatgcggtgacccacctgagcgccgcgccggtggtgatgtcgatgctgatccatgccgagcatgccagcgtccctgccgtgccggtatcggtgatcaccggcggcgccgcgccgcccagcgcggtcatcgccgccatggaagcacgcggcttcagcatcacccacgcctacggcatgaccgaaagctacggccccagcaccctgtgcctgtggcagccgggggtcgacgaattgccgctggaggcccgggcccagttcatgagccgccagggcgtcgcccacccgatgctcgaggaggccacggtgctggataccgacaccggccgtccggtcccggccgacggccgcacccttggcgaactggtagtgcggggcaacaccgtgatgaaaggctacctgcacaaccccgaggccacccgtgccgcgttggccgacggctggttgcacaccggcgacctggccgtgctgcacccggacggctacgtggaaatcaaggaccgggccaaggacatcatcatttccggcggcgagaacatcagctcgctggagatcgaggaagtgctctaccagcaccccgaggtggtcgaggccgcggtggtggcgcgcccggattcgcgctggggcgagacaccccacgcgttcgtcgccttgcgggcggatgccttacccagaaccacgggtgacgatctggtccgctggtgccgcgagcgcctggcgcacttcaaggcaccgcggcatgtgacgcttaccgaactgcccaagaccgccaccggcaagatccagaagttcgtcctgcgcgagtgggcccggcaggaggaggaggccggcgacgccggccgctga

SEQ ID NO: 28537 - protein, 563 aa, Pseudomonas aeruginosa
MRARPEQCVDEVAAMMVPTLEHELAPNEANHVPLSPLSFLKRAAQVYPQRDAVVYGARRYSYRQLHERSCALASALERVGVQAGERVAILAPNIPEMLEAHYGVPGAGAVLVCINIRLEARSIAFILRHCAARVLICDREFGAVAQQALAMLDAPPLLVGIDDDQAERADLAHDLDYEAFLAQGDPGRPLSAPQNEWQSIAINYTSGTTGDPKGVVLHHRGAYLNACAGALIFQLGPRSVYLWTLPMFHCNGWSHTWAVTLSGGTHVCLRKVQPDAIHAAIAEHAVTHLSAAPVVMSMLIHAEHASVPAVPVSVITGGAAPPSAVIAAMEARGFSITHAYGMTESYGPSTLCLWQPGVDELPLEARAQFMSRQGVAHPMLEEATVLDTDTGRPVPADGRTLGELVVRGNTVMKGYLHNPEATRAALADGWLHTGDLAVLHPDGYVEIKDRAKDIIISGGENISSLEIEEVLYQHPEVVEAAVVARPDSRWGETPHAFVALRADALPRTTGDDLVRWCRERLAHFKAPRHVTLTELPKTATGKIQKFVLREWARQEEEAGDAGR

SEQ ID NO: 28538 - DNA, 1629 bp, Unknown
  Unidentified
  CDS (1)..(1629)
atgccgatggaaaatgaaacaagagatttaatcttccgatctaaactccctgatatttacatccctaaacatttgcctttacattcttattgtttcgaaaacatttctgagtttaattcccgtccttgtttaattgatggtgcaaatgatcaaatctattcttatgccgaagttgaactgacttcgaggaaagttgctgttggtctgaataaattaggggtccaacagaaggatacgattatgattctcttgcctaattcccctgaattcgtttttgcttttatgggtgcttcgtatctaggtgcaatttccacaatggctaatcctcttttcactcctgcagaggttctcaagcaagctaaagcatcaagcgctaagattatcatcacgttagcttgctatattgggaaagtaaaggattacgctactgaaaatgatgtgaagttaatttgcatcgattctgcaccggaaggttgcattcatttctccgaattgacacaatcggacgaacacgaaatacctgatgtgaaaatccagcctgatgacgttgtcgccctgccgtattcctcagggactacagggctaccaaaaggagtcatgttgacacataaaggattagtcacgagcgtagcgcaacaagttgatggagaaaatgcaaatttgtatatgcacagtgaagacgtgttgatgtgttgcttgcctttgttccatatatactcactcaattctgtcttgctatgtggattgagaattggagcatccattttgattatgcagaaattcgacattgttcacttcttggagttgattcagaagtataaggtgacaattggaccatttgtacctcctattgttctagcaattgcaaagagtccattagttgaccactactatctttcgtcagtaaggacagtcatgtctggggctgcacctttaggaaaggaactcgaagacactgtccgaaccaaattccctaacgccaaacttggtcagggttatggaatgactgaagctggaccagtgctggcaatgtgtttggcctttgcaaaagaaccctttgaaattaaatcacgtgcatgtggtactggtgcaaggaatgctgaaatgaaaaatgtggatccggataccggttgttctttgccccgtaaccaacccggtgaaaattgcattcgaggtgatcagatcatgaaaggttacttgaaccatcttgagtccacaacgagaacaatagacaaaaaaggatgggtacacactggcgatatggggttcatcgacaacgatgacgagcttttcattgtggaccgattgaaggaattgattaaatacaaaggatttcaagtggcccctgctgagcttgaagcacttcttctcaaccatcccaacatttctgatgctgctgttgtcccaatgaaagacgagcaagctggggaagttccagtggcttttgttgtaaggtcaaatggatcaacaattactgaggatgaagtcaaggatttcgtttcgaagcaggtggtattctataagagaataaagcgtgtatttttcgtggaaacggtaccaaaatctccatcaggaaaaattctgagaaaggacttgagagctagactggctgctggtgtcacaaattaa

SEQ ID NO: 28539 - protein, 542 aa, Unknown
  Unidentified
MPMENETRDLIFRSKLPDIYIPKHLPLHSYCFENISEFNSRPCLIDGANDQIYSYAEVELTSRKVAVGLNKLGVQQKDTIMILLPNSPEFVFAFMGASYLGAISTMANPLFTPAEVLKQAKASSAKIIITLACYIGKVKDYATENDVKLICIDSAPEGCIHFSELTQSDEHEIPDVKIQPDDVVALPYSSGTTGLPKGVMLTHKGLVTSVAQQVDGENANLYMHSEDVLMCCLPLFHIYSLNSVLLCGLRIGASILIMQKFDIVHFLELIQKYKVTIGPFVPPIVLAIAKSPLVDHYYLSSVRTVMSGAAPLGKELEDTVRTKFPNAKLGQGYGMTEAGPVLAMCLAFAKEPFEIKSRACGTGARNAEMKNVDPDTGCSLPRNQPGENCIRGDQIMKGYLNHLESTTRTIDKKGWVHTGDMGFIDNDDELFIVDRLKELIKYKGFQVAPAELEALLLNHPNISDAAVVPMKDEQAGEVPVAFVVRSNGSTITEDEVKDFVSKQVVFYKRIKRVFFVETVPKSPSGKILRKDLRARLAAGVTN

SEQ ID NO: 28540 - DNA, 1608 bp, Streptomyces maritimus
  CDS (1)..(1608): transl_table=11
atggaaccggcccctcaggcccccacacaacctgtgatcgacgctcggcgccccgaagcgggaccgcgttgggagaccatcggcgagctcatcaaagatgccgcgttgctgcacggcgacaaggaattcctccgatgcggcgacaagacgctcagcttctccgagaccgacacccgcaccgaccggttggcgcaggcgctgatcgcccaaggtgtcaaaccgggtgaccgtgtcgcggtcatgatggacaacgtggcggactggccgttgagctggttcgcggccatcaaggccggtgccatcacggtgccggtcaacacccgcttcggcgctacggacctcgcgcacgtcctgaaggactctcaggccgtgcgggtcctggcctccccaggctgcgtgcctttggcccgtgacgtgagcggcagcatcgggcacccctgtgcggtccggacgctacgcgaactggaggccgacttcggcgaccggccggtggacggtccgggcctgtcggcgcacgcggacgacaccgtcaacttccagtacacctccggcaccacaggctttccgaaagcctgcatgctcagccacgactactggctgcgcacggcgtggatgatcgctgtccactccggcctccgtcccgacgacgtcgtgctgacggcccaggcgttctcctacatggatccccagtggaaagccgtgatgtgcctgatgggcggcgttccgctggtggtgctcccgcggttctccgcctccggcttctggcactccgtccgccagcaccgggccacgctgacctacgtgctgggcagcatgcccatgctgctgtacaagcagccgccccactcgggcgaccgcgatcatgcgatgcggctggtcttgtgctcgggcatcccgcgcgacttgcaccatgcgttcgaggaccgctggggtgcggcctggcgggaggtgtacggctccaccgagagcggactggacttgatcatgccgcctggtgaggaggccaccgtgggcagcggcgcgatggggtacccgccgtccggcaaggaggtcatcgtcgccgacgagcgccaacgccccgtccagccagggcagatcggcgagatcctggtgcggggaaggcccatgatgaaaggctactggaacaacccggacagtaccgagcgggcgttccgcggcggctggtaccacaccggtgacctcggacgtgccgaggcggccgggagcgtggtgcacgccgggcggctgaaggacatgatccgacgcggtggggagaacatcgcagcggccgaagtcgagagcgtcctcgaagcccacccggcggtcctggccgccgcgctcgccggcatccccgacgagctcttcggtgagctgcccaaagccttcctgcagctgcgccccggctaccggcccaccacggcaacggctcgcagcgtcctcgcgcacacccgccgccacctcgcgaaattcaaggtccctgcctatgtcgaattcgtcgactccttccccatgaccccctccgcccgtatccagaagcgccagctgcttcgtcccggagacgaccagcgcaccggtgcgttcgacgccgcagcggatgcatgggcatga

SEQ ID NO: 28541 - protein, 535 aa, Streptomyces maritimus
MEPAPQAPTQPVIDARRPEAGPRWETIGELIKDAALLHGDKEFLRCGDKTLSFSETDTRTDRLAQALIAQGVKPGDRVAVMMDNVADWPLSWFAAIKAGAITVPVNTRFGATDLAHVLKDSQAVRVLASPGCVPLARDVSGSIGHPCAVRTLRELEADFGDRPVDGPGLSAHADDTVNFQYTSGTTGFPKACMLSHDYWLRTAWMIAVHSGLRPDDVVLTAQAFSYMDPQWKAVMCLMGGVPLVVLPRFSASGFWHSVRQHRATLTYVLGSMPMLLYKQPPHSGDRDHAMRLVLCSGIPRDLHHAFEDRWGAAWREVYGSTESGLDLIMPPGEEATVGSGAMGYPPSGKEVIVADERQRPVQPGQIGEILVRGRPMMKGYWNNPDSTERAFRGGWYHTGDLGRAEAAGSVVHAGRLKDMIRRGGENIAAAEVESVLEAHPAVLAAALAGIPDELFGELPKAFLQLRPGYRPTTATARSVLAHTRRHLAKFKVPAYVEFVDSFPMTPSARIQKRQLLRPGDDQRTGAFDAAADAWA

SEQ ID NO: 28542 - DNA, 1641 bp, Pseudomonas putida
  CDS (1)..(1641): transl_table=11
atgattggtcagatgatgcgtcagccgttgatcataagttcacttattgagcatgctgcacgataccatggtaatacagaggtggtttctgttgaaacctctggtgaagtaacaagagcttattggtcaggagtggcgctgcgtgcccgtaagcttgcttctgcgctaggcaagatggggctcacacaaagtgatcgttgtgcaaccattgcgtggaataatgtccgccatcttgagatttacttcggtgtctcaggtgcagggatggtatgtcatacgataaatcctaggcttttcatagagcagattgcctatgtgataaatcatgcggaggataaggtaatatttttcgacgagacattcttgccgataattgctgggttagatgggctattaacaacagccaaagcctttgtcttgatgggatgtgcaaatttaaaggcatccgccaagattccaggattacttgcctacgaagatttgattggacaaggtgatgatgactatgtgtggcccgatgtagatgaaaaagaggcttctagtctctgctatacttcgggtactacgggtaatcctaagggggtactttattcacaccgctcgacagttttacattcaatgacgactgcaatgcctgatacgctcaatttgtctgcgcgagatacaattttgccagttgttccgatgtttcatgtaaatgcgtgggggattccacactccgctgcaatggttggtgcaaaattagttcttcctggcccggcacttgatggcgctagcttagcgaagctaattgatcaggaacgtgtcagtattgctcttggagtgccagttatttggcaggggttgttggcctctctagcggaaagtggttcgaaagcagaaagccttacgcgaactgttgtaggaggctcggcctgccctccttctatgattaaagaatttaacgatctatatggtgtcgaagttattcatgcttggggtatgactgagctttcgccatttggtacggcaaacacgccactcgggcatcaagtgaatttgccatgggatgaaaaacttgcactgcgccaaagccaggggcgcccaccttatggtgtcgaactaaagatagttgatgatgagggtgtcacactatctgaagatggtgttaccaaaggcaatcttatggttcgagggcattgggttattaaagattattttcgtagcactattggtacaacactctcgaatggatggttttcaactggggatgtggccactattgatcaggatggctttatgacaatttgtgatcgcgcaaaggatattataaagtctggtggtgaatggattagtacggtagagctagaaggtgttgcgattgcgcatcccgcgatagttgatgctgcagtcatagcagtaaagcacaaaaaatgggatgagcggcctcttcttgttgcagtcagagcccctaattcagtgctaacggatgatgaattgcttagttatttcgaaggtaaggtggctaagtggcaaattccagacgccgctatatttattgatgaactgccgcgcaatggggctggtaagattctgaagaatcgtttgcgtgagaaatatgctgatattctttcgtgtaatgattcttcggcacttgagtaa

SEQ ID NO: 28543 - protein, 546 aa, Pseudomonas putida
MIGQMMRQPLIISSLIEHAARYHGNTEVVSVETSGEVTRAYWSGVALRARKLASALGKMGLTQSDRCATIAWNNVRHLEIYFGVSGAGMVCHTINPRLFIEQIAYVINHAEDKVIFFDETFLPIIAGLDGLLTTAKAFVLMGCANLKASAKIPGLLAYEDLIGQGDDDYVWPDVDEKEASSLCYTSGTTGNPKGVLYSHRSTVLHSMTTAMPDTLNLSARDTILPVVPMFHVNAWGIPHSAAMVGAKLVLPGPALDGASLAKLIDQERVSIALGVPVIWQGLLASLAESGSKAESLTRTVVGGSACPPSMIKEFNDLYGVEVIHAWGMTELSPFGTANTPLGHQVNLPWDEKLALRQSQGRPPYGVELKIVDDEGVTLSEDGVTKGNLMVRGHWVIKDYFRSTIGTTLSNGWFSTGDVATIDQDGFMTICDRAKDIIKSGGEWISTVELEGVAIAHPAIVDAAVIAVKHKKWDERPLLVAVRAPNSVLTDDELLSYFEGKVAKWQIPDAAIFIDELPRNGAGKILKNRLREKYADILSCNDSSALE

SEQ ID NO: 28544 - DNA, 1572 bp, Bacillus subtilis
  CDS (1)..(1572): transl_table=11
atgtccgaactcatccattgcacaatcggcaggctgctggaacaaacggcagcagcctatcctgatcaagaagcggttgtctatcccgaccggaatcttcgctacacgtacgtgcaattcaacaggctgtgccgccaaaccgctaaagggctcatggggatggggattgggaaaggagaccacgtggccatatgggcctcgaatatacctgaatggcttgctgctcaattcgccaccgcaaaaatcggggccgtgctcgttaccgtaaatacaaattaccaatcccaagagcttgattacttgctgagacaatcagatgcggatgcacttatcgtcatgaattcatatcgcggcacttcttatactgagatcctgaacagcttaattcccgagctgaaggaagcagagcccgggcatctgcaatcagaacgctatccgtgtttaaaaacattgatttatatcggtgaaaaacgtttacctggtatgtatcattgggacgatacagagatgttggcacagtcagtgtcagatgccgagctggaagcaagaatgagcagccttgaaaaagatgatgtcattaacatgcaatacacgtcaggaacgacaggatttcctaaaggagtgatgctgactcattttaatgtcatcaacaacgccgcaaataacgctgaatgtatgaaattaacctcatctgaccgcatgtgcatcccggttccgtttttccattgcttcggctgcgtgcttggcgttttggcatgtgtgtccgtcggagcagccatggtacctgttgtagaatttgaacctgccacagtccttacaacggttgaaaacgagacatgcacagcactgcacggtgttccgacgatgtttatcgcgcagcttcatcttcaagattttgattcttatgatctgtcatctttgcgaacaggcatcatggcaggatcatcctgtccgagtgaggtgatgaaagctgtcattgaaaaaatgggcatgacagacatcacaatcgcctacggacaaacggaaccttcgccggtgatcacacaaacaagagctaatgattccttccaaagaagagtggaaacaaccggccgagccttgccagaggtcgaagtgaaaattgtggagcccggcacgtttaatgaggttcaaagaggcgtacagggagagctttgcactcgcggctatcatgtgatgaagggctattataaagacgaagaagctacccaaaaggcaatcaacccagaaggatggctatttaccggtgatctcgctgtgatggatgaagacggatactgccgcgtcaccgggagattaaaagacatgctcatcagaggcggtgaaaacgtttatccgagagaaatagaagaatttttataccgtcatcctaatattttagatgtacaggtagttggtgtgcctgacgaaaaatacggggaggaggcagctgcctggattaagctgaaagagggaaaaacagcttcacccgaagagctgaaagcctattgcaaagggaaaatcgccgacacaaaattccgcgctatttcatctttacagacgagtatcctatga

SEQ ID NO: 28545 - protein, 523 aa, Bacillus subtilis
MSELIHCTIGRLLEQTAAAYPDQEAVVYPDRNLRYTYVQFNRLCRQTAKGLMGMGIGKGDHVAIWASNIPEWLAAQFATAKIGAVLVTVNTNYQSQELDYLLRQSDADALIVMNSYRGTSYTEILNSLIPELKEAEPGHLQSERYPCLKTLIYIGEKRLPGMYHWDDTEMLAQSVSDAELEARMSSLEKDDVINMQYTSGTTGFPKGVMLTHFNVINNAANNAECMKLTSSDRMCIPVPFFHCFGCVLGVLACVSVGAAMVPVVEFEPATVLTTVENETCTALHGVPTMFIAQLHLQDFDSYDLSSLRTGIMAGSSCPSEVMKAVIEKMGMTDITIAYGQTEPSPVITQTRANDSFQRRVETTGRALPEVEVKIVEPGTFNEVQRGVQGELCTRGYHVMKGYYKDEEATQKAINPEGWLFTGDLAVMDEDGYCRVTGRLKDMLIRGGENVYPREIEEFLYRHPNILDVQVVGVPDEKYGEEAAAWIKLKEGKTASPEELKAYCKGKIADTKFRAISSLQTSIL

SEQ ID NO: 28546 - DNA, 1632 bp, Rubus idaeus
  CDS (1)..(1632)
atggcggtccaaacacctcaacacaacatcgtctaccgctccaagctcccggacatccatatcccaaaccacctccctctccattcctacatattccaaaacaaatcccacctcacctcaaagccctgcatcatcaatggcactactggcgacatccacacctacgccaaattcaaactcaccgcccggaaagtcgcctccggcctcaacaagctcggcatcgagaaaggcgacgtcttcatgcttttgctccccaacacttccgaattcgtctttgccttcttgggagcctcgttctgcggagccatgatgacagccgccaaccctttcttcactccggcggaaatcgcgaaacaggccaaggcgtcgaaggcgaagctgatcatcactttcgcttgctattacgacaaagtaaaagacttatcatgcgacgaagtgaagttgatgtgcattgactcgccgccacctgactcgtcttgtcttcatttctccgaactgactcagtcagacgagaacgacgtgccggatgtggacatcagcccggacgacgtcgtggcgttaccttattcctccgggacgacgggactgccgaaaggggtgatgttgacgcacaaagggctggtgacgagcgtgtctcagcaggtggacggagagaatccgaatttgtactacagcagcgacgacgtcgttctgtgcgtgctgccgctgtttcatatttactcgctgaactcggtcttgctatgcgggttaagagccggagctgccattctgctgatgcagaagtttgagattgtgtcgcttttggagctgatgcagaagcatagggttagtgttgcgccgattgtgcctccgactgttttggcgatcgccaagtttccagatcttgacaagtatgatttgggatccataagggtgctgaagagtggaggagcaccattggggaaggagcttgaagatacagtcagagctaaatttcccaatgtcacactcggtcagggatatggaatgacagaggcaggtccggtgttgacaatgtcgttggcatttgcaaaggaacccttcgaggtgaaaccaggtgggtgtgggactgtcgtcagaaacgcagagttgaagatcgttgatcctgaaactggtgcctctttgccgcgcaaccaccctggtgagatttgcatcagaggccaccagatcatgaaaggttatcttaatgatccggaggccacaagaacaaccatagacaagcaaggttggctacacacaggtgacataggcttcattgatgacgatgaagagctcttcattgttgatcgattaaaggagctcatcaaatacaaaggctttcaggttgcccctgctgagcttgaagccttgctcgtcacccatcctaacatctctgatgctgccgttgtcccaatgaaggatgacgcagctggcgaggttccggttgcatttgtcgtgagtccaaagggctctcaaatcactgaggatgaaatcaagcaatttatttcaaaacaggttgtattctacaaaagaataaaacgagtatttttcattgaagccattcccaagtccccatcgggcaagatcttgcggaaggagttgagagcaaagcttgctgctggctttgcaaattga

SEQ ID NO: 28547 - protein, 543 aa, Rubus idaeus
MAVQTPQHNIVYRSKLPDIHIPNHLPLHSYIFQNKSHLTSKPCIINGTTGDIHTYAKFKLTARKVASGLNKLGIEKGDVFMLLLPNTSEFVFAFLGASFCGAMMTAANPFFTPAEIAKQAKASKAKLIITFACYYDKVKDLSCDEVKLMCIDSPPPDSSCLHFSELTQSDENDVPDVDISPDDVVALPYSSGTTGLPKGVMLTHKGLVTSVSQQVDGENPNLYYSSDDVVLCVLPLFHIYSLNSVLLCGLRAGAAILLMQKFEIVSLLELMQKHRVSVAPIVPPTVLAIAKFPDLDKYDLGSIRVLKSGGAPLGKELEDTVRAKFPNVTLGQGYGMTEAGPVLTMSLAFAKEPFEVKPGGCGTVVRNAELKIVDPETGASLPRNHPGEICIRGHQIMKGYLNDPEATRTTIDKQGWLHTGDIGFIDDDEELFIVDRLKELIKYKGFQVAPAELEALLVTHPNISDAAVVPMKDDAAGEVPVAFVVSPKGSQITEDEIKQFISKQVVFYKRIKRVFFIEAIPKSPSGKILRKELRAKLAAGFAN

SEQ ID NO: 28548 - DNA, 1635 bp, Rubus idaeus
  CDS (1)..(1635)
atggagaacaaacatcaagacgaccatgaattcattttccggtcaaagctgccggacatctacatcccgaaccacctccctctccacacctactgcttcgaaaacatctcccaatttcacgaccgcccctgcctgatcaacggaaacaccggcgagaccttcacctacgccgaggtcgagctcacctcccgcagagtcgccgccgggctcgacaagctaggcattcagcagaacgacgtcgtcatgctcctcctccagaactgtcccgaattcgccttcgcattcctcggcgcctcgtacatcggagccatgagcacaacagccaaccctttctacactccggccgaggtggccaagcaagccaaagcctccaacgccaagctcatcataactcagtcggcctacgtggacaaggttaaggacttcgcgaagctcaacgacgtgaaagtcatgtgcgtggacgaaacatcgtctgaggatgtcttgcatttttcggagttgatgtccgctgacgagagcgaaaccccggccgtcaaaatcaacccggacgacgtcgtcgcgctcccgtattcttcgggcaccacggggctgccgaaaggcgttatgctgacgcacaaggggctggtgacaagcgtggcgcagcaggtcgacggtgaaaacccaaatctgtactttcacaaggaggacgtgatcctctgcgtgctgcctctgttccacatctactccctcaactcggtcttcctctgcggactgcgcgtcggtgcggccatcctgatcatgcagaagttcgagatcaacaagttgctggagttggtggagaaagaaaaggtgacgattgcaccgtttgtgcctcccatcgttttgtctattgccaagtgtcccgacctgcaccgatacgacttgtcgtccattcggatggtcatgtccggcgctgctccgatggggaaggagctcgaggacactgtcagagctaaactgcctaatgccaaactcggacagggttatgggatgactgaggctggaccagttctatccatgtgtctggcatttgcaaaagagccatacgagataaaatcaggtgcatgcgggaccgtggtaagaaatgctgagatgaagatcatcgaccctgacaccaatgaatcccttccccgaaaccaatcaggggagatttgcatcagaggtagccaaatcatgaaaggttaccttaatgaccctgaggcgactgagaataccatagacaaagaaggatggttgcacactggtgatatagggtacattgacgacgacgatgagctcttcatcgttgacagattaaaagaactcatcaagtacaaaggtttccaagtcgccccggctgagctcgaagccatgttgatctcgcatcccaatctctccgatgctgccgttgtatcgatgaaggatgaggctgcaggagaggttcctgttgcatttgttgtaagatcaaacggttccaagatttctgaggatgatatcaagcaatacatctctaaacaggtggtgttctacaagagaataagtaaggttttcttcacagataaaatcccgaaagctccttctggaaaaatattgagaaaagacttgagagcaaggctggctgcaggtctacccaattag

SEQ ID NO: 28549 - protein, 544 aa, Rubus idaeus
MENKHQDDHEFIFRSKLPDIYIPNHLPLHTYCFENISQFHDRPCLINGNTGETFTYAEVELTSRRVAAGLDKLGIQQNDVVMLLLQNCPEFAFAFLGASYIGAMSTTANPFYTPAEVAKQAKASNAKLIITQSAYVDKVKDFAKLNDVKVMCVDETSSEDVLHFSELMSADESETPAVKINPDDVVALPYSSGTTGLPKGVMLTHKGLVTSVAQQVDGENPNLYFHKEDVILCVLPLFHIYSLNSVFLCGLRVGAAILIMQKFEINKLLELVEKEKVTIAPFVPPIVLSIAKCPDLHRYDLSSIRMVMSGAAPMGKELEDTVRAKLPNAKLGQGYGMTEAGPVLSMCLAFAKEPYEIKSGACGTVVRNAEMKIIDPDTNESLPRNQSGEICIRGSQIMKGYLNDPEATENTIDKEGWLHTGDIGYIDDDDELFIVDRLKELIKYKGFQVAPAELEAMLISHPNLSDAAVVSMKDEAAGEVPVAFVVRSNGSKISEDDIKQYISKQVVFYKRISKVFFTDKIPKAPSGKILRKDLRARLAAGLPN

SEQ ID NO: 28550 - DNA, 1776 bp, Rubus idaeus
  CDS (1)..(1776)
atgatatccattgcctctaataacaacaacaacaactctgttgttgttgagacgccaacaaagccggaaatctctcccaatatcatctccgacgtcatttctacctctcaaacccaaccggagcagaagcagcagccgccaacaaccacaactcatcatgtcttcaaatcaaagttaccggaccttcccaacatctccaatcacctcccactccacacctactgcttcgagaacatctccgacttctccgaaagaccctgtttgatcataggctccaccggaaaatcctacaccttctccgaaacccgcctcctttcccaaaagaccggagtgggcctatccaagctcggcatccacaaaggcgatgtggtcatgatccttctccagaactgcgccgagttcgtgttcgcattcatgggcgcttccatgatcggcgccgtcacgaccaccgccaaccctttctacaccgcctccgaaatcttcaagcagttggaggcatccaacgcgaagctcatcatcactcaatcccagtacgtagacaagctccgacagcccggccagcactttcaagtggtcaccatcgacgaccctcccgagaactgcttgcatttctccgtgctttccgacgccaacgaaaacgagcttccgcaggtttcgattgacccagatgaccctgtagctttacccttctcttccgggactacagggcttcccaaaggggtgattctaacgcacaagagcctcatcacaagtgtggctcagcaagtggacggagagaatcccaacctgtacttgaagggagacgacgtcgtcttgtgcgtgctgccgttgttccatattttctcgctcaacagtgtcctcttgtgctcgctccgagcaggggcggcggttttggtaatgcccaagtttgagattgggacgctgttggagctcatacagcggtacagggtgttctgtggcggcgggtggtgcctcgctggtgatagcgctggcgaagaatccatggtggcggactacgatcttagctctattagagttgtcttgtccggggcggcgccgctgggaaaggagctagaggaggcgttaaggaaccgagtgcctcaggcagtcttgggccagggttatgggatgacagaggcagggccggtgctatcaatgtgcctggcattcgcaaagcaaccgtttccaacaaagtcagggtcatgcggcagcgtggttcgaaatgcagagctcaaagtcgtcgaacccgaaactggtcgctccctcggctacaaccagcccggcgagatttgcgtccgcggctctcaaattatgaaaggatatttgaacgatggtgaggcgaccgcaaccacagtagatgttgagggttggcttcacactggggatattggttatgttgatgacgacgatgaggttttcattgttgacagagttaaggagctcatcaaatttaaaggcttccaagtgccaccagctgagcttgagtccctacttataagccacccatccatgcagatgcagcttgttgttccgcaaaaagatgatgctgcgggtgaagttccggtggcattcgtggttcgatctaatggcggcaatgagcttactgaagaggctgtcaaagaattcatagcaaaacaggttgtgttttacaagagactgcacaaggtctacttcgtccacgccattccgaaatctcccgctggaaaaatcttaagaaaagacctcagagccaagctagcagctgctgctactccaaatcctcatcatcccatctaa

SEQ ID NO: 28551 - protein, 591 aa, Rubus idaeus
MISIASNNNNNNSVVVETPTKPEISPNIISDVISTSQTQPEQKQQPPTTTTHHVFKSKLPDLPNISNHLPLHTYCFENISDFSERPCLIIGSTGKSYTFSETRLLSQKTGVGLSKLGIHKGDVVMILLQNCAEFVFAFMGASMIGAVTTTANPFYTASEIFKQLEASNAKLIITQSQYVDKLRQPGQHFQVVTIDDPPENCLHFSVLSDANENELPQVSIDPDDPVALPFSSGTTGLPKGVILTHKSLITSVAQQVDGENPNLYLKGDDVVLCVLPLFHIFSLNSVLLCSLRAGAAVLVMPKFEIGTLLELIQRYRVFCGGGWCLAGDSAGEESMVADYDLSSIRVVLSGAAPLGKELEEALRNRVPQAVLGQGYGMTEAGPVLSMCLAFAKQPFPTKSGSCGSVVRNAELKVVEPETGRSLGYNQPGEICVRGSQIMKGYLNDGEATATTVDVEGWLHTGDIGYVDDDDEVFIVDRVKELIKFKGFQVPPAELESLLISHPSMQMQLVVPQKDDAAGEVPVAFVVRSNGGNELTEEAVKEFIAKQVVFYKRLHKVYFVHAIPKSPAGKILRKDLRAKLAAAATPNPHHPI

SEQ ID NO: 28552 - DNA, 1746 bp, Arabidopsis thaliana
  CDS (1)..(1746)
atgaaaatggagggaactatcaaatctccggccaactacgttcctctcactccgatcagcttcctcgatagatctgctgtcgtctacgctgacagagtctccatcgtttatggctccgtcaagtacacgtggcgccagactcgtgaccgctgcgtcagaatcgcctccgctctctcccagctcggaatctctaccggagatgtgttgattccatgctatttggagatcttttctgttcatagatcgaaacttagtttgttgcgttttctgattctcaaggtttcagtgttggctccaaacgttccagctatggttgaattgcattttggtgttcctatggctggagctttgctctgtacactcaacattcgtcatgattcatcacttgttgctgtcttgcttagacattcagggacaaaagtgatttttgcagatcatcagtttctccaaatagctgaaggagcttgtgaaatcctctcaaataaaggtgacaaggtcccgattttggtcttgatcccagagcctcttactcaatctgtttcaaggaagaagagatctgaggaaatgatggaatacgaagatgttgtagcgatggggaaatcggacttcgaggttatacgaccaacagatgagtgtgatgctatatctgttaattacacatcaggtaccacttcaagccccaaaggtgttgtttatagtcacagaggtgcttatttgaattctctggctgcggttttactcaacgaaatgcactcctcgcctacttatctatggactaatcccatgtttcactgcaatggctggtgcttattgtggggtgttactgctattggtgggactaatatatgtttgaggaatgttacggccaaggctatatttgataatatttcccagcataaggtgactcatatgggaggtgcgccgacgatattgaatatgatcatcaatgcgcctgaatctgagcagaaaccgcttcccgggaaggtgtcttttataaccggtgctgcaccgccaccagctcatgtgattttcaagatggaagagttggggttttctatgtttcattcctatgggttaactgaaacttatggaccaggcacaatctgtacatggaagcctgagtgggactctttgcctagagaagaacaggcgaaaatgaaagctcgacaaggcgtgaatcatttagggctcgaggaaatacaagttaaagaccctgtaaccatgagaactttgccagctgatggtgtgactatgggtgaagttgtcttcagaggaaacacggtgatgaatggttacttaaagaaccctgaagcaaccaaggaagcttttaaaggaggttggttttggagtggcgacttaggtgttaaacaccctgacggatacatagagctgaaagacagatcgaaagacattataatctctggaggagaaaacattagctcgattgaagtcgagtctactctgttcactcacccttgtgttcttgaagcagctgtagttgcgaggcctgatgagtattggggtgagactgcttgtgcatttgtgaaacttaaagacgggtctaaggccagtgcggaggagcttattagctattgcagggaccggcttccacattatatggctccgaggagtattgtgtttgaggatcttcctaaaacatcgactggaaaagtccagaagtttgttctgaggaccaaggctaaggctttggtaagcttatcaaagaaaggcagaagcaagttatga

SEQ ID NO: 28553 - protein, 581 aa, Arabidopsis thaliana
MKMEGTIKSPANYVPLTPISFLDRSAVVYADRVSIVYGSVKYTWRQTRDRCVRIASALSQLGISTGDVLIPCYLEIFSVHRSKLSLLRFLILKVSVLAPNVPAMVELHFGVPMAGALLCTLNIRHDSSLVAVLLRHSGTKVIFADHQFLQIAEGACEILSNKGDKVPILVLIPEPLTQSVSRKKRSEEMMEYEDVVAMGKSDFEVIRPTDECDAISVNYTSGTTSSPKGVVYSHRGAYLNSLAAVLLNEMHSSPTYLWTNPMFHCNGWCLLWGVTAIGGTNICLRNVTAKAIFDNISQHKVTHMGGAPTILNMIINAPESEQKPLPGKVSFITGAAPPPAHVIFKMEELGFSMFHSYGLTETYGPGTICTWKPEWDSLPREEQAKMKARQGVNHLGLEEIQVKDPVTMRTLPADGVTMGEVVFRGNTVMNGYLKNPEATKEAFKGGWFWSGDLGVKHPDGYIELKDRSKDIIISGGENISSIEVESTLFTHPCVLEAAVVARPDEYWGETACAFVKLKDGSKASAEELISYCRDRLPHYMAPRSIVFEDLPKTSTGKVQKFVLRTKAKALVSLSKKGRSKL

SEQ ID NO: 28554 - DNA, 1740 bp, Arabidopsis thaliana
  CDS (1)..(1740)
atggagggaactatcaaatctccggccaactacgttcctctcactccgatcagcttcctcgatagatctgctgtcgtctacgctgacagagtctccatcgtttatggctccgtcaagtacacgtggcgccagactcgtgaccgctgcgtcagaatcgcctccgctctctcccagctcggaatctctaccggagatgtgttgattccatgctatttggagatcttttctgttcatagatcgaaacttagtttgttgcgttttctgattctcaaggtttcagtgttggctccaaacgttccagctatggttgaattgcattttggtgttcctatggctggagctttgctctgtacactcaacattcgtcatgattcatcacttgttgctgtcttgcttagacattcagggacaaaagtgatttttgcagatcatcagtttctccaaatagctgaaggagcttgtgaaatcctctcaaataaaggtgacaaggtcccgattttggtcttgatcccagagcctcttactcaatctgtttcaaggaagaagagatctgaggaaatgatggaatacgaagatgttgtagcgatggggaaatcggacttcgaggttatacgaccaacagatgagtgtgatgctatatctgttaattacacatcaggtaccacttcaagccccaaaggtgttgtttatagtcacagaggtgcttatttgaattctctggctgcggttttactcaacgaaatgcactcctcgcctacttatctatggactaatcccatgtttcactgcaatggctggtgcttattgtggggtgttactgctattggtgggactaatatatgtttgaggaatgttacggccaaggctatatttgataatatttcccagcataaggtgactcatatgggaggtgcgccgacgatattgaatatgatcatcaatgcgcctgaatctgagcagaaaccgcttcccgggaaggtgtcttttataaccggtgctgcaccgccaccagctcatgtgattttcaagatggaagagttggggttttctatgtttcattcctatgggttaactgaaacttatggaccaggcacaatctgtacatggaagcctgagtgggactctttgcctagagaagaacaggcgaaaatgaaagctcgacaaggcgtgaatcatttagggctcgaggaaatacaagttaaagaccctgtaaccatgagaactttgccagctgatggtgtgactatgggtgaagttgtcttcagaggaaacacggtgatgaatggttacttaaagaaccctgaagcaaccaaggaagcttttaaaggaggttggttttggagtggcgacttaggtgttaaacaccctgacggatacatagagctgaaagacagatcgaaagacattataatctctggaggagaaaacattagctcgattgaagtcgagtctactctgttcactcacccttgtgttcttgaagcagctgtagttgcgaggcctgatgagtattggggtgagactgcttgtgcatttgtgaaacttaaagacgggtctaaggccagtgcggaggagcttattagctattgcagggaccggcttccacattatatggctccgaggagtattgtgtttgaggatcttcctaaaacatcgactggaaaagtccagaagtttgttctgaggaccaaggctaaggctttggtaagcttatcaaagaaaggcagaagcaagttatga

SEQ ID NO: 28555 - protein, 579 aa, Arabidopsis thaliana
MEGTIKSPANYVPLTPISFLDRSAVVYADRVSIVYGSVKYTWRQTRDRCVRIASALSQLGISTGDVLIPCYLEIFSVHRSKLSLLRFLILKVSVLAPNVPAMVELHFGVPMAGALLCTLNIRHDSSLVAVLLRHSGTKVIFADHQFLQIAEGACEILSNKGDKVPILVLIPEPLTQSVSRKKRSEEMMEYEDVVAMGKSDFEVIRPTDECDAISVNYTSGTTSSPKGVVYSHRGAYLNSLAAVLLNEMHSSPTYLWTNPMFHCNGWCLLWGVTAIGGTNICLRNVTAKAIFDNISQHKVTHMGGAPTILNMIINAPESEQKPLPGKVSFITGAAPPPAHVIFKMEELGFSMFHSYGLTETYGPGTICTWKPEWDSLPREEQAKMKARQGVNHLGLEEIQVKDPVTMRTLPADGVTMGEVVFRGNTVMNGYLKNPEATKEAFKGGWFWSGDLGVKHPDGYIELKDRSKDIIISGGENISSIEVESTLFTHPCVLEAAVVARPDEYWGETACAFVKLKDGSKASAEELISYCRDRLPHYMAPRSIVFEDLPKTSTGKVQKFVLRTKAKALVSLSKKGRSKL

SEQ ID NO: 28556 - DNA, 1716 bp, Arabidopsis thaliana
  CDS (1)..(1716)
atggcggcaacgaagtggcgtgacatcgatgatcttcccaagattccggccaactacacggcgttgactccgctttggttccttgatagggctgccgtggttcatccgaccagaaaatctgtgattcacggatcgcgagagtacacgtggcgccagacttatgaccggtgtcgccgactcgcctccgctctcgccgatcgatcaatcggtcccggttcaacggtattcgtggctattattgcacctaacatcccagcaatgtacgaagctcatttcggagtaccaatgtgtggagctgttctgaattgtgtcaacatccgtctcaatgccccaacagtcgcttttcttcttagtcactcgcagagctctgttataatggtggatcaggagttctttactctggctgaggattctttgagacttatggaggagaaagctggaagtagcttcaaacgcccgcttttaatcgtcattggtgatcacacctgtgctcctgagtcacttaaccgggctttgtcgaagggagctatagaatatgaggattttcttgcaaccggagatccaaattatccgtggcagccaccagctgatgagtggcagagcatcgctcttggttatacctcgggaacaactgctagtccgaaaggagtggtgcttcatcatcgaggtgcgtatataatggctttgagcaatcctctcatttgggggatgcaagatggtgctgtttacttgtggactctccctatgtttcattgcaacggttggtgtttcccttggtcccttgctgtgctctctggtacaagcatctgtctccgtcaggttacggcgaaggaagtgtattcaatgatagccaaatacaaggtaactcatttctgtgcagctcctgtggtcctcaacgctattgtcaatgctcctaaagaagacactatccttcctcttccccatacagtccatgtcatgacagcaggagctgctcctccaccttctgttctcttctccatgaaccagaagggcttccgagtcgctcacacctatgggctttccgagacttatggtccttccaccgtatgcgcttggaaacccgagtgggattccctccctcctgagacgcaggccaagctcaatgctcgccaaggtgtccgctatactggcatggagcagcttgatgtcattgacactcagaccggaaaacctgttcctgcagatggaaaaaccgcaggagaaattgttttccgagggaatatggtgatgaaaggctatctaaagaatccggaagcgaacaaagagacatttgctggtgggtggttccactcgggggatattgcagtgaaacacccagacaactatatcgagatcaaggacaggtcaaaggacgttataatctctgggggcgagaatatcagcagtgtcgaagtcgaaaacgtagtgtaccatcaccccgcggttcttgaagcctctgttgtggccaggccagacgagcggtggcaagaatctccgtgtgcgtttgtgacacttaagagcgattacgagaagcatgaccagaataagttggctcaggatataatgaaattctgccgggagaagcttccggcatattgggtcccaaagtcagtggtgtttgggccgttaccaaagacagcaactggaaaaattcagaagcatattctgaggaccaaggccaaagagatgggaccagtaccaagaagcaggttatag

SEQ ID NO: 28557 - protein, 571 aa, Arabidopsis thaliana
MAATKWRDIDDLPKIPANYTALTPLWFLDRAAVVHPTRKSVIHGSREYTWRQTYDRCRRLASALADRSIGPGSTVFVAIIAPNIPAMYEAHFGVPMCGAVLNCVNIRLNAPTVAFLLSHSQSSVIMVDQEFFTLAEDSLRLMEEKAGSSFKRPLLIVIGDHTCAPESLNRALSKGAIEYEDFLATGDPNYPWQPPADEWQSIALGYTSGTTASPKGVVLHHRGAYIMALSNPLIWGMQDGAVYLWTLPMFHCNGWCFPWSLAVLSGTSICLRQVTAKEVYSMIAKYKVTHFCAAPVVLNAIVNAPKEDTILPLPHTVHVMTAGAAPPPSVLFSMNQKGFRVAHTYGLSETYGPSTVCAWKPEWDSLPPETQAKLNARQGVRYTGMEQLDVIDTQTGKPVPADGKTAGEIVFRGNMVMKGYLKNPEANKETFAGGWFHSGDIAVKHPDNYIEIKDRSKDVIISGGENISSVEVENVVYHHPAVLEASVVARPDERWQESPCAFVTLKSDYEKHDQNKLAQDIMKFCREKLPAYWVPKSVVFGPLPKTATGKIQKHILRTKAKEMGPVPRSRL

SEQ ID NO: 28558 - DNA, 1674 bp, Lolium perenne
  CDS (1)..(1674)
atgggttccgtgccggaggagtcagtggtggcggtggcaccggcggagacggtgttccggtcgaagctccccgacatcgagatcaacaacgagcagacgctgcagagctactgcttcgagaagatggccgaggtcgcgtcccgcccctgcatcatcgacggccagacgggcgcctcctacacctacacggaggtcgactccctgacccgtcgcgccgcggcggggctgcgccgcatgggcgtggggaagggcgacgtggtgatgaacctgctgcgcaactgcccggagttcgccttctccttcctgggcgcggcgcggctgggcgccgccaccaccaccgccaacccgttctacaccccgcacgagatccaccgccaggcggaggcggcgggcgccaagctgatcgtgaccgaggcctgcgccgtggagaaggtgctggagttcgcggcggggcggggcgtgcccgtggtcaccgtcgacgggaggcgcgacgggtgcgtggacttcgcggagctgatcgccggcgaggagctgcccgaggcggacgaggccggggtcctccccgacgacgtcgtcgccctgccctactcctccggcaccaccgggctccccaagggcgtcatgctcacccaccgcagcctcgtcaccagcgtcgcccagctggtcgacgggtcgaaccctaacgtgtgcttcaacaaggacgacgcgctgctgtgcctgctgccgctcttccacatctactcgctgcacacggtgctgctggcggggctccgcgtcggcgccgccatcgtcatcatgcgcaagttcgacgtcggcgcgctggtggacctcgtccgcgcgcaccgcatcaccatcgcgccattcgtgccgcccatcgtcgtggagatcgccaagagcgaccgcgtcggcgccgacgacctcgcatccatccgcatggtgctctccggcgccgcgcccatgggcaaggacctccaggacgccttcatggccaagatccccaacgccgtgctcggacaggggtacgggatgaccgaggctgggccggtgctggccatgtgcctggcgttcgccaaggagccgttcaaggtcaagtccgggtcgtgcggaaccgtggtgcgcaacgccgagctcaaggtcgtcgaccccgacaccggcgcatccctcggccggaaccagcctggcgagatttgcgtccgggggaagcagatcatgataggttacctgaacgacccagagtcgaccaagaacaccatcgacaaggacggctggctgcacaccggagacatcggcttggtggatgacgacgacgagatcttcatcgtcgacaggctcaaggagatcatcaagtacaagggcttccaagtggcgccggcggagctcgaggccctcctcctcacgaacccggaggtcaaggacgccgccgtcgtaggggtgaaggatgatctctgcggcgaagtcccggtcgccttcattaagaggatcgaaggatctgagatcaacgagaacgagatcaagcaattcgtctcaaaggaggttgttttctacaagaggatcaacaaggtctacttcaccgactccattcccaagaacccttccggcaagatcctaaggaaggacttgagagccaggctcgccgctggcatccccaccgaagttgccgcgccgagaagctaa

SEQ ID NO: 28559 - protein, 557 aa, Lolium perenne
MGSVPEESVVAVAPAETVFRSKLPDIEINNEQTLQSYCFEKMAEVASRPCIIDGQTGASYTYTEVDSLTRRAAAGLRRMGVGKGDVVMNLLRNCPEFAFSFLGAARLGAATTTANPFYTPHEIHRQAEAAGAKLIVTEACAVEKVLEFAAGRGVPVVTVDGRRDGCVDFAELIAGEELPEADEAGVLPDDVVALPYSSGTTGLPKGVMLTHRSLVTSVAQLVDGSNPNVCFNKDDALLCLLPLFHIYSLHTVLLAGLRVGAAIVIMRKFDVGALVDLVRAHRITIAPFVPPIVVEIAKSDRVGADDLASIRMVLSGAAPMGKDLQDAFMAKIPNAVLGQGYGMTEAGPVLAMCLAFAKEPFKVKSGSCGTVVRNAELKVVDPDTGASLGRNQPGEICVRGKQIMIGYLNDPESTKNTIDKDGWLHTGDIGLVDDDDEIFIVDRLKEIIKYKGFQVAPAELEALLLTNPEVKDAAVVGVKDDLCGEVPVAFIKRIEGSEINENEIKQFVSKEVVFYKRINKVYFTDSIPKNPSGKILRKDLRARLAAGIPTEVAAPRS

SEQ ID NO: 28560 - DNA, 1671 bp, Lolium perenne
  CDS (1)..(1671)
atgggctccatcgcggcggacgcgcctcccgcggagctggtgttccggtccaagctcccggacatcgagatcccgacccacctgacgctgcaggactactgcttccagcgcctgccggagctctccgcgcgcgcctgcctcatcgacggcgccacgggcgccgcgctcacctacggcgaggtggacgccctgtcccgccgctgcgccgcggggctgcgccgcctcggcgtcggcaagggcgacgtcgtcatggcgctcctccgcaactgccccgagttcgccttcgtgttcctcggcgcggcccggctcggcgccgccaccaccaccgccaacccgttctacacgccccacgagatccaccgccaggccaccgccgccggggccagggtcatcgtcaccgaggcctgcgccgtcgagaaggtgcgcgccttcgccgccgagagagggattcccgtcgtctccgtcgacgagggcgtcgacggcggctgcctcccgttcgccgagactctgctcggggaagaaagcggggagcggttcgtcgacgaggcggtcgaccccgacgacgtggtggcgctgccgtactcgtccggcaccaccggcctgcccaagggcgtcatgctcacccaccgcagcctcgtcaccagcgtcgcccagcaggtggacggtgagaacccgaacctgcacttcagctcgtcggacgtgctgctgtgcgtgctgccgctgttccacatctactcgctcaactcggtgctgctcgccggtctccgcgccgggtgcgcgatcgtgatcatgcgcaagttcgaccacggcgcgctggtggacctggtgcgcacgcacggcgtcaccgtggcgccattcgtgccgcccatcgtggtggagatcgccaagagcgcgcgggtgaccgccgcggacctggcgtccatccggctggtcatgtcgggggcggcgcccatgggcaaggagctgcaggacgcgttcatggccaagatccccaacgccgtgctcggccagggatatgggatgaccgaggccggccctgtgctggcgatgtgcctggccttcgccaaggagccgttcgcggtcaagtccggttcctgcggcaccgtcgtcaggaacgccgagctcaagatcgtcgaccccgacaccggcgcctccctcggccgcaacctgccgggggagatctgcatccgcggcaagcagatcatgaaaggttacctaaatgatccggtggccacaaagaacaccattgacaaggacggttggctgcatactggtgacattggttatgtcgatgatgacgacgagatctttattgtcgacagactgaaggagataattaaatataagggattccaagtacctccggcggaacttgaagcccttctcattacacaccctgaaatcaaggatgctgctgtcgtatcgatgcaagacgaacttgctggtgaagttccggttgcgtttgttgtgcggactgagggttcagagatcagcgaaaacgagatcaagcagttcgttgcaaaagaggttgttttctacaagaggatctgcaaagtgttcttcgcggattccattccaaagagtccatctggcaagatcctcaggaaggacctgagagcaaagctcgccgcaggcattcccagcagtaataccacacagtccaaaagctaa

SEQ ID NO: 28561 - protein, 556 aa, Lolium perenne
MGSIAADAPPAELVFRSKLPDIEIPTHLTLQDYCFQRLPELSARACLIDGATGAALTYGEVDALSRRCAAGLRRLGVGKGDVVMALLRNCPEFAFVFLGAARLGAATTTANPFYTPHEIHRQATAAGARVIVTEACAVEKVRAFAAERGIPVVSVDEGVDGGCLPFAETLLGEESGERFVDEAVDPDDVVALPYSSGTTGLPKGVMLTHRSLVTSVAQQVDGENPNLHFSSSDVLLCVLPLFHIYSLNSVLLAGLRAGCAIVIMRKFDHGALVDLVRTHGVTVAPFVPPIVVEIAKSARVTAADLASIRLVMSGAAPMGKELQDAFMAKIPNAVLGQGYGMTEAGPVLAMCLAFAKEPFAVKSGSCGTVVRNAELKIVDPDTGASLGRNLPGEICIRGKQIMKGYLNDPVATKNTIDKDGWLHTGDIGYVDDDDEIFIVDRLKEIIKYKGFQVPPAELEALLITHPEIKDAAVVSMQDELAGEVPVAFVVRTEGSEISENEIKQFVAKEVVFYKRICKVFFADSIPKSPSGKILRKDLRAKLAAGIPSSNTTQSKS

SEQ ID NO: 28562 - DNA, 1713 bp, Lolium perenne
  CDS (1)..(1713)
atgatcacggtggcggcgcccgaggtgcagcagccgcagatcgcggcggctgctgcggccgtggaggcggcggcaccggaggcgacgacgatcttccggtccaggctcccggacatcgacatcccgacccacatgcccctgcacgactattgcttcgcgacggcagcctcggccccggacgcgccgtgcctcatcaccgcggccacggggaagacctacacgttcgccgagacgcacctgctgtgccgcaaggccgcggcggcgctgcacgggctcggcgtgcgccacggggaccggatcatgctgctgctccagaactccgtggagttcgcgctcgccttcttcggcgcgtccatgctcggcgccgtcagcacggcggcgaacccgttctgcacgccgcaggagatccacaagcagctcgtggcctccggcgcgaagctggtcgtcacgcagtccgcctacgtcgacaagctccggcacgaggccttcccccgaatcggcgaggccctcaccgtgatcaccatcgacgaggacgacggcaccccggacggctgccagccgttctgggccctcgtgtcagccgccgacgagaacagcgtcccggagtctcccatctcgccggacgacgcggtggcgctgccctactcgtcgggcacgacggggctgcccaagggcgtggtgctgacgcacggggggctggtgtcgagcgtggcgcagcaggtggacggcgagaacccgaacctgcacatgcgggcgggggaggacgtggtgctctgcgtgctgccgctcttccacatcttctcgctcaactcggtgctgctgtgcgcgctgcgggcgggcgccgccgtgatgctgatgcctaggttcgagatgggggccatgctggagggcatcgagcggtggcgcgtcacggtggcggccgtggtgccgccgctggtgctcgcgctcgccaagaaccccggggtggagaagcacgacctcagctccattcggatcgtgctctccggcgccgcgccgctcggcaaggagctcgaggacgcgctacgtggccgcctgccgcaggccatcttcggacagggctacgggatgacggaggccgggccggtgctgtccatgtgcccggcgttcgcgcgggagccgacgccggccaagtccggctcgtgcggcaccgtggtgcgcaacgcccagctcaaggtggtcgaccccgacaccggcgtctccctcggccgcaacctccccggcgagatctgcatccgcggcccgcagatcatgaaaggatacttgaatgatcccgtggccacggccgcgaccatcgacgtcgaggggtggctccacaccggcgacatcggctacgtcgacgacgacgacgaggtcttcatcgtcgaccgcgtcaaggagctcatcaagttcaagggcttccaggtaccgccggccgagctcgaggctctgctcatcgcgcatccgtccatcgccgacgcggccgtcgtcccgcaaaaggatgatgccgccggcgaggtcccggttgccttcgtggtccgcgccgccgactccgacatcgccgaggaggccatcaaggagttcgtatccaagcaggtggtgttctacaagaggctgcacaaggtctacttcacccacgcgatacccaagtcggcgtcggggaagatactcaggaaagaactcagagctaaactcgccgccccggccactgcctga

SEQ ID NO: 28563 - protein, 570 aa, Lolium perenne
MITVAAPEVQQPQIAAAAAAVEAAAPEATTIFRSRLPDIDIPTHMPLHDYCFATAASAPDAPCLITAATGKTYTFAETHLLCRKAAAALHGLGVRHGDRIMLLLQNSVEFALAFFGASMLGAVSTAANPFCTPQEIHKQLVASGAKLVVTQSAYVDKLRHEAFPRIGEALTVITIDEDDGTPDGCQPFWALVSAADENSVPESPISPDDAVALPYSSGTTGLPKGVVLTHGGLVSSVAQQVDGENPNLHMRAGEDVVLCVLPLFHIFSLNSVLLCALRAGAAVMLMPRFEMGAMLEGIERWRVTVAAVVPPLVLALAKNPGVEKHDLSSIRIVLSGAAPLGKELEDALRGRLPQAIFGQGYGMTEAGPVLSMCPAFAREPTPAKSGSCGTVVRNAQLKVVDPDTGVSLGRNLPGEICIRGPQIMKGYLNDPVATAATIDVEGWLHTGDIGYVDDDDEVFIVDRVKELIKFKGFQVPPAELEALLIAHPSIADAAVVPQKDDAAGEVPVAFVVRAADSDIAEEAIKEFVSKQVVFYKRLHKVYFTHAIPKSASGKILRKELRAKLAAPATA

SEQ ID NO: 28564 - DNA, 1650 bp, Bacillus subtilis
  CDS (1)..(1650): transl_table=11
atggctgaactcatccattccacaatcggcagactgctggaacaaatcgctgaaacctatcccgatcaagaagcggttgtttatccagacagaaaaattcgctatacgtacgctcaatttgacagtctgtgccgtcgaaccgctaaaggactcatgcggatggggattgggaaaggagaccacgtagccatatgggcttcgaatatcctcgaatggcttgccgttcagttcgccaccgccaaaatcggagctgtgctcgtgaccgtcaatactaattatcaagcacacgaactcgattacttgttaaagcaatcggatgctaccgctcttattgtcatggattcatatcggggcacttcttacacagacattctgaagagcctcattccagagctgcaagaaacagaacctggccagctgaaatcagaacgatacccctttttaaaaacgctgatctatattggcgataaacgttttccgggtatgtatcattgggacgatacagagatactggcgaaaacagtgtcggatgctgagctggaagccagaatgaacagccttgaaaaagacgatgtgattaacatgcaatacacatcaggaacgacagggtttcctaaaggggtaatgctgacccattttaatgttatcaataatgctgccaatatcgctgaatgtatggtattaacctctcaagaccgcatgtgcatcccggttccgttttttcattgcttcggatgcgtgcttggggttttagcgtgtgtgtccgtcggagcaaccatgatacctgtacaagaatttgatcccgtgaccgtccttaaaacggtagaaaaagagaaatgcacagcgctccacggtgtgccgaccatgtttatcgccgagctgcatcatccggattttaatgcatatgatctatcgaccctccgaacaggcattatggctgggtctccttgtccaagtgaagtgatgaaagctgttattgaaaagatgggcatgaaagacattacgatcgcctatggacaaaccgaagcatcaccggtcattacgcaaacgagggcaaatgattccttcttaaggagagtcgaaacaaccggccgcgccctgccgcatgcagaagtgaaaattgtagaacccgggacatatcaagaagttcaaagaggcgggcagggagagctttgcacccgcggctatcacgttatgaaaggctattataaagacgaagaagcgaccagaaaagcaatcaatcccgatggatggctgtttaccggagatcttgctgtcatggacgaagacggatactgccgcatcaccggaagattaaaagacatgctcattagaggcggtgagaacatttacccgcgggaaatcgaagaatttttataccggcaccctgatattttagatgtacaggtcgttggtgtgcctgacgccaaattcggagaggaggccgcagcctggattaaactgaaagacggaaaaaccgcttcgcctgaagaacttaaggactattgcaaagggaaaatcgcccgccacaaaattccgcgttatgttatttttacagacgagtatccgatgacggcttcaggcaaaattcaaaaatataaactgcgtgaaaaaacgattgaaatgttcaacttatcatcatgtcaatga

SEQ ID NO: 28565 - protein, 549 aa, Bacillus subtilis
MAELIHSTIGRLLEQIAETYPDQEAVVYPDRKIRYTYAQFDSLCRRTAKGLMRMGIGKGDHVAIWASNILEWLAVQFATAKIGAVLVTVNTNYQAHELDYLLKQSDATALIVMDSYRGTSYTDILKSLIPELQETEPGQLKSERYPFLKTLIYIGDKRFPGMYHWDDTEILAKTVSDAELEARMNSLEKDDVINMQYTSGTTGFPKGVMLTHFNVINNAANIAECMVLTSQDRMCIPVPFFHCFGCVLGVLACVSVGATMIPVQEFDPVTVLKTVEKEKCTALHGVPTMFIAELHHPDFNAYDLSTLRTGIMAGSPCPSEVMKAVIEKMGMKDITIAYGQTEASPVITQTRANDSFLRRVETTGRALPHAEVKIVEPGTYQEVQRGGQGELCTRGYHVMKGYYKDEEATRKAINPDGWLFTGDLAVMDEDGYCRITGRLKDMLIRGGENIYPREIEEFLYRHPDILDVQVVGVPDAKFGEEAAAWIKLKDGKTASPEELKDYCKGKIARHKIPRYVIFTDEYPMTASGKIQKYKLREKTIEMFNLSSCQ

SEQ ID NO: 28566 - DNA, 1551 bp, Arabidopsis thaliana
  CDS (1)..(1551)
atggaaggaacaatgaggtgctcagcgaattacgtcccgctttctccgatcagctttctcgagagagctgctgtcgtcttcggctccagaacctctgtcgtgtatggtgatattcagtacacgtggcaccaaacacgtgaccgttgcgtccgccttgcatctgctctctctgaccttggtctctctcgccatgacgttgtggctgctttagcgccaaatgttcctgcgttatgcgagctttattttggagctccgatggctggagcagtactttgcgtgttgaacacgacattcgattctcagatgcttgcgatggcgctggagaaaacgaagccaaaagtattcttcgttgactctgagttcctctctgtcgctgaagaatctctcagtctcctctcaaacattgaagaaaaacctctcatcatcacaatcacagaaaatccaacagagcaatcaaaatatgaacaatacgaggattttctctccactggaaaccctaatttcaaaccaatacgaccagttgacgaatgtgatccaatcgccctcaacttcacatctggaaccacatcgactcccaaatgtgtcgtctatagtcatcgcggtgcctatctgaacgcaactgctgttggtgttatgaatgagatgaaaccaatgccggtttatctatgtacagttcctatgtatcattgtagcgggtggtgctatatttggacagttacggcttttggaggagtcatcgtctgtctcagggaagtcaacgacgaagttatatttgatagtatcgtgaagcacaaggtaactaactttggtggctcgcctccggttctcaacatgattgctaatgcaagagactcggtcaagaagtcgtttccatggaccgtacaggttatgagcggaggatcctctcctcctgaggtcatgttgaaactcaagaagctaggattcaaagtgatgatggcttatggatgctcggaggtgtatggactaggaacagcttgtttgtggatgcccgagtgggagactctacctgaagaggagagtttaaggctcaaggcaagagatggtctcaaccatttcgccaaggaagctgtcgatgtattggacccaaccaccatgaaatcggttccacacgacggaaagactatcagggtaattgctctccggggaaatacagtcatgagcggttacttcaaggacaaggaagccactgaagcggcttttcgaggtggatggtactggagtcgcgacatgggtgttatagatcctgatggtcacccggcggtttatgacgcaggggtcgtgggtcgaccggacgaaactttaggagaatcgatgtgtgctttcgtgaagctcaaagaaggagctgaagcgagagaggaagagatcattgagttctgcaagagaaagcttgggaataagaacatgaagatgattccaaagacagtagtcttctcggatgttcctaagactcccactgggaagattcgaaagaatgttctgagaaagatggccaaggatatgggttatgttcaattgagagctgtggagtaa

SEQ ID NO: 28567 - protein, 516 aa, Arabidopsis thaliana
MEGTMRCSANYVPLSPISFLERAAVVFGSRTSVVYGDIQYTWHQTRDRCVRLASALSDLGLSRHDVVAALAPNVPALCELYFGAPMAGAVLCVLNTTFDSQMLAMALEKTKPKVFFVDSEFLSVAEESLSLLSNIEEKPLIITITENPTEQSKYEQYEDFLSTGNPNFKPIRPVDECDPIALNFTSGTTSTPKCVVYSHRGAYLNATAVGVMNEMKPMPVYLCTVPMYHCSGWCYIWTVTAFGGVIVCLREVNDEVIFDSIVKHKVTNFGGSPPVLNMIANARDSVKKSFPWTVQVMSGGSSPPEVMLKLKKLGFKVMMAYGCSEVYGLGTACLWMPEWETLPEEESLRLKARDGLNHFAKEAVDVLDPTTMKSVPHDGKTIRVIALRGNTVMSGYFKDKEATEAAFRGGWYWSRDMGVIDPDGHPAVYDAGVVGRPDETLGESMCAFVKLKEGAEAREEEIIEFCKRKLGNKNMKMIPKTVVFSDVPKTPTGKIRKNVLRKMAKDMGYVQLRAVE

SEQ ID NO: 28568 - DNA, 1656 bp, Arabidopsis thaliana
  CDS (1)..(1656)
atggataatcttgcgttatttgaagcaaacaacgttcctctaacgcccataacgttcttgaagagagcttctgagtgttatcccaatcgaacttcgataatctacggacaaactcgtttcacttggcctcagacctatgaccgttgctgtcgtttcgatttggctccaaacataccggccatgtatgagatgcattttgctgttcccatgaccggagctgtacttaatcctattaacacgcgtcttgacgctaaaaccatagccatcatcctccgccacgcccagccaaagtgtttattcgtggactacacgtttgctcctttgatccaagaagtcctccgtctcttaccatttgacgcttcaaaacttcacccgctaatcatatccatcattgagattgattccactacgaagcgttcctccatggagttagactacgagggtctcatccgtaaaggagatcttacgctctcttcgtcagcaagtttgttccgtgtccacaatgagcatgacccgatctctttgaattacacttctggcaccacgtccgaaccaaaaggtgtgattcttggctgggaaatgggcatgtgcccggtctacctctggacccttccaatgtttcatggaaatgggtgggcgcacacatggtccgtcgctgcacgtgggggcaccaatgtatgcatcagaaatgtgacggctgtagaaatatataagaacataggattgcatggcgtgacgcacatgtcttgtgttccaactgtatttagaattctcctcgaaggaagtcgaaccaaccagtcacacaagtccttgcctgttcgggtactaactggtggttcatccccgccggctgcacttcttgagaaggttgaacggttggggtttcaggtgatgcacgtatatggacttactgaggcttccggtgcagctctctattgtgagtggcaggacgagtggaacaggctaccaaagcatcaacagatgaagctgaaagcaaggcaaggggtaaggaacataaccctagatgaagttgacgtgaagaacacgaaaactcgggagagtgtcccacgcgacgggataacgatgggagaaattgtcctcaaaggaaatatagttatgaaagggtatttaaagaaccctaaagcaacatctgaggtgtttaaacacggatggctcaacactggagacataggtgtgattcatcctgatgggcacatagagatcaaagatcgatccaaagacattatcatctcgggaggtgagaacataagtagtattgaggtcgagagagttctttacgagcaccagaaagtgctcgaggccgcggttgtggccatgcctcaccctttgtggggtgaaacgccgtgtgcctttgttgttttaaaccaaggtgaaaccaatcaaagagatcgtgaaaaggaatcggtgacgaaagaaggagatttgattaagtattgccgtgagaatatgccgcattttatgtgtccgaggaaagtagtgttcttggaagaactgccaaagaatgggaacggaaagatacttaagcctaatctgagtctgagagatatcgctaaaggtttggttgtcgatgaggacgatacccgttccaagaaagttcaaggacgcggtggtaacaacgttagttccaggctttaa

SEQ ID NO: 28569 - protein, 551 aa, Arabidopsis thaliana
MDNLALFEANNVPLTPITFLKRASECYPNRTSIIYGQTRFTWPQTYDRCCRFDLAPNIPAMYEMHFAVPMTGAVLNPINTRLDAKTIAIILRHAQPKCLFVDYTFAPLIQEVLRLLPFDASKLHPLIISIIEIDSTTKRSSMELDYEGLIRKGDLTLSSSASLFRVHNEHDPISLNYTSGTTSEPKGVILGWEMGMCPVYLWTLPMFHGNGWAHTWSVAARGGTNVCIRNVTAVEIYKNIGLHGVTHMSCVPTVFRILLEGSRTNQSHKSLPVRVLTGGSSPPAALLEKVERLGFQVMHVYGLTEASGAALYCEWQDEWNRLPKHQQMKLKARQGVRNITLDEVDVKNTKTRESVPRDGITMGEIVLKGNIVMKGYLKNPKATSEVFKHGWLNTGDIGVIHPDGHIEIKDRSKDIIISGGENISSIEVERVLYEHQKVLEAAVVAMPHPLWGETPCAFVVLNQGETNQRDREKESVTKEGDLIKYCRENMPHFMCPRKVVFLEELPKNGNGKILKPNLSLRDIAKGLVVDEDDTRSKKVQGRGGNNVSSRL

SEQ ID NO: 28570 - DNA, 1638 bp, Solanum tuberosum
  CDS (1)..(1638)
atgccgatggataccgaaacaaagcaatcaggagatttaatctttcgatctaaactccctgatatttacatccctaaacatttgcctttacattcttattgctttgaaaatctatcggagtttaattcccggccctgtttgattgatggtgcaaatgatcgaatctatacttatgctgaagttgaacttacttcgagaaaagttgctgttggtcttaacaaattggggatccaacagaaggatacaatcatgatccttttgcctaattgccctgaatttgtgtttgcgtttattggcgcatcgtatctaggagcaatttcaacaatggctaaccccctgtttacaccagcagaggtagtaaagcaagccaaagcctcaagtgctaagattattatcacgcaagcttgttttgcggggaaagtgaaggattacgcaattgaaaatgatttgaaggtaatatgcgtcgattcagcaccggaaggttgtgttcatttctccgaattgattcaatccgacgaacacgaaattcctgatgtgaaaatccagccggacgatgtcgtagcgctgccgtattcctccgggactaccgggctgccgaaaggggtgatgttgacacacaaaggattagtaacaagcgttgcacaacaagttgatggagaaaatgctaatttgtatatgcacagcgatgatgtgttgatgtgtgtgttgcctttgttccatatttactcactcaattctgttttgctctgtgcattgagagtcggagcagcaattttgattatgcagaaattcgacattgctcagtttttagagttgataccgaagcataaagtgacaattggaccatttgttccgcctattgttctcgccattgctaagagtccattagttcataactacgatctttcatcagtaagaacagtcatgtctggtgctgcaccattaggaaaggaacttgaagatgccgtccgagcaaaattccctaacgccaaactcggtcagggttatggaatgacggaagccggtactgtgctgacgatgtgtttggcatttgcgaaagaaccgtttgatattaaatcaggggcatgtggtactgttgtgaggaacgcggagatgaaaattgtggatccggatacgggttgctctctgccccgtaaccaacccggtgaaatttgcattagaggtgatcaaatcatgaaaggttatttgaatgatcctgaggccacagctagaacaatagaagaagaaggatggttacacactggcgatattggattcattgacgatgatgatgagcttttcattgtggaccgattgaaggaattgatcaaatacaaaggatttcaagtggcgcctgccgagcttgaagctcttcttatcaaccaccccgacatttctgatgctgctgttgtcccaatgatagatgaacaagcgggagaagttccagtggcttttgttgttagatcaaatggatctaccattactgaggatgaagtcaaggatttcatctccaagcaggtgatattctataagagaataaagcgtgtatttttcgtagagacggtaccaaaatctccgtcaggaaaaattctgagaaaagatttaagagctagactggctgctggtatttcaaattga

SEQ ID NO: 28571 - protein, 545 aa, Solanum tuberosum
MPMDTETKQSGDLIFRSKLPDIYIPKHLPLHSYCFENLSEFNSRPCLIDGANDRIYTYAEVELTSRKVAVGLNKLGIQQKDTIMILLPNCPEFVFAFIGASYLGAISTMANPLFTPAEVVKQAKASSAKIIITQACFAGKVKDYAIENDLKVICVDSAPEGCVHFSELIQSDEHEIPDVKIQPDDVVALPYSSGTTGLPKGVMLTHKGLVTSVAQQVDGENANLYMHSDDVLMCVLPLFHIYSLNSVLLCALRVGAAILIMQKFDIAQFLELIPKHKVTIGPFVPPIVLAIAKSPLVHNYDLSSVRTVMSGAAPLGKELEDAVRAKFPNAKLGQGYGMTEAGTVLTMCLAFAKEPFDIKSGACGTVVRNAEMKIVDPDTGCSLPRNQPGEICIRGDQIMKGYLNDPEATARTIEEEGWLHTGDIGFIDDDDELFIVDRLKELIKYKGFQVAPAELEALLINHPDISDAAVVPMIDEQAGEVPVAFVVRSNGSTITEDEVKDFISKQVIFYKRIKRVFFVETVPKSPSGKILRKDLRARLAAGISN

SEQ ID NO: 28572 - DNA, 1686 bp, Streptomyces tendae
  CDS (1)..(1686): transl_table=11
gtgagttcattccgtcccgaggatccgggcctcccgaggattccgccggagcgcgcgcgggagtaccgcgaccgcgggtggtggcgtcccgagcgggtcgaccggctggtgctgcggcacgtggccgaggatcccgagaaggaggccgtccgcggccccggcggccggctgacccggcgcgagctggcggacgcggtcgccggcgccgccgcccggctggccggcctcgggatcgcgcgcggggaccgtgtcctggtccagctccccaacgacctggagctgatcgtcctgccgctggcgctgatgcggctgggcgcccacccggtgatggcggtgcccacgctgcgccgccgcgagctgctggcggtcgtggcggccacccggcccacggccgtggccgtaccacaccgctggcagcgcttcgaccatgtcgcgctggcgagggaactgcgggagagctgtccgggcatccggcacatcctggtcgccgacgcgccgcgggacgccgttcccgaaggcaccgaggacctggtcgagctgtgccgaccggaccccggggcgaggcccctgcccgatctggggccgccgctggccgatgagcccgccgtcttcctgctgtccagcgggaccaccggcccgccgaagcagtccgcgcgcgcccacgagggctacggctacatgatccgcacggccgcccggtgggccgggctgtcaccggacacggtgtacctcgccgtcatgtcgggggcgcacgggttcgtcctcaactgccccggcatgttcggcgccctggccttcggcggccgggtcgtcctgggctcgccgggagatcccggggcggcgctcgacctcatcgaccgggagggggtgacgcacacgacgctggtgcccgcgctgatcacccagtggctgagcgaggccggacggcgggggcgcgggccgacgtcgctgcgcgtgctccaggccggcggcgcccgtctggagcccgccccggcggccgaggcgcacaagctgctcggctgtacggtgcagcagtgctacggcatgagcgaggggctgctgacctacaccgcgctggacgaccccgatgacgtcatcgcccacacccaggggcggcccgcctcacccggcgacgagatccgcatcgtggccgaggacggcaccgaagtggcacccggcgagacgggagaagtgctgaccagggggcgcgacacggtcgccgggtactacgcggcgccggacgccgacgcgcgcgccttcaccgacgacggcttctaccgcaccggcgacctggcacggctccacccatcgggcgggctggtggtggagggccggatcggtgacgtcatcaaccgcggcggggagaagatctccgccggggagatcgaatcgctgctcgccgagcaccccctgctgcgggcggtcgcggcggtcgcgatgccgcacccggtgtgggggcagacggtctgcgtcttcgccgtcccctccgacccggagaagcagccgacgctgctcggcctgcgccgcttcctcaccgagcgcggcatcgccacgtacaaactgcccgaggacataagggtggtcgacgccctcccgatgatcggcgtcggcaagatcaaccgggtcgcgctccgtgcggcggcagcggaccggcaggcccgagaggaacgggaacccaccccatga

SEQ ID NO: 28573 - protein, 561 aa, Streptomyces tendae
VSSFRPEDPGLPRIPPERAREYRDRGWWRPERVDRLVLRHVAEDPEKEAVRGPGGRLTRRELADAVAGAAARLAGLGIARGDRVLVQLPNDLELIVLPLALMRLGAHPVMAVPTLRRRELLAVVAATRPTAVAVPHRWQRFDHVALARELRESCPGIRHILVADAPRDAVPEGTEDLVELCRPDPGARPLPDLGPPLADEPAVFLLSSGTTGPPKQSARAHEGYGYMIRTAARWAGLSPDTVYLAVMSGAHGFVLNCPGMFGALAFGGRVVLGSPGDPGAALDLIDREGVTHTTLVPALITQWLSEAGRRGRGPTSLRVLQAGGARLEPAPAAEAHKLLGCTVQQCYGMSEGLLTYTALDDPDDVIAHTQGRPASPGDEIRIVAEDGTEVAPGETGEVLTRGRDTVAGYYAAPDADARAFTDDGFYRTGDLARLHPSGGLVVEGRIGDVINRGGEKISAGEIESLLAEHPLLRAVAAVAMPHPVWGQTVCVFAVPSDPEKQPTLLGLRRFLTERGIATYKLPEDIRVVDALPMIGVGKINRVALRAAAADRQAREEREPTP

SEQ ID NO: 28574 - DNA, 1698 bp, Pseudomonas putida
  CDS (1)..(1698): transl_table=11
atgcaagcgatgtgtcatccttacctcagggcctcaacacatcagtgccagcgcaatctgttatggcgtgcatacgcaactggtattacttgccccggcttcacgctgtttagcatcgagcgggtcttaaccgtcgacgagaacaacaacgtgaaccttggaaccctatccagtcgaagtgccagatattggcctgaacgtctggcggtaatcgaccgccacacccggctgaccttcgctcagctcgaacagcgggccaaccagctggcctcggccttgctggcacagggcatcgccacgggcgagcatgtcgccatcctggcgccaaaccgcgccgaactggtggaagcagaggtggctttctacaaggccggcctggtcaaggtaccggtcaatgcgcgtctggcaccggatgaagtcattcaggtgctcaacgacgcctgcagtgtcgcactgatcgccgatgcgcaactcgcccaggcgttgctggaccgcaggcaggaggtaccttcattacgcttgatcgtgaccttgggtgagcggggcggtgacatcacctatgccgcgctgctggcacaaggcagtagccagccaatcagctgcgacctgcctgacgatgctcttgccgttttgcattacacctcaggcagctctggtgtgctcaaggctgcgatgctcagcgtgggcaaccgcaaggcgctaatccgcaagagcctcgccagcccgacccgtcgcgccgccccgggcgacgtcatggctcacgtcggccctatcacccatgccagcggcatgcagctgatgccgctgctggcggtcggtgcctgcaacctgctgctggagcgctacgatgaccagctgttgctcgagaccatccagcgcgaaggcgtgacccgcttgttcctggtgcctgccatgatcaatcgcctggtcaacttccccgatgtcgagcgctacgacctgaacagcttgcgcctggtcatgtacggtgccgcgccgatggcaccagcgctggtgaaacgggccatcgaggtattcgggccgatcctggcccagggttacggtgctggcgagacctgctcgctggtaaccgtcctgaccgaacaggaccatctgtgcgagggcggcgactaccggcgcctggcctcgtgcgggcgttgctacttcgaaaccgacctgcgcgtggtgaacgaccatttccaggacgtccagccgggagaggtgggcgaaatcgtagtcaagggcccggacatcatgcagggctactggcgcgccccccacctcaccgccgaggtaatgcgcgacggctactacctgactggcgacctggccacggtggatgagcaggggtatgtgttcatcgtcgaccgcaagaaagaaatgatcatttccggtggcttcaacatttaccccagtgaggtcgagcaggtgctctacagcatgccgcaggtgttcgaggcggcagtggtgggggtgcctgacgagcagtggggcgaagcggtgcgggcggtgatcgtgctcaagccgggcatggcgctgcaggagcaggacgtcatcgaacattgcgcccaggccctggccggtttcaagaaaccacgtgccgtggacttcgtcagcgagctgccgaaaaaccccaacggcaaggtggtgcgccggttgatccgtgacgcctactggcaaaacagcgaacgccgtatctga

SEQ ID NO: 28575 - protein, 565 aa, Pseudomonas putida
MQAMCHPYLRASTHQCQRNLLWRAYATGITCPGFTLFSIERVLTVDENNNVNLGTLSSRSARYWPERLAVIDRHTRLTFAQLEQRANQLASALLAQGIATGEHVAILAPNRAELVEAEVAFYKAGLVKVPVNARLAPDEVIQVLNDACSVALIADAQLAQALLDRRQEVPSLRLIVTLGERGGDITYAALLAQGSSQPISCDLPDDALAVLHYTSGSSGVLKAAMLSVGNRKALIRKSLASPTRRAAPGDVMAHVGPITHASGMQLMPLLAVGACNLLLERYDDQLLLETIQREGVTRLFLVPAMINRLVNFPDVERYDLNSLRLVMYGAAPMAPALVKRAIEVFGPILAQGYGAGETCSLVTVLTEQDHLCEGGDYRRLASCGRCYFETDLRVVNDHFQDVQPGEVGEIVVKGPDIMQGYWRAPHLTAEVMRDGYYLTGDLATVDEQGYVFIVDRKKEMIISGGFNIYPSEVEQVLYSMPQVFEAAVVGVPDEQWGEAVRAVIVLKPGMALQEQDVIEHCAQALAGFKKPRAVDFVSELPKNPNGKVVRRLIRDAYWQNSERRI

SEQ ID NO: 28576 - DNA, 1515 bp, Rhizobium leguminosarum
  CDS (1)..(1515): transl_table=11
gtgagcaaccatcttttcgacgccatgcgggccgccgcgcccggtaacgcaccattcatccggatcgataacacgcgcacatggacctatgacgacgccttcgctctttccggccgcattgccagcgcgatggacgcgctcggcattcgccccggcgaccgcgttgcggtgcaggtcgagaaaagtgccgaggcattgatcctctatctcgcctgtcttcgaagcggcgccgtctacctgccgctcaacaccgcctatacgctggctgagctcgattattttatcggcgatgcggagccgcgtttggtggttgtcgcatcgtcggctcgagcgggcgtggagacaatcgccaagccccgcggtgcgatcgtcgaaactctcgacgctgctggcagcggctcgttgctggatctcgcccgcgacgagccggccgactttgtcgatgcctcgcgctccgccgatgatctggcggcgatcctctacacgtccggaacgacgggacgctccaagggggcgatgctcacgcatgggaacctgctctcgaacgccctgaccttgcgagatttttggcgcgtcaccgccggcgatcgactgatccatgccttgccgatcttccacacgcatggactgttcgtcgccacgaacgtcacactgctcgccggcgcctcgatgttcctgctgtcgaagttcgacccggaggagatcctgtcgctgatgccgcaggcaacgatgctgatgggcgtgccgaccttctacgtgcgcctcctgcagagcccgcgcctcgacaagcaagcggtcgccaacatccgcctcttcatttccggttcggctccactgcttgcagaaacacataccgagttccaggcacgtaccggtcacgccattctcgagcgctacggcatgacggaaaccaatatgaacacgtccaacccttatgaggggaaacggattgccggaacggtcggcttcccgctgcctgatgtgacggtgcgcgtcaccgatcccgccaccgggctcgcgctgccgcccgaacaaaccggcatgatcgagatcaaggggccgaacgttttcaagggctattggcgcatgcccgaaaaaaccgcggccgaattcaccgccgacggtttcttcatcagcggcgatctcggcaagatcgaccgcgacggttatgtccacatcgtcggccgcggcaaggatctggtgatttcgggtggatacaacatctatccgaaagaggttgagggcgagatcgaccagatcgagggtgtggttgagagcgctgtgatcggcgtgccgcatcccgatttcggagaaggcgtaacggccgtcgtcgtgcgcaagcccggcgctgccctcgatgaaaaggccatcgtcagcgccctccaggaccggctcgcgcgctacaaacaacccaagcgcatcatctttgcagaggacttgccgcgcaacacgatgggtaaggttcagaaaaacatcctgcggcagcaatacgccgatctttataccaggacgtaa

SEQ ID NO: 28577 - protein, 504 aa, Rhizobium leguminosarum
MSNHLFDAMRAAAPGNAPFIRIDNTRTWTYDDAFALSGRIASAMDALGIRPGDRVAVQVEKSAEALILYLACLRSGAVYLPLNTAYTLAELDYFIGDAEPRLVVVASSARAGVETIAKPRGAIVETLDAAGSGSLLDLARDEPADFVDASRSADDLAAILYTSGTTGRSKGAMLTHGNLLSNALTLRDFWRVTAGDRLIHALPIFHTHGLFVATNVTLLAGASMFLLSKFDPEEILSLMPQATMLMGVPTFYVRLLQSPRLDKQAVANIRLFISGSAPLLAETHTEFQARTGHAILERYGMTETNMNTSNPYEGKRIAGTVGFPLPDVTVRVTDPATGLALPPEQTGMIEIKGPNVFKGYWRMPEKTAAEFTADGFFISGDLGKIDRDGYVHIVGRGKDLVISGGYNIYPKEVEGEIDQIEGVVESAVIGVPHPDFGEGVTAVVVRKPGAALDEKAIVSALQDRLARYKQPKRIIFAEDLPRNTMGKVQKNILRQQYADLYTRT

SEQ ID NO: 28578 - DNA, 1686 bp, Arabidopsis thaliana
  CDS (1)..(1686)
atggcgccacaagaacaagcagtttctcaggtgatggagaaacagagcaacaacaacaacagtgacgtcattttccgatcaaagttaccggatatttacatcccgaaccacctatctctccacgactacatcttccaaaacatctccgaattcgccactaagccttgcctaatcaacggaccaaccggccacgtgtacacttactccgacgtccacgtcatctcccgccaaatcgccgccaattttcacaaactcggcgttaaccaaaacgacgtcgtcatgctcctcctcccaaactgtcccgaattcgtcctctctttcctcgccgcctccttccgcggcgcaaccgccaccgccgcaaaccctttcttcactccggcggagatagctaaacaagccaaagcctccaacaccaaactcataatcaccgaagctcgttacgtcgacaaaatcaaaccacttcaaaacgacgacggagtagtcatcgtctgcatcgacgacaacgaatccgtgccaatccctgaaggctgcctccgcttcaccgagttgactcagtcgacaaccgaggcatcagaagtcatcgactcggtggagatttcaccggacgacgtggtggcactaccttactcctctggcacgacgggattaccaaaaggagtgatgctgactcacaagggactagtcacgagcgttgctcagcaagtcgacggcgagaacccgaatctttatttccacagcgatgacgtcatactctgtgttttgcccatgtttcatatctacgctttgaactcgatcatgttgtgtggtcttagagttggtgcggcgattctgataatgccgaagtttgagatcaatctgctattggagctgatccagaggtgtaaagtgacggtggctccgatggttccgccgattgtgttggccattgcgaagtcttcggagacggagaagtatgatttgagctcgataagagtggtgaaatctggtgctgctcctcttggtaaagaacttgaagatgccgttaatgccaagtttcctaatgccaaactcggtcagggatacggaatgacggaagcaggtccagtgctagcaatgtcgttaggttttgcaaaggaaccttttccggttaagtcaggagcttgtggtactgttgtaagaaatgctgagatgaaaatagttgatccagacaccggagattctctttcgaggaatcaacccggtgagatttgtattcgtggtcaccagatcatgaaaggttacctcaacaatccggcagctacagcagagaccattgataaagacggttggcttcatactggagatattggattgatcgatgacgatgacgagcttttcatcgttgatcgattgaaagaacttatcaagtataaaggttttcaggtagctccggctgagctagaggctttgctcatcggtcatcctgacattactgatgttgctgttgtcgcaatgaaagaagaagcagctggtgaagttcctgttgcatttgtggtgaaatcgaaggattcggagttatcagaagatgatgtgaagcaattcgtgtcgaaacaggttgtgttttacaagagaatcaacaaagtgttcttcactgaatccattcctaaagctccatcagggaagatattgaggaaagatctgagggcaaaactagcaaatggattgtga

SEQ ID NO: 28579 - protein, 561 aa, Arabidopsis thaliana
MAPQEQAVSQVMEKQSNNNNSDVIFRSKLPDIYIPNHLSLHDYIFQNISEFATKPCLINGPTGHVYTYSDVHVISRQIAANFHKLGVNQNDVVMLLLPNCPEFVLSFLAASFRGATATAANPFFTPAEIAKQAKASNTKLIITEARYVDKIKPLQNDDGVVIVCIDDNESVPIPEGCLRFTELTQSTTEASEVIDSVEISPDDVVALPYSSGTTGLPKGVMLTHKGLVTSVAQQVDGENPNLYFHSDDVILCVLPMFHIYALNSIMLCGLRVGAAILIMPKFEINLLLELIQRCKVTVAPMVPPIVLAIAKSSETEKYDLSSIRVVKSGAAPLGKELEDAVNAKFPNAKLGQGYGMTEAGPVLAMSLGFAKEPFPVKSGACGTVVRNAEMKIVDPDTGDSLSRNQPGEICIRGHQIMKGYLNNPAATAETIDKDGWLHTGDIGLIDDDDELFIVDRLKELIKYKGFQVAPAELEALLIGHPDITDVAVVAMKEEAAGEVPVAFVVKSKDSELSEDDVKQFVSKQVVFYKRINKVFFTESIPKAPSGKILRKDLRAKLANGL

SEQ ID NO: 28580 - DNA, 1635 bp, Petroselinum crispum
  CDS (1)..(1635)
atgggagattgtgtagcacccaaagaagaccttattttccgatcgaaactccctgatatttacatcccgaaacaccttccgttacatacttattgtttcgaaaacatctcgaaagttggcgacaagtcctgtttaataaatggcgctacaggcgaaacgttcacttattctcaagttgagctcctttccaggaaagttgcatcagggttaaacaaactcggcattcaacagggcgataccatcatgcttttgctccctaactcccctgagtattttttcgctttcttaggcgcatcgtatcgtggtgcaatttctactatggccaatccgtttttcacttctgctgaggtgatcaaacagctcaaagcatcccaagctaagctcataattacgcaagcttgttacgtagacaaagtgaaagactacgcagcagagaaaaatatacagatcatttgcatcgatgatgctcctcaggattgtttacatttctccaaacttatggaagctgatgaatcagaaatgccggaggttgtgatcaattcagacgatgtcgtcgcgttaccttattcatcgggtactacaggactaccgaaaggtgttatgttgacacacaaaggacttgttactagcgtggcacaacaagttgatggagacaatccgaatttatatatgcatagcgaggatgtgatgatctgcatattgcctttgtttcatatttattcgcttaacgcggtgttgtgctgtggactcagagcaggggtgacgatcttgattatgcagaaatttgatattgtgccatttttggaactgatacaaaaatataaagttacaattggaccgtttgtgccaccaattgtgttggcaattgcgaaaagtccagtggtggataaatatgacttgtcgtcggtgaggacggttatgtctggagctgctccgttagggaaggagcttgaagatgctgttagagctaagtttcctaatgccaaacttggtcagggatatggaatgacagaggcagggccagttttagcaatgtgcctggcgtttgcaaaggaaccatacgagatcaaatcgggtgcctgtggaactgttgtgaggaatgctgaaatgaaaattgtggatcctgagaccaacgcctctcttccacgaaaccaacgcggagagatttgcattcgaggtgaccaaattatgaaaggctacctcaatgatcctgaatcaacaaggacaacaatagacgaagaaggctggttgcacacaggagatataggcttcattgacgacgatgatgagctatttattgttgatagacttaaggaaataatcaaatacaaaggcttccaggttgcccctgctgaacttgaagctctgctacttactcatcctaccatttccgatgctgcagttgttcccatgatagatgagaaagcaggagaggtgcctgtggcttttgttgtgagaacaaacggtttcaccaccactgaggaagaaatcaagcaattcgtctcgaaacaggtggtgttctacaagagaatatttcgtgtattttttgttgatgcaattccgaaatcaccatctggaaagattcttcgaaaggacttgagagcaagaatagcatccggtgatcttcccaaataa

SEQ ID NO: 28581 - protein, 544 aa, Petroselinum crispum
MGDCVAPKEDLIFRSKLPDIYIPKHLPLHTYCFENISKVGDKSCLINGATGETFTYSQVELLSRKVASGLNKLGIQQGDTIMLLLPNSPEYFFAFLGASYRGAISTMANPFFTSAEVIKQLKASQAKLIITQACYVDKVKDYAAEKNIQIICIDDAPQDCLHFSKLMEADESEMPEVVINSDDVVALPYSSGTTGLPKGVMLTHKGLVTSVAQQVDGDNPNLYMHSEDVMICILPLFHIYSLNAVLCCGLRAGVTILIMQKFDIVPFLELIQKYKVTIGPFVPPIVLAIAKSPVVDKYDLSSVRTVMSGAAPLGKELEDAVRAKFPNAKLGQGYGMTEAGPVLAMCLAFAKEPYEIKSGACGTVVRNAEMKIVDPETNASLPRNQRGEICIRGDQIMKGYLNDPESTRTTIDEEGWLHTGDIGFIDDDDELFIVDRLKEIIKYKGFQVAPAELEALLLTHPTISDAAVVPMIDEKAGEVPVAFVVRTNGFTTTEEEIKQFVSKQVVFYKRIFRVFFVDAIPKSPSGKILRKDLRARIASGDLPK

SEQ ID NO: 28582 - DNA, 1638 bp, Solanum tuberosum
  CDS (1)..(1638)
atgccgatggataccgaaacaaagcaatcaggagatttaatctttcgatctaaactccctgatatttacatccctaaacatttgcctttacattcttattgctttgaaaatctatcggagtttaattcccggccctgtttgattgatggtgcaaatgatcgaatctatacttatgctgaagttgaacttacttcgagaaaagttgctgttggtcttaacaaattggggatccaacagaaggatacaatcatgatccttttgcctaattgccctgaatttgtgtttgcgtttattggcgcatcgtatctaggagcaatttcaacaatggctaatcctctgtttacaccagcagaggtagtaaagcaagccaaagcctcaagtgctaagattgttatcacgcaagcttgttttgcggggaaagtgaaggactacgcaattgaaaatgatttgaaggtaatatgcgtcgattcagtaccggaaggttgtgttcatttctccgaattgattcaatccgacgaacacgaaattcctgatgtgaaaatccagccggacgatgtcgtagctctgccgtattcctccgggactaccgggctgccgaaaggggtgatgttgacacacaaaggattagtaacaagcgttgcacaacaagttgatggagaaaatgctaatttgtatatgcacagcgatgatgtgttgatgtgtgtgttgcctttgttccatatttactcactcaattctgttttgctctgtgcattgagagtcggagcagcaattttgattatgcagaaattcgacattgctcagtttttagagttgataccgaagcataaagtgacaattggaccatttgttccgcctattgttctcgccattgctaagagtccattagttgataactacgatctttcatcagtaagaacagtcatgtctggtgctgcaccattaggaaaggaacttgaagatgccgtccgagcaaaattccctaacgccaaactcggtcagggttatggaatgacggaagccggtcctgtgctggcgatgtgtttggcatttgcgaaagaaccgtttgatattaaatcaggggcatgtggtactgttgtgaggaacgcggagatgaaaattgtggatccggatacgggttgctctctgccccgtaaccaacccggtgaaatttgcattagaggtgatcaaatcatgaaaggttacttgaatgatcccgaggccacagctagaacaatagaaaaagaaggatggttacacactggcgatattggattcattgacgatgatgatgagcttttcattgtggaccgattgaaggaattgatcaaatacaaaggatttcaagtggcgcctgccgagcttgaagctcttcttatcaaccaccccgacatttctgatgctgctgttgtcccaatgatagatgaacaagcgggagaagttccagtggcttttgttgttagatcaaatggatctaccattactgaggatgaagtcaaggatttcatctccaagcaggtgatattctataagagaataaagcgtgtatttttcgtagagacggtaccaaaatctccgtcaggaaaaattctgagaaaagatttaagagctagactggctgctggtatttcaaattga

SEQ ID NO: 28583 - protein, 545 aa, Solanum tuberosum
MPMDTETKQSGDLIFRSKLPDIYIPKHLPLHSYCFENLSEFNSRPCLIDGANDRIYTYAEVELTSRKVAVGLNKLGIQQKDTIMILLPNCPEFVFAFIGASYLGAISTMANPLFTPAEVVKQAKASSAKIVITQACFAGKVKDYAIENDLKVICVDSVPEGCVHFSELIQSDEHEIPDVKIQPDDVVALPYSSGTTGLPKGVMLTHKGLVTSVAQQVDGENANLYMHSDDVLMCVLPLFHIYSLNSVLLCALRVGAAILIMQKFDIAQFLELIPKHKVTIGPFVPPIVLAIAKSPLVDNYDLSSVRTVMSGAAPLGKELEDAVRAKFPNAKLGQGYGMTEAGPVLAMCLAFAKEPFDIKSGACGTVVRNAEMKIVDPDTGCSLPRNQPGEICIRGDQIMKGYLNDPEATARTIEKEGWLHTGDIGFIDDDDELFIVDRLKELIKYKGFQVAPAELEALLINHPDISDAAVVPMIDEQAGEVPVAFVVRSNGSTITEDEVKDFISKQVIFYKRIKRVFFVETVPKSPSGKILRKDLRARLAAGISN

SEQ ID NO: 28584 - DNA, 1644 bp, Nicotiana tabacum
  CDS (1)..(1644)
atgccaatggagactactacagaaacaaagcaatcaggagatttaattttccgatcaaaactccctgatatttacatccctaaacatttacctttacattcttattgttttgaaaacatttcggagtttagttctcgtccctgtttgattaatggagccaacgatcaaatttatacttatgctgaggttgagctcacttgcagaaaagttgcagttggtcttaacaagttagggatccaacaaaaggacacgattatgatccttttgccgaattcccctgaatttgtgtttgcttttatgggcgcttcatatttaggagccatttctacaatggccaatcctctgtttacacctgcagaggttgtaaaacaagccaaagcctcaagtgctaagattattataactcaatcgtgctttgtgggcaaagtgaaggattacgcaagtgaaaatgatgtgaaggtcatttgtattgactctgcaccggaaggttgtcttcatttctcagaattgacacaatccgatgagcatgaaattcctgaggtgaaaatccagccagacgacgtcgttgcgctgccgtattcctctggtactacagggctgccgaaaggtgtgatgttgacgcacaagggattagtcacgagcgttgcacaacaagttgacggtgaaaatgcgaatttgtatatgcacagtgaggatgtattgatgtgtgtgttgcctttgttccatatatactcactcaattccattttgctttgtggattgagagtcggtgcagcgattttgattatgcagaaatttgacattgctccgttcctggagttaatacagaagtataaggtgtcaattgggccatttgtgccgcctattgttctggctattgctaagagtccaattgttgatagctatgatctttcctcagtaaggactgtcatgtctggggctgcaccattaggaaaagaactcgaagacgctgtgagaaccaaattccctaacgctaaacttggccagggttatggaatgacggaagctgggccggtgttggcaatgtgtttggcatttgcaaaagaaccctttgatattaaatcaggggcatgtggtactgttgtgaggaacgccgagatgaaaattgtagatccggatacgggttgctctcttcctcgtaaccaacccggtgagatttgcattagaggtgaccagatcatgaaaggttacctgaatgatcccgaggccacaacgagaacaatagacaaagaaggatggttacacactggcgacattgggttcattgacgaggatgacgagcttttcattgtggatcgattgaaggaattgatcaaatacaaaggatttcaagtggcacctgcagaaattgaagcccttcttctcaaccatcccaacatttctgatgctgctgttgtccccatgaaagatgagcaagcaggagaagttccagtggcttttgttgttaggtcaaatggatctgccatcactgaggatgaagtcaaggatttcatctctaaacaggtgatattttataagagagtaaagcgtgtatttttcgtggagacggtacccaaatctccgtcgggaaaaattcttagaaaggacttgagagctagactggctgctggtgttccaaattaa

SEQ ID NO: 28585 - protein, 547 aa, Nicotiana tabacum
MPMETTTETKQSGDLIFRSKLPDIYIPKHLPLHSYCFENISEFSSRPCLINGANDQIYTYAEVELTCRKVAVGLNKLGIQQKDTIMILLPNSPEFVFAFMGASYLGAISTMANPLFTPAEVVKQAKASSAKIIITQSCFVGKVKDYASENDVKVICIDSAPEGCLHFSELTQSDEHEIPEVKIQPDDVVALPYSSGTTGLPKGVMLTHKGLVTSVAQQVDGENANLYMHSEDVLMCVLPLFHIYSLNSILLCGLRVGAAILIMQKFDIAPFLELIQKYKVSIGPFVPPIVLAIAKSPIVDSYDLSSVRTVMSGAAPLGKELEDAVRTKFPNAKLGQGYGMTEAGPVLAMCLAFAKEPFDIKSGACGTVVRNAEMKIVDPDTGCSLPRNQPGEICIRGDQIMKGYLNDPEATTRTIDKEGWLHTGDIGFIDEDDELFIVDRLKELIKYKGFQVAPAEIEALLLNHPNISDAAVVPMKDEQAGEVPVAFVVRSNGSAITEDEVKDFISKQVIFYKRVKRVFFVETVPKSPSGKILRKDLRARLAAGVPN

SEQ ID NO: 28586 - DNA, 1671 bp, Arabidopsis thaliana
  CDS (1)..(1671)
atgacgacacaagatgtgatagtcaatgatcagaatgatcagaaacagtgtagtaatgacgtcattttccgatcgagattgcctgatatatacatccctaaccacctcccactccacgactacatcttcgaaaatatctcagagttcgccgctaagccatgcttgatcaacggtcccaccggcgaagtatacacctacgccgatgtccacgtaacatctcggaaactcgccgccggtcttcataacctcggcgtgaagcaacacgacgttgtaatgatcctcctcccgaactctcctgaagtagtcctcactttccttgccgcctccttcatcggcgcaatcaccacctccgcgaacccgttcttcactccggcggagatttctaaacaagccaaagcctccgcggcgaaactcatcgtcactcaatcccgttacgtcgataaaatcaagaacctccaaaacgacggcgttttgatcgtcaccaccgactccgacgccatccccgaaaactgcctccgtttctccgagttaactcagtccgaagaaccacgagtggactcaataccggagaagatttcgccagaagacgtcgtggcgcttcctttctcatccggcacgacgggtctccccaaaggagtgatgctaacacacaaaggtctagtcacgagcgtggcgcagcaagtcgacggcgagaatccgaatctttacttcaacagagacgacgtgatcctctgtgtcttgcctatgttccatatatacgctctcaactccatcatgctctgtagtctcagagttggtgccacgatcttgataatgcctaagttcgaaatcactctcttgttagagcagatacaaaggtgtaaagtcacggtggctatggtcgtgccaccgatcgttttagctatcgcgaagtcgccggagacggagaagtatgatctgagctcggttaggatggttaagtctggagcagctcctcttggtaaggagcttgaagatgctattagtgctaagtttcctaacgccaagcttggtcagggctatgggatgacagaagcaggtccggtgctagcaatgtcgttagggtttgctaaagagccgtttccagtgaagtcaggagcatgtggtacggtggtgaggaacgccgagatgaagatacttgatccagacacaggagattctttgcctaggaacaaacccggcgaaatatgcatccgtggcaaccaaatcatgaaaggctatctcaatgaccccttggccacggcatcgacgatcgataaagatggttggcttcacactggagacgtcggatttatcgatgatgacgacgagcttttcattgtggatagattgaaagaactcatcaagtacaaaggatttcaagtggctccagctgagctagagtctctcctcataggtcatccagaaatcaatgatgttgctgtcgtcgccatgaaggaagaagatgctggtgaggttcctgttgcgtttgtggtgagatcgaaagattcaaatatatccgaagatgaaatcaagcaattcgtgtcaaaacaggttgtgttttataagagaatcaacaaagtgttcttcactgactctattcctaaagctccatcagggaagatattgaggaaggatctaagagcaagactagcaaatggattaatgaactag

SEQ ID NO: 28587 - protein, 556 aa, Arabidopsis thaliana
MTTQDVIVNDQNDQKQCSNDVIFRSRLPDIYIPNHLPLHDYIFENISEFAAKPCLINGPTGEVYTYADVHVTSRKLAAGLHNLGVKQHDVVMILLPNSPEVVLTFLAASFIGAITTSANPFFTPAEISKQAKASAAKLIVTQSRYVDKIKNLQNDGVLIVTTDSDAIPENCLRFSELTQSEEPRVDSIPEKISPEDVVALPFSSGTTGLPKGVMLTHKGLVTSVAQQVDGENPNLYFNRDDVILCVLPMFHIYALNSIMLCSLRVGATILIMPKFEITLLLEQIQRCKVTVAMVVPPIVLAIAKSPETEKYDLSSVRMVKSGAAPLGKELEDAISAKFPNAKLGQGYGMTEAGPVLAMSLGFAKEPFPVKSGACGTVVRNAEMKILDPDTGDSLPRNKPGEICIRGNQIMKGYLNDPLATASTIDKDGWLHTGDVGFIDDDDELFIVDRLKELIKYKGFQVAPAELESLLIGHPEINDVAVVAMKEEDAGEVPVAFVVRSKDSNISEDEIKQFVSKQVVFYKRINKVFFTDSIPKAPSGKILRKDLRARLANGLMN

SEQ ID NO: 28588 - DNA, 1635 bp, Petroselinum crispum
  CDS (1)..(1635)
atgggagactgtgtagcacccaaagaagaccttattttccgatcgaaactccctgatatttacatcccgaaacaccttccgttacatacttattgtttcgaaaacatctcgaaagttggcgacaagtcctgtttaataaatggcgctacaggcgaaacgttcacttattctcaagttgagctcctttccaggaaagttgcatcagggttaaacaaactcggcattcaacagggcgataccatcatgcttttgctccccaactcccctgagtattttttcgctttcttaggcgcatcgtatcgtggtgcaatttctactatggccaatccgtttttcacttctgctgaggtgatcaaacagctcaaagcatccctagctaagctcataattacgcaagcttgttacgtagacaaagtgaaagactacgcagcagagaaaaatatacagatcatttgcatcgatgatgctcctcaggattgtttacatttctccaaacttatggaagctgatgaatcagaaatgcccgaggtagtgatcgattcagacgatgtcgtcgcgttaccttactcatcgggtactacaggactaccgaaaggtgttatgttgacccacaaaggacttgttactagcgtggcacaacaagttgatggagacaatccgaatttatatatgcatagcgaggatgtgatgatctgcatattgcctttgtttcatatttattcgcttaacgcggtgttgtgctgtggactcagagcaggggtgacgatcttgattatgcagaaatttgatattgtgccatttttggaactgatacagaaatataaagttacaattggaccgtttgtgccaccaattgtgttggcaattgcgaaaagtccagtggtggataaatatgacttgtcgtcggtgaggacggttatgtctggagctgctccgttagggaaggagcttgaagatgctgttagagctaagtttcctaatgccaaacttggtcagggatatggaatgacagaggcagggccagttttagcaatgtgcctggcgtttgcaaaggaaccatacgagatcaaatcgggtgcctgtggaactgttgtgaggaatgctgaaatgaaaattgtggatcctgagaccaacgcctctcttccacgaaaccaacgcggagagatttgcattcgaggtgaccaaattatgaaaggctacctcaatgatcctgaatcaacaaggacaacaatagacgaagaaggctggttgcacacaggagatataggcttcattgacgacgatgatgagctatttattgttgatagacttaaggaaataatcaaatacaaaggcttccaggttgcccctgctgaacttgaagctctgctacttactcatcctaccatttccgatgctgcagttgttcccatgatagatgagaaagcaggagaggtgcctgtggcttttgttgtgagaacaaacggtttcaccaccactgaggaagaaatcaagcaattcgtctcgaaacaggtggtgttctacaagagaatatttcgtgtattttttgttgatgcaattccgaaatcaccatctggaaagattcttcgaaaggacttgagagcaaaaatagcatccggtgatcttcccaaataa

SEQ ID NO: 28589 - protein, 544 aa, Petroselinum crispum
MGDCVAPKEDLIFRSKLPDIYIPKHLPLHTYCFENISKVGDKSCLINGATGETFTYSQVELLSRKVASGLNKLGIQQGDTIMLLLPNSPEYFFAFLGASYRGAISTMANPFFTSAEVIKQLKASLAKLIITQACYVDKVKDYAAEKNIQIICIDDAPQDCLHFSKLMEADESEMPEVVIDSDDVVALPYSSGTTGLPKGVMLTHKGLVTSVAQQVDGDNPNLYMHSEDVMICILPLFHIYSLNAVLCCGLRAGVTILIMQKFDIVPFLELIQKYKVTIGPFVPPIVLAIAKSPVVDKYDLSSVRTVMSGAAPLGKELEDAVRAKFPNAKLGQGYGMTEAGPVLAMCLAFAKEPYEIKSGACGTVVRNAEMKIVDPETNASLPRNQRGEICIRGDQIMKGYLNDPESTRTTIDEEGWLHTGDIGFIDDDDELFIVDRLKEIIKYKGFQVAPAELEALLLTHPTISDAAVVPMIDEKAGEVPVAFVVRTNGFTTTEEEIKQFVSKQVVFYKRIFRVFFVDAIPKSPSGKILRKDLRAKIASGDLPK

SEQ ID NO: 28590 - DNA, 1689 bp, Glycine max
  CDS (1)..(1689)
atgataactctagctccttctcttgatactccaaaaactgatcaaaaccaagtttctgatccccaaactagccatgtcttcaaatcaaaattaccagatatcccaatctccaaccacctccctctccactcctactgcttccagaacctctcccaatttgcccaccgcccttgcctcatcgtcggacccgcctccaaaaccttcacctacgccgacacccacctcatttccagcaagatcgccgccggattgtccaacctcggaatcctcaagggcgacgtcgtcatgatcctcctccagaactccgccgatttcgtcttctccttcctcgccatctccatgattggcgccgtcgccaccaccgccaacccgttctacaccgccccggagatcttcaagcagttcaccgtctccaaggcgaagttgatcataacacaggcaatgtacgtggacaagctccgcaaccacgacggcgcgaagctcggcgaggacttcaaggtcgtaaccgtcgacgatccgccggagaattgcctccacttctctgtcctctcggaggcgaacgagagcgacgtgccagaggtggagatccacccggacgacgcggtggcgatgccgttctcctccggcacgacgggtttacctaaaggagtgattctcacgcacaagagtttaaccacgagtgtggcgcagcaagttgacggagagaaccctaacctctacctcaccaccgaggacgtgctcctctgcgtgcttccgctctttcacatattctcgctcaacagtgtgctattgtgcgccctcagggcggggagtgcagttttgttgatgcagaagttcgagatcgggacactgctggagctgatacagcggcaccgagtgtcggtggcgatggtggtgcccccgctggtgttggcgttggcaaagaatccgatggtggcggattttgacctgagttcaatacggttagtgctgtccggagctgctcccttggggaaggagctcgaggaggctctccggaacaggatgcctcaagctgttttgggacagggttacgggatgacagaagcagggccagtgctgtccatgtgcttgggctttgcaaagcaacctttccaaacaaaatcaggctcttgtggtaccgtagtcagaaatgcagaactcaaggttgttgaccctgaaactggtcgttctcttggctacaatcaacccggtgaaatttgcatccgagggcaacagatcatgaaaggatatctgaacgatgaggcagcgacagcatcgaccatagattcagagggttggcttcacaccggtgatgttggctacgtagatgatgatgacgaaattttcattgttgacagggtgaaggaactcatcaaatataaaggcttccaggtgccccctgcagaacttgaagggcttcttgtaagccatccctccattgcagatgcagctgttgtcccacaaaaggatgttgctgctggtgaagttcctgttgccttcgttgtgagatcaaacggctttgatctaactgaagaggctgtaaaagagtttatagctaaacaggtagtgttttacaaaagactgcacaaagtttattttgttcatgctattcccaagtctccatcaggaaagatattaaggaaagacctcagagcaaagctagaaaccgccgccactcagacgccttaa

SEQ ID NO: 28591 - protein, 562 aa, Glycine max
MITLAPSLDTPKTDQNQVSDPQTSHVFKSKLPDIPISNHLPLHSYCFQNLSQFAHRPCLIVGPASKTFTYADTHLISSKIAAGLSNLGILKGDVVMILLQNSADFVFSFLAISMIGAVATTANPFYTAPEIFKQFTVSKAKLIITQAMYVDKLRNHDGAKLGEDFKVVTVDDPPENCLHFSVLSEANESDVPEVEIHPDDAVAMPFSSGTTGLPKGVILTHKSLTTSVAQQVDGENPNLYLTTEDVLLCVLPLFHIFSLNSVLLCALRAGSAVLLMQKFEIGTLLELIQRHRVSVAMVVPPLVLALAKNPMVADFDLSSIRLVLSGAAPLGKELEEALRNRMPQAVLGQGYGMTEAGPVLSMCLGFAKQPFQTKSGSCGTVVRNAELKVVDPETGRSLGYNQPGEICIRGQQIMKGYLNDEAATASTIDSEGWLHTGDVGYVDDDDEIFIVDRVKELIKYKGFQVPPAELEGLLVSHPSIADAAVVPQKDVAAGEVPVAFVVRSNGFDLTEEAVKEFIAKQVVFYKRLHKVYFVHAIPKSPSGKILRKDLRAKLETAATQTP

SEQ ID NO: 28592 - DNA, 1629 bp, Nicotiana tabacum
  CDS (1)..(1629)
atggagaaagatacaaaacaggttgacataattttccgatcaaaactccctgatatttacatccctaaccatcttcctttacactcctactgtttcgaaaacatttccgagttcagttctcgtccttgtttaatcaatggcgccaacaaacaaatttatacgtatgctgatgttgaactcaattcaagaaaagttgctgctggtcttcacaaacaagggattcaaccaaaggatacaataatgatcctattgcctaactccccagaatttgtgtttgctttcattggtgcatcgtacctcggagctatttctacaatggccaatcctttgtttactcctgctgaggttgtgaagcaagccaaggcttctagtgctaagatcattgtcacacaagcgtgtcatgttaacaaagtgaaagattatgcatttgagaatgatgtgaagatcatatgcatcgactcggcgccggagggttgtctccacttctccgtgctaactcaggctaatgagcacgatattcctgaggttgaaattcaacctgacgatgtggtggcgttgccatactcctccgggacgacgggattacctaaaggagtgatgttgacgcacaagggacttgtgacaagcgtcgcacaacaagtcgacggtgaaaatccgaatttgtatatccatagcgaggacgtgatgctttgtgtcttgcccttgttccatatctattcactcaactccgttttgctttgtggattaagggtgggagcagcgattttgattatgcagaaatttgatattgtttctttcttggagttgatacaacgttacaaggtgacaatagggccgtttgtaccacctattgttttggccattgctaagagtcctatggttgatgattatgatctttcatcagtaagaaccgtcatgtctggggctgcaccattaggaaaggagcttgaagatactgttcgagccaaatttcctaatgctaaacttggtcagggttatggtatgacagaagctggaccagtgttggctatgtgcttggcatttgcaaaagaaccctttgaaataaaatcaggggcatgtggaacagttgtgagaaatgctgaaatgaaaattgtggatcctaaaactggtaattctcttcccagaaatcaatctggagaaatttgcattagaggagaccagatcatgaaaggctacctgaatgatccagaggccacagcaagaacaatagacaaagaagggtggttatatactggtgacattggctacattgatgatgacgacgagcttttcattgttgatcgattaaaggaactgatcaaatacaaaggatttcaagtcgcacctgctgagctcgaagctctccttctcaaccatcccaacatttctgatgctgctgttgtccccatgaaggacgagcaagcaggagaagttccagtggcttttgttgttagatccaacggatccaccattactgaagatgaagtcaaagattttatttcaaagcaggtgatattttataagaggataaagcgggtatttttcgtggatgctattcctaaatctccatctggcaaaatccttcgaaaagatttgagagctaaactggctgctgggcttccaaattaa

SEQ ID NO: 28593 - protein, 542 aa, Nicotiana tabacum
MEKDTKQVDIIFRSKLPDIYIPNHLPLHSYCFENISEFSSRPCLINGANKQIYTYADVELNSRKVAAGLHKQGIQPKDTIMILLPNSPEFVFAFIGASYLGAISTMANPLFTPAEVVKQAKASSAKIIVTQACHVNKVKDYAFENDVKIICIDSAPEGCLHFSVLTQANEHDIPEVEIQPDDVVALPYSSGTTGLPKGVMLTHKGLVTSVAQQVDGENPNLYIHSEDVMLCVLPLFHIYSLNSVLLCGLRVGAAILIMQKFDIVSFLELIQRYKVTIGPFVPPIVLAIAKSPMVDDYDLSSVRTVMSGAAPLGKELEDTVRAKFPNAKLGQGYGMTEAGPVLAMCLAFAKEPFEIKSGACGTVVRNAEMKIVDPKTGNSLPRNQSGEICIRGDQIMKGYLNDPEATARTIDKEGWLYTGDIGYIDDDDELFIVDRLKELIKYKGFQVAPAELEALLLNHPNISDAAVVPMKDEQAGEVPVAFVVRSNGSTITEDEVKDFISKQVIFYKRIKRVFFVDAIPKSPSGKILRKDLRAKLAAGLPN

SEQ ID NO: 28594 - DNA, 1686 bp, Arabidopsis thaliana
  CDS (1)..(1686)
atgatcactgcagctctacacgaacctcagattcacaaaccaaccgatacatccgtcgtctccgatgatgtgcttcctcattctcctcctacgcctcgcattttccggtcaaagcttccggacattgacatccctaaccacctccctctccacacttactgcttcgaaaaactctcatctgtttccgacaagccttgtctcatcgttggctccaccgggaaaagctacacctacggcgaaacacacctaatctgtcggagagtcgcttccgggttatacaagttaggtatcagaaaaggtgacgtcatcatgatccttctccaaaactcagccgagttcgttttctccttcatgggtgcttccatgatcggagccgtctcaaccaccgcaaaccctttctacacttctcaagagctttataaacagcttaaatcttccggagccaaactcataatcactcactctcaatacgtcgataaacttaaaaacctcggagaaaacctcacgctgatcactaccgatgaaccaacaccggagaattgtctaccattctcgacactcatcaccgacgacgaaacaaacccatttcaagaaaccgtcgatatcggcggtgacgatgcggcggcgttaccattctcatcgggaacaacagggttaccaaaaggagttgttttgacacacaagagcttaatcacaagcgttgcacaacaagtagatggagataacccaaatctttacctcaaatcaaacgacgtcatactctgcgttttaccacttttccatatctactctctcaatagcgtcctcctcaattcactccgatccggcgccacggttcttttaatgcataagtttgagatcggtgcgttattggatcttattcaaagacatagagtgacaatagcggcgcttgtaccgccgctagtgatcgctctagctaaaaacccgacggttaattcttatgatctctcctccgttagattcgttctttccggtgcagctcctttaggtaaagaacttcaagatagtcttcgtcgccgtctccctcaagccatccttggccagggatatggtatgacggaggcaggaccagtgttgtcaatgagccttgggttcgctaaagaaccgataccgacaaaatcaggttcatgtgggactgtggtccgaaacgcagagcttaaagtggttcaccttgagacacgtctctctcttggatacaaccaacctggtgagatttgtatccgcggtcaacagatcatgaaagagtacttgaacgatccagaagccacttcagcaacaatagacgaagaaggttggcttcacacaggagacattggatatgttgatgaagatgatgagattttcattgttgatcgacttaaagaagtcatcaagttcaaaggctttcaggtccctccagctgagctagagagtttgctaatcaatcaccattcaattgccgatgcagctgttgttccgcaaaatgatgaagtcgctggggaagttccggtggctttcgtggtgcgatcaaatggaaatgatatcactgaagaagatgttaaagaatatgttgccaaacaggtggtgttctataagagattgcacaaggtcttctttgttgcttccattcctaaatctccttcgggaaaaatactaagaaaggacctcaaagctaagctttgttga

SEQ ID NO: 28595 - protein, 561 aa, Arabidopsis thaliana
MITAALHEPQIHKPTDTSVVSDDVLPHSPPTPRIFRSKLPDIDIPNHLPLHTYCFEKLSSVSDKPCLIVGSTGKSYTYGETHLICRRVASGLYKLGIRKGDVIMILLQNSAEFVFSFMGASMIGAVSTTANPFYTSQELYKQLKSSGAKLIITHSQYVDKLKNLGENLTLITTDEPTPENCLPFSTLITDDETNPFQETVDIGGDDAAALPFSSGTTGLPKGVVLTHKSLITSVAQQVDGDNPNLYLKSNDVILCVLPLFHIYSLNSVLLNSLRSGATVLLMHKFEIGALLDLIQRHRVTIAALVPPLVIALAKNPTVNSYDLSSVRFVLSGAAPLGKELQDSLRRRLPQAILGQGYGMTEAGPVLSMSLGFAKEPIPTKSGSCGTVVRNAELKVVHLETRLSLGYNQPGEICIRGQQIMKEYLNDPEATSATIDEEGWLHTGDIGYVDEDDEIFIVDRLKEVIKFKGFQVPPAELESLLINHHSIADAAVVPQNDEVAGEVPVAFVVRSNGNDITEEDVKEYVAKQVVFYKRLHKVFFVASIPKSPSGKILRKDLKAKLC

SEQ ID NO: 28596 - DNA, 1713 bp, Arabidopsis thaliana
  CDS (1)..(1713)
atggtgctccaacaacaaacgcattttctcacaaagaagatagatcaagaagacgaagaagaagaaccttctcatgatttcattttccgatctaagcttcctgatatcttcatccctaaccacctccctctcaccgattacgtcttccaaaggttctccggcgatggcgacggagattcctcaacaacctgtatcatcgacggtgccactggccgtattttgacctacgccgatgtacaaaccaacatgcggaggatagctgccggaatccaccggctcgggatccgccacggagacgtcgtaatgcttctcctcccgaactcgccggagtttgctctgtcttttcttgccgttgcttaccttggagccgtttccactaccgcgaatccgttctacactcagccggagatcgctaaacaggctaaagcctccgccgcgaagatgatcatcacgaagaaatgtttagtcgataaactaacaaacctcaaaaacgacggcgttttgatcgtttgcctagacgatgacggtgacaacggcgttgtttcgtcgagtgatgatggttgcgtgagtttcacggaactgactcaagcggacgaaacagaacttctaaaacctaaaatatcgccggaagacacggtggcgatgccgtactcttccggaacaacgggacttccaaagggagtgatgattactcacaagggtttagttacaagcatcgctcagaaagtcgacggagaaaaccctaaccttaacttcacggccaatgacgtcatcctctgttttctcccaatgtttcacatttacgctctcgacgcgttgatgctttcggcgatgagaaccggtgcagcgttactgatcgtgccgaggttcgagttgaatctggtgatggagctgattcaaaggtacaaagtcacggttgtgccggtggctcctccggtggttttagcattcattaaatcccctgagacggagagatacgacttgagctcggtgagaattatgctatcaggtgcagctacactaaagaaggagcttgaagacgccgtgcgactcaagtttcctaatgccatttttggtcagggttatggaatgaccgagtccggaacggtagctaagtcattagcgtttgcaaagaacccatttaaaaccaagtccggtgcatgtgggactgtgatcagaaacgccgagatgaaagtggtcgataccgaaaccggaatctccttgccgcgcaacaaatctggcgagatctgcgtccgaggtcatcagctcatgaaaggttatttgaatgatccggaagctactgcacgaaccatagacaaagacgggtggttacatacaggagatattgggtttgtggatgatgatgatgagatcttcattgttgatcggttgaaggaactgatcaaattcaaaggctaccaagtggctccagctgagcttgaagcattgcttatttctcatccttctatcgatgatgccgcagttgttgcaatgaaggatgaagtagctgatgaggttccagtagcatttgtagcaagatctcaagggtctcagttaactgaagatgatgtcaagagttacgtaaacaaacaggtggttcactacaagcggattaagatggtgtttttcatagaagttataccaaaagcagtttcgggcaagattctgaggaaggatctgcgagctaaattggaaaccatgtgctctaaatag

SEQ ID NO: 28597 - protein, 570 aa, Arabidopsis thaliana
MVLQQQTHFLTKKIDQEDEEEEPSHDFIFRSKLPDIFIPNHLPLTDYVFQRFSGDGDGDSSTTCIIDGATGRILTYADVQTNMRRIAAGIHRLGIRHGDVVMLLLPNSPEFALSFLAVAYLGAVSTTANPFYTQPEIAKQAKASAAKMIITKKCLVDKLTNLKNDGVLIVCLDDDGDNGVVSSSDDGCVSFTELTQADETELLKPKISPEDTVAMPYSSGTTGLPKGVMITHKGLVTSIAQKVDGENPNLNFTANDVILCFLPMFHIYALDALMLSAMRTGAALLIVPRFELNLVMELIQRYKVTVVPVAPPVVLAFIKSPETERYDLSSVRIMLSGAATLKKELEDAVRLKFPNAIFGQGYGMTESGTVAKSLAFAKNPFKTKSGACGTVIRNAEMKVVDTETGISLPRNKSGEICVRGHQLMKGYLNDPEATARTIDKDGWLHTGDIGFVDDDDEIFIVDRLKELIKFKGYQVAPAELEALLISHPSIDDAAVVAMKDEVADEVPVAFVARSQGSQLTEDDVKSYVNKQVVHYKRIKMVFFIEVIPKAVSGKILRKDLRAKLETMCSK

SEQ ID NO: 28598 - DNA, 1614 bp, Pinus taeda
  CDS (1)..(1614)
atggccaacggaatcaagaaggtcgagcatctgtacagatcgaagcttcccgatatcgagatctccgaccatctgcctcttcattcgtattgctttgagagagtagcggaattcgcagacagaccctgtctgatcgatggggcgacagacagaacttattgcttttcagaggtggaactaatttctcgcaaggtcgctgccggtctggcgaagctcgggttgcagcaggggcaggttgtcatgcttctccttccgaattgcatcgaatttgcgtttgtgttcatgggggcctctgtccggggcgccattgtgaccacggccaatcctttctacaagccgggcgagatcgccaaacaggccaaggccgcaggcgcgcgcatcatagttaccctggcagcttatgttgagaaactggccgatctgcagagccacgatgtgctcgtcatcacaatcgatgatgctcccaaggaaggttgccaacatatttccgttctgaccgaagccgacgaaacccaatgcccggccgtgaaaatccacccggacgatgtcgtggcgttgccctattcttccggaaccacggggctccccaagggcgtgatgttaacgcacaaaggcctggtgtccagcgttgcccagcaggtcgatggtgaaaatcccaatctgtatttccattccgatgacgtgatactctgtgtcttgcctcttttccacatctattctctcaattcggttctcctctgcgcgctcagagccggggctgcgaccctgattatgcagaaattcaacctcacgacctgtctggagctgattcagaaatacaaggttaccgttgccccaattgtgcctccaattgtcctggacatcacaaagagccccatcgtttcccagtacgatgtctcgtccgtccggataatcatgtccggcgctgcgcctctcgggaaggaactcgaagatgccctcagagagcgttttcccaaggccattttcgggcagggctacggcatgacagaagcaggcccggtgctggcaatgaacctagccttcgcaaagaatcctttccccgtcaaatctggctcctgcggaacagtcgtccggaacgctcaaataaagatcctcgatacagaaactggcgaatctctcccgcacaatcaagccggcgaaatctgcatccgcggacccgaaataatgaaaggatatattaacgacccggaatccacggccgctacaatcgatgaagaaggctggctccacacaggcgacgtcgaatacattgacgatgacgaagaaatcttcatagtcgacagagtaaaggagattatcaaatataagggcttccaggtggctcctgctgagctggaagctttacttgtggctcatccgtcaatcgctgacgcagcagtcgttcctcaaaagcacgaggaggcgggcgaggttccggtggccttcgtggtgaagtcgtcggaaatcagcgagcaggaaatcaaggagttcgtggcaaagcaggtgattttctacaagaaaatacacagagtttactttgtggatgcgattcctaagtcgccgtccggcaagattctgagaaaggatttgagaagcagactggcagcaaaatga

SEQ ID NO: 28599 - protein, 537 aa, Pinus taeda
MANGIKKVEHLYRSKLPDIEISDHLPLHSYCFERVAEFADRPCLIDGATDRTYCFSEVELISRKVAAGLAKLGLQQGQVVMLLLPNCIEFAFVFMGASVRGAIVTTANPFYKPGEIAKQAKAAGARIIVTLAAYVEKLADLQSHDVLVITIDDAPKEGCQHISVLTEADETQCPAVKIHPDDVVALPYSSGTTGLPKGVMLTHKGLVSSVAQQVDGENPNLYFHSDDVILCVLPLFHIYSLNSVLLCALRAGAATLIMQKFNLTTCLELIQKYKVTVAPIVPPIVLDITKSPIVSQYDVSSVRIIMSGAAPLGKELEDALRERFPKAIFGQGYGMTEAGPVLAMNLAFAKNPFPVKSGSCGTVVRNAQIKILDTETGESLPHNQAGEICIRGPEIMKGYINDPESTAATIDEEGWLHTGDVEYIDDDEEIFIVDRVKEIIKYKGFQVAPAELEALLVAHPSIADAAVVPQKHEEAGEVPVAFVVKSSEISEQEIKEFVAKQVIFYKKIHRVYFVDAIPKSPSGKILRKDLRSRLAAK

SEQ ID NO: 28600 - DNA, 2028 bp, Candida albicans
  CDS (1)..(2028): transl_table=12
atgccggaatctactcaacaatctcatctttctttggaccatgagaagatgcaacaacctcctaaagggttcactgaacgttctaaaacaaaaccaaacttagctgattttgaaacttatcaaaaattatataaacaatcaattgaaaaccccaatgaatttttcactcaacaagccaaagaaaatttggattggtttaaaccatttgatttagctagattccctgttgatcctaaagatgattacaaaaatggtgatttgccagcttggttcatcaatggacaattgaatgcttgttataatgctgttgatagatgggccattaaaaaccctgataaaccagcaattatttatgaaggtgatgaacctgaccaaggaagaattatcacttatggagaattattaaaacaagttagtaaattagctcaagccttaactaaattgggggttaaaaagggtgattcagttgctgtttatttaccaatgattcctgaagccattgtcactttattagccattgttagaattggtgctatgcattcagttgtttttgctgggttttcttctgcttcattaagagatagaattttggatgctgattcaagaattgttattactgctgatgaatctaaaagaggtggtaaaaccattgaaaccaaaaaaattgttgatgatgccttgaaagaatgtccaaaagttagaaatgtcattgttttcaaaagaactggtaattctcatgtcccattttctcctggtagagatttgtggtggcacgatgaaatggctaaatatggtccatacttcccaccagttcctgtcaattctgaagacccattgttcttgttgtatacttctggttctactggtaaaccaaagggggttcaacacaacactgctggttatttgttaggagcagttttaaccaccaaatacacttttgatgttcatgaagatgatattttgtttactgctggtgacattggttggatcacaggtcatacttattgtgtttatggtccattgttagctggtgccacatcagtggtttttgaaggtaccccagcttatccaaattattccagatattgggaaattgttgataaatataaagttaatcaattttatgttgctccaactgctttaagattattgaaaagagctggtaccaaatatgttgaaaaatacgatttatcatctttaagagtcttgggttccgttggtgaaccaattgctgctgaagtttggcattggtataatgataacattggtaggggtcaagctcatattgttgatacttattggcaaactgaatcaggatctcatttgttgactccgttagctggtatcacaccaactaaaccaggttcagcttcattaccattctttggagttgatccaaagattttagacccaaccactggtgaagaattacctgataatgatgttgaaggggttcttgccattaaatcagcttggccatcaattactagaggtatttacaatgattacaatagatttattgatacttatttggcaccatacgccaattattatttctccggtgatggtgctgctagagatagagatggtttttactggattttgggtagagttgatgatgttgttaatgtttctggtcacagattatcaactgctgaaattgaagctgccttgattgaacatccaattgtcggtgaatctgccgttgttggttatgccgatgaattgactggtcaagccgttgctgcatatgtttcgttaaagaaggataaagctgttggtgaagatgtagaaaacattaaaaaggaaatgattttaactgttagaaaagaaattggaccatttgctgctccgaaaatgattttattagttgatgatttacctaaaactagatctggtaagatcatgagaagaattttaagaaaagtattggcaggtgaagaagatcaattgggtgatatttctactttatctaatccaggtgttgttcaacaaatcattgatgttgttcatcatgcaaagaaataa

SEQ ID NO: 28601 - protein, 675 aa, Candida albicans [sequence omitted]

SEQ ID NO: 28602 - DNA, 2115 bp, Candida glabrata
  CDS (1)..(2115)
atgtcaccatctgctattgctgagaagaaacaggtggacaacatccaggagatcaaggacaagaaccaggagcctgcgcaccacgagtacgagcacttgaccaatgtcggtgtggtcaagcagaagcctatcgaccacaggttgaaggacaacatcaagacccactactcgcctcacctggacggcttgcaggagtacaagagacagtaccaggagtccatcgagaacccagagaagttcttcagcgagaaggcacgctctttcatgaactggttcagggacttcgacagggtcttcgtgccagacgtggacaacccaacaaaaccttccttcgagaacaacgcctggttcctgaacggccaattgaacacttgctacaactgtgtcgacagacacgctttgaagactccaaacaagaccgccatcatctacgaggcagacgagcccggtgaaggctactcgatgtcttacaaggaactgctggagaaagtctgccaagtggcacagatcttgaagtactccatgaacgtcaagaaaggtgacactgttgcagtctacatgccaatgatcccagaagcactcatcactttgctagccatctcgagaatcggtgccatccactccgtcgtcttcgcaggtttctcttcaaactccctaagagaccgtatcaatgacgccggctcccgcgtagtgatcaccgctgatgagtccaacagaggcggcaagatcatcgaaacaaagagaatcgtagatgacgccttgagagaaaccccacaagtcgaacacgtcctggtctacaggcgtaccaacaaccctcaagtcaacttccaagctccaagagacttggactgggaaactgagagaaagaagtacaagacttacttcccttgcgaacccgtcgactcagaacacccattattcttgctttacacctcgggatctacaggtactccaaagggtgttcaacactctaccgcaggctacctactgggcgccctgttgacgatgagatacactttcgacgtccatcaggaagacgtgttcttcaccgctggtgacatcggttggatcacaggccacacatactgtgtatacggtcctttgctgtacggttgtactactttggtcttcgaaggtacccctgcttatccaaacttctctcgttactgggaaatcattgacaaacaccaagtcacccagttctacgttgcaccaactgctctgcgtctactaaagagagctggtgactcattcatcgacggcttctccctgaagtctctacgttgtttgggctcagttggtgaacctatcgctgctgaagtctgggaatggtactctgacaagatcggtaagaacgagattcctatcgtcgacacttactggcaaaccgagtctggttctcacttggtcactcctttggcaggtggtgtcacaccaatgaaaccaggttctgcatcattgccattctttggtatcgaaaccgtcatcctggacccaactactggtgaagagattaacgactctcatgcagaaggtgtcctggcaattaagagaccatggccatcctttgccagaaccatttggaagaaccatgacagattcttggacacctacttgaacccatacaagggctactatttcacaggtgatggtgccgctagagacaaggatggctacatctggattttgggtcgtgttgacgatgtcgttaacgtctccggtcacagactatccacagctgaaattgaagctgccattatcgaggacagaatggtcgccgagtgtgctgtcgttggtttcaacgacgatctgaccggtcaagctgttgctgctttcgtggtcttgaaggacaaatcgacctgggcttctgcctccgaggaagaacttcaagatattaagaagcacttgattttgactgtgagaaaagacattggtccctttgctgcaccaaaattgattgtcttggttgatgacttaccaaagaccagatccggtaagatcatgaggcgtatcttgagaaagattttggcaggtgagtctgatcaattaggtgacgtctctaccttatccaatcctggcgttgttaagcatttgattgactctgttaaattgtga

SEQ ID NO: 28603 - protein, 704 aa, Candida glabrata
MSPSAIAEKKQVDNIQEIKDKNQEPAHHEYEHLTNVGVVKQKPIDHRLKDNIKTHYSPHLDGLQEYKRQYQESIENPEKFFSEKARSFMNWFRDFDRVFVPDVDNPTKPSFENNAWFLNGQLNTCYNCVDRHALKTPNKTAIIYEADEPGEGYSMSYKELLEKVCQVAQILKYSMNVKKGDTVAVYMPMIPEALITLLAISRIGAIHSVVFAGFSSNSLRDRINDAGSRVVITADESNRGGKIIETKRIVDDALRETPQVEHVLVYRRTNNPQVNFQAPRDLDWETERKKYKTYFPCEPVDSEHPLFLLYTSGSTGTPKGVQHSTAGYLLGALLTMRYTFDVHQEDVFFTAGDIGWITGHTYCVYGPLLYGCTTLVFEGTPAYPNFSRYWEIIDKHQVTQFYVAPTALRLLKRAGDSFIDGFSLKSLRCLGSVGEPIAAEVWEWYSDKIGKNEIPIVDTYWQTESGSHLVTPLAGGVTPMKPGSASLPFFGIETVILDPTTGEEINDSHAEGVLAIKRPWPSFARTIWKNHDRFLDTYLNPYKGYYFTGDGAARDKDGYIWILGRVDDVVNVSGHRLSTAEIEAAIIEDRMVAECAVVGFNDDLTGQAVAAFVVLKDKSTWASASEEELQDIKKHLILTVRKDIGPFAAPKLIVLVDDLPKTRSGKIMRRILRKILAGESDQLGDVSTLSNPGVVKHLIDSVKL

SEQ ID NO: 28604 - DNA, 2064 bp, Ashbya gossypii
  CDS (1)..(2064)
atgtcttgcaaggaacacaaggtggtgcatgaggcgcacaatgtggaagcacgcaagacgcccgaccacttctatcggtcgcaacccggcccgtcgtatgtgcaggatatagagcaatatcggacgatgtaccaacagtcaattgaagatccggatgccttttttggtgagaaggcgcgggagttcttacactgggagaaggacttcacgcacgttcgggcggggagtttgcggaccggggacacggcgtggtttctcaacggtgagttgaacgcagcttacaactgtgtggatcggcacgcgctggagaatccagacaaggtggcgataatctacgaggctgatgacgaggctgacaaccgtgttgttacattcggtgagcttctacggcaagtgtcgcaggtggcaggcgtgctacagtcgtggggcgtgaagaagggagatactgttgctgtctatatgccgatgatcccggaggcggttgtggcaatgctcgccgtcgcccgtttaggcgccgtgcattccgtgatttttgccggattttcatctgggtcgctacgtgatcgtatcgtggacgctgaatccaaagtggtaataacgtgcgatgagggccgccgtggtgggaagacagtgcacacaaagaagattgtagatgagggcctagctggcgttggcgttgtcagccacattttagtgttccagagaaccggttccgagggaattccaatgaaggccggcagggacttctggtggcacgaggaggtacgcaagcaacgaggctatcttccaccggtttctgtgaatgcagaagacccgatcttccttctctacacctctgggtctaccggatctcctaaaggagtggtccacaccactggcgggtatttgctaggcgccgctctaactaccaggtatgtatttgacatccatcctgaggacgtacttttcactgcaggcgatgtcggctggattactggacacacctatgcgctctacggtccattatgcctaggaactgctactataatattcgagtctactccggcgtatccagactatggcagatattggcggattattcagcgccacaaggcgacacacttctacgttgcaccaacggccatgcggttaatcaagactgttggggagcaagaaatttcaaagtacgatttatcctctttgagagttctagggtccgtcggggaaccgatcgctccagatttgtgggaatggtacaatgaaaaggtgggcaataacaactgtgttgtctgcgatacgatgtggcaaactgagtctggttcacatttgattgctcctttggctggtgcaattccaacaaagccgggatctgcaactgtcccattctttggtattaatgcgtgtatcattgatcctgttacgggtgatgaattggagggcaatgacgtggaaggcgtgcttgcgatcaagtcaccttggccctcgatggcgcgttcagtctggaataatcatgaccgctacattgaaacgtacctaaaaccctaccctggctactacttcacaggtgatggagctggaagagatcatgacggatattactggatcagaggcagagttgacgatgtcgtaaacgtttcgggtcaccgtctctctactgctgaaatagaggccgcgttatcggaacacgagggtgtatcgcaggccgctgtcgttggtattgcggatgagctaactggacaagccgttgttgctttcgtgtctttaaaggaaggatatggaagaggatcttctacggatacggacccggagtcgatcgcacccgatgttgttcctttagacactctgcgccgcgagctagtgctgcaagttagagcagaaatcggtccatttgctgcgccaaaatcggttattgtcgtggacgatcttcccaagaccagatctggcaagatcatgagaagaacactaagaaaaatatcggcaaatgaggccgaccagcttggtgacttgtctacgcttgcgaacccagagacagttcccgccattattgctgctgtaggtgcccaatttctcaagggaaagaaataa

SEQ ID NO: 28605 - protein, 687 aa, Ashbya gossypii
MSCKEHKVVHEAHNVEARKTPDHFYRSQPGPSYVQDIEQYRTMYQQSIEDPDAFFGEKAREFLHWEKDFTHVRAGSLRTGDTAWFLNGELNAAYNCVDRHALENPDKVAIIYEADDEADNRVVTFGELLRQVSQVAGVLQSWGVKKGDTVAVYMPMIPEAVVAMLAVARLGAVHSVIFAGFSSGSLRDRIVDAESKVVITCDEGRRGGKTVHTKKIVDEGLAGVGVVSHILVFQRTGSEGIPMKAGRDFWWHEEVRKQRGYLPPVSVNAEDPIFLLYTSGSTGSPKGVVHTTGGYLLGAALTTRYVFDIHPEDVLFTAGDVGWITGHTYALYGPLCLGTATIIFESTPAYPDYGRYWRIIQRHKATHFYVAPTAMRLIKTVGEQEISKYDLSSLRVLGSVGEPIAPDLWEWYNEKVGNNNCVVCDTMWQTESGSHLIAPLAGAIPTKPGSATVPFFGINACIIDPVTGDELEGNDVEGVLAIKSPWPSMARSVWNNHDRYIETYLKPYPGYYFTGDGAGRDHDGYYWIRGRVDDVVNVSGHRLSTAEIEAALSEHEGVSQAAVVGIADELTGQAVVAFVSLKEGYGRGSSTDTDPESIAPDVVPLDTLRRELVLQVRAEIGPFAAPKSVIVVDDLPKTRSGKIMRRTLRKISANEADQLGDLSTLANPETVPAIIAAVGAQFLKGKK

SEQ ID NO: 28606 - DNA, 2040 bp, Debaryomyces hansenii
  CDS (1)..(2040)
atgaccagttctccaacacatcaagttgtgcacgaagccaacaacatcaagaaacaagaaactccaaaagaatttttcgaaagacagccacgccaagggcacattacttcgttagaacaataccaagaattatacgagaagtcaattaacgacccagaaaccttttttggtgagtttggtaaggaattgttgcactgggacagagacttcgaaagagtcaagtctggatctttgttgcatggcgatgcagcatggtttattggaggtcaattgaacgcatgttacaactgtgttgatagacatgcattcgctactccaaacaagccagctattatctacgaagctgatgaagaaaaggactctaagatcttgactttcgccgaattgttgagagaagtctgccaagttgcaggtgtcttacaaagctggggtattaagaaaggcgacactgttgccatttatatgccaatgaactcgcaagcgatcattgctatgttggctgttgctagattgggtgctatccactctgttattttcgctggtttttcttctggttccattaaggacagagttaacgatgcatcttgtaaggctttgatcacctgtgacgaaggtcgtcgtggtggaaagaccattaacatcaagaaattgtgtgacgaggctttattgaactgtccatccattgaaaaggttcttgtttacgaaagaaccggtaataaggaagttaccttaaaggaaggccgtgattactggtggtctgaagaaacccaaaagtttgcaggctacttacctccagttccagttaactccgaagatccattattcttgttatacacctcaggttctactggtactccaaagggtgttgttcactctactgctggttacttattaggagctgccttaactactaaatacgtatttgatatccacccagaagatgtcttattcactgctggtgatgttggttggattactggacacacctacgcgttatatggtccattatctcttggtgtgccaactgtcgtttttgaaggtaccccagctttcccagattacggtagattatggcaaattgttgaaaaacataaggccactcacttctatgttgctccaaccgccttaagattattaagaaagtctggtgaacaagaaattgagaaatacgatttatcttctttaagaactttgggatctgttggtgaacctatttctccagatatctgggaatggtacaacgaaaaagttggtaagggccaatgccatgtcactgatacttattggcaaacggaatctggatcgcacttcattgctccaattgcaggtgtcgttccaaacaaacctggttctgctgctgtaccattctttggtatccaaacctgtcttattgatccagtcagtggtatcgaaattcaagggaacgacgtcgaaggtgttttagccgtcaaagatacctggccatccatggccagatcggtctacaagaaccataccaaatatatggacacctacttgaacccatacccaggatattacttcacgggtgatggtgccgcaagggatcatgatggatactactggatccgtggtagagttgatgacgttgttaatgtttctggtcacaggttatcgactgctgagatcgaagctgctttaattgaacataatgcaatttctgaagctgccgttgtcggtatgaatgacgacttaacgggtcaaactgttgttgcttttgttgcattgaaggaacaccttatcgctaaccttaaagccgacgaatccccagaagaagccttgaaattgaagaaagaaatgatcttacaagtcagaactcaaattggtccatttgctgctccaaagtctgttattattgtagaggatttaccaaagactagatctggtaagatcatgagaagaatcttaagaaagatcgcagccggtgaagctgatcaattaggtgatattaccactttatctaacccgcaatctgttgctggtattattggctcttttgatagccaatttggtaagaagtag

SEQ ID NO: 28607 - protein, 679 aa, Debaryomyces hansenii
MTSSPTHQVVHEANNIKKQETPKEFFERQPRQGHITSLEQYQELYEKSINDPETFFGEFGKELLHWDRDFERVKSGSLLHGDAAWFIGGQLNACYNCVDRHAFATPNKPAIIYEADEEKDSKILTFAELLREVCQVAGVLQSWGIKKGDTVAIYMPMNSQAIIAMLAVARLGAIHSVIFAGFSSGSIKDRVNDASCKALITCDEGRRGGKTINIKKLCDEALLNCPSIEKVLVYERTGNKEVTLKEGRDYWWSEETQKFAGYLPPVPVNSEDPLFLLYTSGSTGTPKGVVHSTAGYLLGAALTTKYVFDIHPEDVLFTAGDVGWITGHTYALYGPLSLGVPTVVFEGTPAFPDYGRLWQIVEKHKATHFYVAPTALRLLRKSGEQEIEKYDLSSLRTLGSVGEPISPDIWEWYNEKVGKGQCHVTDTYWQTESGSHFIAPIAGVVPNKPGSAAVPFFGIQTCLIDPVSGIEIQGNDVEGVLAVKDTWPSMARSVYKNHTKYMDTYLNPYPGYYFTGDGAARDHDGYYWIRGRVDDVVNVSGHRLSTAEIEAALIEHNAISEAAVVGMNDDLTGQTVVAFVALKEHLIANLKADESPEEALKLKKEMILQVRTQIGPFAAPKSVIIVEDLPKTRSGKIMRRILRKIAAGEADQLGDITTLSNPQSVAGIIGSFDSQFGKK

SEQ ID NO: 28608 - DNA, 2055 bp, Kluyveromyces lactis
  CDS (1)..(2055)
atgtcgtcggataaattgcataaggttgtgcatgaagctcacgatgttgaagctcgtcatgctccagaacatttctacaattctcaaccgggtaaatcgtactgtactgatgaagaacattaccgtgagatgtacactcagtccattgaggacccagcagggtttttcggtccattggccaaggaatatctagattgggatcgtccattcacccaagtccaaagcggttctttggaacacggtgacattgcctggttcttaaatggtgaactgaatgcttcttataactgtgttgacagacacgcttttgccaacccagacaagccagctttaatctacgaagccgacgatgaatctgaaaacaaggtgatcacttttggcgaattgttgagacaggtctctgaagtggctggtgtcttgcaatcttggggtgtcaagaaaggagacaccgtcgccgtttacttgccaatgattcctgctgcagttgttgctatgttggccgttgcaagattaggtgccattcattcggttatctttgccggtttctctgccggttccttgaaggaaagagttgtcgatgcaggctgtaaagtggtcatcacttgcgatgaaggtaagagaggtggtaagaccgttcataccaagaagattgtcgacgaaggtttggccggtgtcgattccgtttccaagatcttggttttccaaagaactggtactcaaggtatcccaatgaagccagctagagatttctggtggcacgaagagtgtgtcaagcaaagaggttacttgccacctgtcccagtcaactccgaagatccattgttcttgttgtacacctctggttccaccggttctccaaaaggtgtcgtgcactctactgctggttacttgttaggttctgctttgaccaccagattcgttttcgatattcatccagaagatgttttgttcactgctggtgacgtcggttggattaccggccacacttacgccttgtacggtccattgaccttaggtaccgctaccattattttcgaatctactccagcttacccagattatggtagatactggagaatcattgaacgtcatagagctacccacttctacgtcgccccaactgccctaagattgatcaaacgtgtcggtgaagaagaaattgccaagtatgatacctcctccttaagagtcttgggttctgtcggtgaaccaatctctccagatctatgggaatggtaccacgaaaaggttggtaagaataactgtgttatctgtgacaccatgtggcaaaccgaatccggttcacacttgattgccccattggctggtgctgtcccaaccaaaccaggttccgctaccgtcccattcttcggtattaacgcctgtatcatcgacccagtttctggtgaagaattgaagggtaacgatgttgaaggtgtcttggcagtgaagtccccatggccttctatggccagatctgtctggaacaaccatgctcgttacttcgaaacttatttgaagccatacccaggatactacttcacaggtgatggtgctggtagagatcacgacggttactactggatcagaggtagagttgacgatgtcgttaacgtttccggtcacagactttctactgctgaaatcgaagctgctctagctgaacacgaaggtgtttctgaagctgccgttgttggtatcactgatgaactaacaggtcaagctgtcattgcattcgtttccttgaaggacggctatctgtctgaaaatgcggtagagggtgacagtacccacatctctccagacaacttacgtcgtgagttgattctacaagtcagaggtgaaattggtccattcgctgcaccaaagaccgttgttgttgtcaacgatttgccaaaaactagatccggtaaaattatgagaagagtcttgagaaaggttgcatccaaggaagctgatcaattgggtgatctaagtaccttagccaatgcagacgttgtaccatctatcatttctgcagtagaaaatcaatttttcagtcagcagaagaaataa

SEQ ID NO: 28609 - protein, 684 aa, Kluyveromyces lactis
MSSDKLHKVVHEAHDVEARHAPEHFYNSQPGKSYCTDEEHYREMYTQSIEDPAGFFGPLAKEYLDWDRPFTQVQSGSLEHGDIAWFLNGELNASYNCVDRHAFANPDKPALIYEADDESENKVITFGELLRQVSEVAGVLQSWGVKKGDTVAVYLPMIPAAVVAMLAVARLGAIHSVIFAGFSAGSLKERVVDAGCKVVITCDEGKRGGKTVHTKKIVDEGLAGVDSVSKILVFQRTGTQGIPMKPARDFWWHEECVKQRGYLPPVPVNSEDPLFLLYTSGSTGSPKGVVHSTAGYLLGSALTTRFVFDIHPEDVLFTAGDVGWITGHTYALYGPLTLGTATIIFESTPAYPDYGRYWRIIERHRATHFYVAPTALRLIKRVGEEEIAKYDTSSLRVLGSVGEPISPDLWEWYHEKVGKNNCVICDTMWQTESGSHLIAPLAGAVPTKPGSATVPFFGINACIIDPVSGEELKGNDVEGVLAVKSPWPSMARSVWNNHARYFETYLKPYPGYYFTGDGAGRDHDGYYWIRGRVDDVVNVSGHRLSTAEIEAALAEHEGVSEAAVVGITDELTGQAVIAFVSLKDGYLSENAVEGDSTHISPDNLRRELILQVRGEIGPFAAPKTVVVVNDLPKTRSGKIMRRVLRKVASKEADQLGDLSTLANADVVPSIISAVENQFFSQQKK

SEQ ID NO: 28610 - DNA, 2052 bp, Saccharomyces cerevisiae
  CDS (1)..(2052)
atgacaatcaaggaacataaagtagtttatgaagctcacaacgtaaaggctcttaaggctcctcaacatttttacaacagccaacccggcaagggttacgttactgatatgcaacattatcaagaaatgtatcaacaatctatcaatgagccagaaaaattctttgataagatggctaaggaatacttgcattgggatgctccatacaccaaagttcaatctggttcattgaacaatggtgatgttgcatggtttttgaacggtaaattgaatgcatcatacaattgtgttgacagacatgcctttgctaatcccgacaagccagctttgatctatgaagctgatgacgaatccgacaacaaaatcatcacatttggtgaattactcagaaaagtttcccaaatcgctggtgtcttaaaaagctggggcgttaagaaaggtgacacagtggctatctatttgccaatgattccagaagcggtcattgctatgttggctgtggctcgtattggtgctattcactctgttgtctttgctgggttctccgctggttcgttgaaagatcgtgtcgttgacgctaattctaaagtggtcatcacttgtgatgaaggtaaaagaggtggtaagaccatcaacactaaaaaaattgttgacgaaggtttgaacggagtcgatttggtttcccgtatcttggttttccaaagaactggtactgaaggtattccaatgaaggccggtagagattactggtggcatgaggaggccgctaagcagagaacttacctacctcctgtttcatgtgacgctgaagatcctctatttttattatacacttccggttccactggttctccaaagggtgtcgttcacactacaggtggttatttattaggtgccgctttaacaactagatacgtttttgatattcacccagaagatgttctcttcactgccggtgacgtcggctggatcacgggtcacacctatgctctatatggtccattaaccttgggtaccgcctcaataattttcgaatccactcctgcctacccagattatggtagatattggagaattatccaacgtcacaaggctacccatttctatgtggctccaactgctttaagattaatcaaacgtgtaggtgaagccgaaattgccaaatatgacacttcctcattacgtgtcttgggttccgtcggtgaaccaatctctccagacttatgggaatggtatcatgaaaaagtgggtaacaaaaactgtgtcatttgtgacactatgtggcaaacagagtctggttctcatttaattgctcctttggcaggtgctgtcccaacaaaacctggttctgctaccgtgccattctttggtattaacgcttgtatcattgaccctgttacaggtgtggaattagaaggtaatgatgtcgaaggtgtccttgccgttaaatcaccatggccatcaatggctagatctgtttggaaccaccacgaccgttacatggatacttacttgaaaccttatcctggtcactatttcacaggtgatggtgctggtagagatcatgatggttactactggatcaggggtagagttgacgacgttgtaaatgtttccggtcatagattatccacatcagaaattgaagcatctatctcaaatcacgaaaacgtctcggaagctgctgttgtcggtattccagatgaattgaccggtcaaaccgtcgttgcatatgtttccctaaaagatggttatctacaaaacaacgctactgaaggtgatgcagaacacatcacaccagataatttacgtagagaattgatcttacaagttaggggtgagattggtcctttcgcctcaccaaaaaccattattctagttagagatctaccaagaacaaggtcaggaaagattatgagaagagttctaagaaaggttgcttctaacgaagccgaacagctaggtgacctaactactttggccaacccagaagttgtacctgccatcatttctgctgtagagaaccaatttttctctcaaaaaaagaaataa

SEQ ID NO: 28611 - protein, 683 aa, Saccharomyces cerevisiae
MTIKEHKVVYEAHNVKALKAPQHFYNSQPGKGYVTDMQHYQEMYQQSINEPEKFFDKMAKEYLHWDAPYTKVQSGSLNNGDVAWFLNGKLNASYNCVDRHAFANPDKPALIYEADDESDNKIITFGELLRKVSQIAGVLKSWGVKKGDTVAIYLPMIPEAVIAMLAVARIGAIHSVVFAGFSAGSLKDRVVDANSKVVITCDEGKRGGKTINTKKIVDEGLNGVDLVSRILVFQRTGTEGIPMKAGRDYWWHEEAAKQRTYLPPVSCDAEDPLFLLYTSGSTGSPKGVVHTTGGYLLGAALTTRYVFDIHPEDVLFTAGDVGWITGHTYALYGPLTLGTASIIFESTPAYPDYGRYWRIIQRHKATHFYVAPTALRLIKRVGEAEIAKYDTSSLRVLGSVGEPISPDLWEWYHEKVGNKNCVICDTMWQTESGSHLIAPLAGAVPTKPGSATVPFFGINACIIDPVTGVELEGNDVEGVLAVKSPWPSMARSVWNHHDRYMDTYLKPYPGHYFTGDGAGRDHDGYYWIRGRVDDVVNVSGHRLSTSEIEASISNHENVSEAAVVGIPDELTGQTVVAYVSLKDGYLQNNATEGDAEHITPDNLRRELILQVRGEIGPFASPKTIILVRDLPRTRSGKIMRRVLRKVASNEAEQLGDLTTLANPEVVPAIISAVENQFFSQKKK

SEQ ID NO: 28612 - DNA, 2028 bp, Zygosaccharomyces bailii
  CDS (1)..(2028)
atgacagtcaaagaacacaaggtagtgcacgaggcacaaaacgtagaagcgctgcatgcgccagagcatttttacaagtcacaaccaggccccagctacatcaaggacatgaagcagtacaaggagatgtacaaacaatctgtggaagacccagaaaacttctttggtgaaaaggctagggagctgctggattgggacagaccttttacgagaagcaagtacggttcgttggaaaatggcgatgtcacgtggtttttaaatggtgaattgaacgcagcctacaactgtgttgacaggcacgcttttgcaaacccagacaagcccgcattgatctacgaggctgacgaggaggctgacaacaggatgataaccttcagcgagctgctgagacaggtttcgcgggtcgctggggttctacaaagctggggagtgaaaaagggcgacactgtggcagtgtacttgcccatgattcctgaagcggtggtggccatgttggccattgcaagacttggtgccatccactctgtggtgttcgctggcttctctgctggctctttgaaagaccgtgtggtagatgctggttgtaaagtggtaatcacgtgcgacgaaggtaagagaggcggtaagacagttcacactaaaaagatcgtggacgaaggtttgaacggtatcagccttgtctctcacattcttgtcttccagagaaccgggagcgaaggtatccccatgaccgccggtagggattactggtggcatgaggagaccgccaagcagagaagttacttgcctcctgtgccttgcaattccgaagatccattgttcttgctatacacttctgggtctacgggctcccctaaaggtgttgtccattctaccgccggttaccttttgggtgccgctatgaccaccagatatgtcttcgacatccatccagaagacgttctctttaccgccggtgacgttggctggatcactggccacacctatgctctatatggcccattggttctcggtacggccagtatcatctttgaatctacccctgcctacccagattatggtaggtattggagaattatccagcgtcacaaggcaacacatttctatgtggctcctacagctttgagactcatcaaacgtgttggtgaagctgaaatccccaaatacgacatctcgtcgcttcgtgtgcttgggtctgttggtgagcccatctccccagagctttgggagtggtactatgaaaaagttggtaacaaaaactgtgtcatttgcgatacgatgtggcagacagaatctggctctcatttgatcgcccctcaagctggtgcagttccaacgaaaccaggttccgccactgtacctttctttggtgtggacgcttgcatcatcgatcctgttactggtattgagttgcaaggcaacgatgtggaaggtgtcctagcggtcaaatcttcctggccatcaatggctcgttctgtctggcaaaatcatcaccgttacgtcgacacatatttgaagccatacccaggttattactttacaggtgatggtgccgggagggaccacgatggctactactggattagaggcagagtggacgacgtggtaaatgtctcaggtcacagactttctacagctgagatcgaagcctctttgaccaatcatgataatgtctctgagtctgctgtagtcggcattgctgatgaattgacaggtcagtcagttattgcctttgtctctttgaaggacggttcttccagggaatcttctgccgtcgtagctatgcgtcgcgaattggttctccaggttagaggtgaaattggtcccttcgcagcccctaagtgtgtcattttggtcaaggacttgcccaaaaccagatcaggcaaaattatgagaagagttctaaggaaagtggcctctaacgaagcggaccagttgggtgatctatctaccatggcgaactccgaggttgttccatctatcattgccgctgtagatgaacaattctttgctgagaaaaagaaataa

SEQ ID NO: 28613 - protein, 675 aa, Zygosaccharomyces bailii
MTVKEHKVVHEAQNVEALHAPEHFYKSQPGPSYIKDMKQYKEMYKQSVEDPENFFGEKARELLDWDRPFTRSKYGSLENGDVTWFLNGELNAAYNCVDRHAFANPDKPALIYEADEEADNRMITFSELLRQVSRVAGVLQSWGVKKGDTVAVYLPMIPEAVVAMLAIARLGAIHSVVFAGFSAGSLKDRVVDAGCKVVITCDEGKRGGKTVHTKKIVDEGLNGISLVSHILVFQRTGSEGIPMTAGRDYWWHEETAKQRSYLPPVPCNSEDPLFLLYTSGSTGSPKGVVHSTAGYLLGAAMTTRYVFDIHPEDVLFTAGDVGWITGHTYALYGPLVLGTASIIFESTPAYPDYGRYWRIIQRHKATHFYVAPTALRLIKRVGEAEIPKYDISSLRVLGSVGEPISPELWEWYYEKVGNKNCVICDTMWQTESGSHLIAPQAGAVPTKPGSATVPFFGVDACIIDPVTGIELQGNDVEGVLAVKSSWPSMARSVWQNHHRYVDTYLKPYPGYYFTGDGAGRDHDGYYWIRGRVDDVVNVSGHRLSTAEIEASLTNHDNVSESAVVGIADELTGQSVIAFVSLKDGSSRESSAVVAMRRELVLQVRGEIGPFAAPKCVILVKDLPKTRSGKIMRRVLRKVASNEADQLGDLSTMANSEVVPSIIAAVDEQFFAEKKK

SEQ ID NO: 28614 - DNA, 1986 bp, Coprinus cinereus
  CDS (1)..(1986)
atgtccgaaggtccaatccgagtcgctccccaccccatcgccaagcgcgtcaagcatggctgcaagacgccccatgtctcccacattgacgattaccgaagccagcaccgggaaaccattggtcacgaatcggacaagtggtgggcaaagaaagctcatgagcttctctattgggatcgaccattccatactgtccgctcgggcagcttcgagaatggcgacattgcttggttccccgagggtggtttgaacgcctcctataactgcgttgaccgctgggcgttcaaacatccggaaaagaccgcgattatctacgaagcagatgaacctggcgagggaagggagatctcttacgcggaactcctccgggaagtctgcagcatcgcaaacgtgctcaagtcgttcggcgtcaagaagggcgacaccgtctccgtctacctccccatgacctggcaagccgtcgccgccttcctcgcctgtgcccgcatcggcgccatccactctgtcgtctttgctggcttctcggccgaagcattgcgtgatcgtatgcaagattgcaaatcgcgtgtgctcatcacgtccgatgaagggcggcgcggtgggaaggcgattgctaccaaggccatcgcggatgcggccctcaaggagtgcccggcggttgagaaggtgttggtgttgaagaggacgggtaacccggttccgtggactgagggtcgggatgtgtggtggcacgaggcggtcgccagggtaccgaggtactgccctcccgaggtcatggcatccgaggaccctctcttcatcctctacacttctggctcgactggcaaacccaagggtgtcgtgcacacgactggtggatatctactctgcgccgccttgactgtcaaatacgtcttcgatgtccaccccgacgacaggttcgcttgcatggccgacgttggctggatcacgggccacacttacatcgtctacggtcctctcgctattggcgctaccaccaccgtgttcgagtccactcccgtataccccactccttcacgatactgggaaaccgtcgagaagtacaagcttacccagttctactcggcccctaccgctatccgactcttgcgtcgcctcggacacgagcacgtcaacaagcacgatttgagcagtttgcgtgtgttgggaagcgttggagagcccatcaaccccgaggcttggcactggtacaacgagcacgtcggaaagaccgagtgcgccatcgttgataccttctggcaaactgagactggttccatcgtcgttactcctttccccggtgctatcgagaccaagcctggtgcggcgactgtacccttcttcggtattgagcccgccatcttggagcctaccactggaaaggtgctcgagggcaatgatgtcgagggtgttctcactatcgctcatccctggccttctatcgctcgaaccatctacggagaccatcagcgctacctcgagacttacatgaagccttatcccggctacttctacaccggtgatggcgctgctcgtgatgaggacggctacatctggatcaagggtcgtgttgatgatgtcattaacgtctctggccatcgtttgtccaccgccgaaatcgaatccgctctcatcacccacactggagttgctgagaccgccgtcatcggtaccgccgacgaactgaccggccaggccgtctacgccttcgtcactctcaagcctgaattcaagttcgacgccgagaacgaggctggcctctccaaggagctcatcctccaagtccgcaagatcatcggtccctttgctgcgcccaagcggatctatatcgtcagtgacctccccaagactcgctccggcaagatcatgcgacgtatcctccgcaagatcgtcgctggcgaggctgaccagctcggtgacctcagcaccttcgccgacccgggcatcgtcgaagtcatcaaggagaaggttgcctctgctgcgtaa

SEQ ID NO: 28615 - protein, 661 aa, Coprinus cinereus [sequence omitted]

SEQ ID NO: 28616 - DNA, 2013 bp, Emericella nidulans
  CDS (1)..(2013)
atgagtgacggaccaattgcccctcccaagcccgccgtggttgctgaggcccacgaggtcgacactttccacgttcccaaggcgttcttcgacaagcacccttccggccctcacttgaaaaatctcgatgaatacaagaagctctatgaggagtcgattcgcagcccagacgttttctgggcccgcaaagcccgtgagctgctcacttttgacaaagatttccaaacgacccgtatcggctcattggagaacggtgacgttgcttggttccctgagggtcggctaaatgcttctttcaactgtgtcgatcgtcacgccatcaagaaccccaacaaggtcgctatcatctacgaagccgacgaacccaacgagggccggacaatcacatatggcgagctgctccgcgaagtttctcgggttgcctgggttttgaaacagcgcggcgttaagaagggcgacactgtggctatctaccttcccatgattcctgaggccatcatcgccttccttgcgtgctcgcgtattggtgccgttcactccgttgttttcgccggtttctcgtcagactccctccgtgaccgtgtccttgacgccggttccaaggttgtcatcacaaccgatgagggtaagcgtggcggtaaggtcatcgggaccaagcgcattgtcgatgagggtctcaagcagtgccccgacgtgtcgaccgtgcttgtttacaagcgcaccggcgccgaggtgccctggaccgagggccgtgacatttggtggcacgaggaggttgagaagtaccctgcgtacattgctcctgactctgtcaactccgaggatcctcttttccttctatacacttctggttccaccggtaagcccaagggtgttatgcacactactgccggttacctcctaggcgcggctatgaccggaaaatacgtttttgatatccatgatgatgaccgctacttctgcggtggtgatgtcggctggattaccggccacacctacgtggtgtacgctcctctcctcctgggatgctcaacggttgtctttgagagtaccccggcttaccccgacttctctcgctactgggacgtgattgagaagcacaaggtgacccaattctatgtggcacccactgccctgcgattgttgaagagggctggtgaccaccacatccaccacaagatggaacatctacgtgtcctgggatccgtcggcgagcccattgctgctgaggtctggaagtggtacttcgagaaggttggaaaggaagaggctcacatttgcgacacctactggcaaaccgaaactggctccaacgtcattacccccttggccggtgtcactcccacgaagcctggcagtgcttccctgcccttcttcggtattgagcctgccatcattgatccagtctctggagaggagatctccggcaacgatgtggagggtgtgcttgccttcaagcagccctggcccagcatggcccgcactgtgtggggtgcccacaagcgctacatggacacatatctgaacgtctacaagggttactacttcaccggagatggagccggtcgtgaccacgagggatactactggatccgtggtcgtgttgacgatgtcgtcaacgtttctggtcaccgtctgtcaaccgcggaaattgaggctgccctcattgagcaccctatggttgctgaagcagccgtggttggtattgccgatgagttgaccggtcaggccgtcaatgcctttgtttcgctcaaagagggtaacgagaccaacgaccaagtccgcaaagacctcattctgcaagtccgcaagtcgattggacccttcgctgctcccaaagccgtctttgttgtcgacgacctgcccaagacccgtagcggtaagatcatgcgccgcatcctgcggaagattcttagtggtgaggaggatagcctgggcgacatttcaacgctgtccgatccatccgtggttgagagaattatcgccacagtgcacgcttcccgaggcaaataa

SEQ ID NO: 28617 - protein, 670 aa, Emericella nidulans
MSDGPIAPPKPAVVAEAHEVDTFHVPKAFFDKHPSGPHLKNLDEYKKLYEESIRSPDVFWARKARELLTFDKDFQTTRIGSLENGDVAWFPEGRLNASFNCVDRHAIKNPNKVAIIYEADEPNEGRTITYGELLREVSRVAWVLKQRGVKKGDTVAIYLPMIPEAIIAFLACSRIGAVHSVVFAGFSSDSLRDRVLDAGSKVVITTDEGKRGGKVIGTKRIVDEGLKQCPDVSTVLVYKRTGAEVPWTEGRDIWWHEEVEKYPAYIAPDSVNSEDPLFLLYTSGSTGKPKGVMHTTAGYLLGAAMTGKYVFDIHDDDRYFCGGDVGWITGHTYVVYAPLLLGCSTVVFESTPAYPDFSRYWDVIEKHKVTQFYVAPTALRLLKRAGDHHIHHKMEHLRVLGSVGEPIAAEVWKWYFEKVGKEEAHICDTYWQTETGSNVITPLAGVTPTKPGSASLPFFGIEPAIIDPVSGEEISGNDVEGVLAFKQPWPSMARTVWGAHKRYMDTYLNVYKGYYFTGDGAGRDHEGYYWIRGRVDDVVNVSGHRLSTAEIEAALIEHPMVAEAAVVGIADELTGQAVNAFVSLKEGNETNDQVRKDLILQVRKSIGPFAAPKAVFVVDDLPKTRSGKIMRRILRKILSGEEDSLGDISTLSDPSVVERIIATVHASRGK

SEQ ID NO: 28618 - DNA, 2004 bp, Neurospora crassa
  CDS (1)..(2004)
atgtctggtagcaccgttcctgccggggcagtagtgcccgaggctcacactattgagaccttccagccccctagggagatgcttcagaaccacccaagcaaacctcatcttgccaactttgaggagtaccagaagctgtacaagcagtccatcaccgagcccaacgtgttctgggctgagcgcgcccgcgagcttctgtcgtggagcaaggatttccagacggtccacagcggctccctcgccaacggtgacaacgcctggttcgtagagggcgagctcaacgcctcgtacaactgcgtcgacagacacgcccacaaggaccccaacagagtcgccatcatctacgaggccgacgagcccggtcagggaaggaatgtcacctatggcgagctcctcagggaggtctccaagctcgcccatgtcctcaccaacttgggtgttcgcaagggagacaccgtcgccatctaccttcccatgattcccgaggccatcgttgccatgcttgcttgcaccagaattggcgccatccactccgtcgtttttgccggcttctcctccgactccctccgcgaccgtgtcgtcgatgcccagtccaaggttgtcatcaccaccgatgagggcaagcgcggtggcaagctgattggcaccaagaagatcgtcgacgaggctctccagcagtgccccgatgttcgcaacgtgctcgtctacaagcgcaccggcgccgacatcagcatgacccccggccgtgatctctggtggcacgaggaggttgagaagtaccctgcttactacacccctgtggccatggcctcggaggatcctctcttccttctctacacctctggctccactggcaagcccaagggagttgcccactctaccggtggttacctgctcggtgctgccatgaccggcaagtacgttttcgacatccatgacggcgacaggtatttctgcggtggtgacgtcggctggattaccggtcacacctatgtcctctacgccccgctcttgctcggtgtctctaccgtcgttttcgagggtacccccgcctaccccaacttctcccgctactgggacatcattgaggagcacaaggtcactcagttctacgttgctcccactgccctgcgcctgctgaagcgcgccggtgaccatcacgttcgcaacgagatgaagcacctccgtgttctcggctctgtcggtgagcccatcgccgccgaggtctggaagtggtactatgatgttgtcggcaagggccgcgcccagatttgcgacacctactggcagaccgagactggctccaacgtcatcactccccttgccggcgttacccccaccaagcccggttccgcttctttccccttcttcggtatcgagcccgcgcttgtcgaccccgttaccggcgaggagatccacggcaacgacgttgagggtgtcttggccttcaagcagccctggcccagcatggctcgcaccgtctggggtgcccataagcgctacatggagacctacctccatgtgtacaagggctactacttcacgggcgacggtgctgcccgcgatcacgagggcttctactggatccgcggccgtgtcgacgacgtcgtcaacgttagtggccaccgtctcagcactgccgagattgaggctgctctgattgagcatcactccattgccgaggctgctgttgttggtgttgccgacgagctcactggccaggccgtcaacgccttcgttgccgtcaaggagggtacccagatcaacgatgctctccgcaaggagttcgtcctccaggtccgccgcagcatcgggcccttcgctgctcccaaggccatctacatcgttcctgatcttcccaagactcgctctggcaagatcatgcgccgcattctgaggaagattgttgccggcgaggaagatcagcttggtgatatcactactctcagcgatcccagcgtcgttgccaagatcatcgatgtcgtccacgcgcagcgccagtaa

SEQ ID NO: 28619 - protein, 667 aa, Neurospora crassa
MSGSTVPAGAVVPEAHTIETFQPPREMLQNHPSKPHLANFEEYQKLYKQSITEPNVFWAERARELLSWSKDFQTVHSGSLANGDNAWFVEGELNASYNCVDRHAHKDPNRVAIIYEADEPGQGRNVTYGELLREVSKLAHVLTNLGVRKGDTVAIYLPMIPEAIVAMLACTRIGAIHSVVFAGFSSDSLRDRVVDAQSKVVITTDEGKRGGKLIGTKKIVDEALQQCPDVRNVLVYKRTGADISMTPGRDLWWHEEVEKYPAYYTPVAMASEDPLFLLYTSGSTGKPKGVAHSTGGYLLGAAMTGKYVFDIHDGDRYFCGGDVGWITGHTYVLYAPLLLGVSTVVFEGTPAYPNFSRYWDIIEEHKVTQFYVAPTALRLLKRAGDHHVRNEMKHLRVLGSVGEPIAAEVWKWYYDVVGKGRAQICDTYWQTETGSNVITPLAGVTPTKPGSASFPFFGIEPALVDPVTGEEIHGNDVEGVLAFKQPWPSMARTVWGAHKRYMETYLHVYKGYYFTGDGAARDHEGFYWIRGRVDDVVNVSGHRLSTAEIEAALIEHHSIAEAAVVGVADELTGQAVNAFVAVKEGTQINDALRKEFVLQVRRSIGPFAAPKAIYIVPDLPKTRSGKIMRRILRKIVAGEEDQLGDITTLSDPSVVAKIIDVVHAQRQ

SEQ ID NO: 28620 - DNA, 2019 bp, Phycomyces blakesleeanus
  CDS (1)..(2019)
atgctcgataaaaccaccattgacggacaggaggatattgtcacccacccagtccccaagcgcctcctcaactcagcagaatgccctacacctcatgtcaactctcttgaacagtacaagtcaatgtggaaagagagtgtcgaacaacccgagaagttctttggaaatcttggtcgtgagcttttgtcctggagcaagcctttcgagactgtccagtatggttcctttgaggctggagatgtagcctggttcttggagggtgaacttaacgcatcgtacaactgtgttgatcgtcacgctttcaagaaccccgataagattgccatcatccatgaaggcgatgaacccgatcaggtccgccgtatcacttatggtgagcttcttagagaggtctgtcgcatggccaacgtcctcaagggcctcggtgtacgcaagggtgatcccgttgctatctacatgcccatgattcccgagaccattgtcgccatcttggcatgtgcccgtattggtgctatccactctgttgtctttgctggtttttctgccgagatcctccgtgatcgtgttgtcgactgtgctacccgtgtcgtactgacttccgatgaaggcagacgtggtggaaagaacattgccaccaagtgcatcgttgacgaggctctccgtgactacgagaatcactctgtcgaacatgtcctcgtcttccgtcgcaccggatccccagttccctgggttcaaggacgcgatgtctggtggcatgaggagatggccaaggcacgtactttctgctctcctgagcccatgagtgctgaagatcctctctttttgctctacacttctggatccactggtacccccaagggtattttgcacaccactggtggctatcttttgggtgttgctgccacagtcaagtacatctttgattaccaggagaatgatatctacgcttgcatggctgatattggatgggttactggacattcttacattgtttatggtcctctcactcttggtgctaccacagttctattcgaatctaccccaacataccccaacccctctcgcttctggcaactgatcgagaagcataagattacccagttctacaccgcacctacagctattcgtgctctgcagcgtcttggagaccagtggctggataacattgatatgtcaagcctgcgtgtacttggctctgtaggtgaacctattaaccgtgaagcctgggattggtacaacgagaaggttggtaagggtagatgtgctgttgtagatacctactggcaaaccgagactggttccatcattgtcagtcctcttcccggagctactcccacaaagcctggatctgccactcttcccttctttggtattgaccccgtattgcttgatcctactaccggcaaggagttgactgccaccggccaaaccggtgttcttgccatccgcaagcctaggccctcaatggctcgctctgtctacaacaaccacagccgttttgttgagacttatctcaagccctaccccggttactatttcacaggtgatggtgctctccgtgatgatgatggttatatctggattcgtggacgtgttgatgatgttatcaatgtttctggtcaccgtctctccacctctgagatcgaatctgctctcgttaaccatgaggctgttgccgagtctgctgttgttggtgcccatgatgatttgaccggccaatgtatccatgctttcgtttctctgaagccccatattcagatcgctgatggactcgaaaaggttctgactttgcaagttcgcaagactattggtccctttgctgcccctcgtcgcatctacattgtcagtgaccaccccaagactcgttctggaaagatcatgcgccgtattcttagaaagatcgttaacggagagcacgaccaactcggtgatatctctaccctggctgatccttcgattgttgctgtattgatcaacaaggttcaacggttaaacacagaagcaaatatatatatataa

SEQ ID NO: 28621 - protein, 672 aa, Phycomyces blakesleeanus [sequence omitted]

SEQ ID NO: 28622 - DNA, 1989 bp, Schizosaccharomyces pombe
  CDS (1)..(1989)
atgacgaaaaatcctgtcgatcacacactcattatagaacctccggttcgtcttcatggcgatcccaccgtccctaaacctaacattgctagtttggatgagtataaacgtatgtatgaagagtcaattaatgacccatccactttttggggtaacatggctcgcgacatgatgacttgggacaaacaattcagcactgtcgtccaaggttccatcgacaaggcagatagtgcttggttcgctgatggtgccatttccccttgttataatttagtcgatcgtcatgccattgctcgcccagacgccgttgccttgatttatgaagctgatgagcccaatcagggtcgctatatcacctatcgcgagcttttggcttccgtttctcaatgtgccggtgctctccagtccatgggcgttggtatgggagatcgtgttgccatctatatgcctatgattcctgaaacaatcattgccatgttggccattgttcgtttgggtgccattcattctgttatttttgctggtttttctgcagagtctgttgcagaccgtgtcaatgattctgagtgtaaagttatcattaccgctgatgaaagtcatcgtggtggtaaacgaatccctttaaagggtgtcgttaacaaagcccttaccgaatgtcctaccatcaagaaggtactcgtcttccaacgctctgctgagcctaccgccagtatggttgaaggtcgtgatgtctggtggcacgatattattccaaagttcccccggtattgccctcctgcagtcgttaatccagagcatcccttgttccttctctacacttctggaagtacaggaaaacccaagggtgtcgtacattgcactggtggttaccttcttggcgctgctgctacttgcaaatacgttttcgatttgcatcccacggatcgtatgggttgtgctggtgatgtcggttggattactggtcatacctatattgtatacggccccttaatgcttggtgctgctactcttgtttttgaaagcacaccagcttaccctgattactctcgttactggagtgtcgttgagcgtcacagactgactcaatggtatattgcaccaactgccattcgtcttcttcaacgtgccggtaatgaatttgtcaagcacgatcgctcttctcttcgtgtcttgggtagtgttggtgaacccatcgctccagagtcatttatgtggtactacgaagtagttggtgagaaaagatgtgctgttgccgatacttattggcagactgaaacaggttctcacattgttacttctttgggacctgtgacacccatgaagcctggttctgctacgttaccctttttcggtatcgatgcagtcatcattgatcccttgactggcaagatcattgaaggcaacgatgttgaaggtgttcttgctatccgcagtccctggcccagcgctgctagaactgtttggcgcggtcacgatcgttacatcgacacctacttgaagccatatcctgggttctacttcaccggtgatggtgctacccgcgataaagatggttacatttggattcgtggacgtgttgatgatgttgtcaacatttccggccatcgtctgagtacagctgaaatcgaggctgctttgttgtctcatgacgctgtcgcagaatccgctgttgttggtgttcatgatgagctaaccggtcaagccgtcaatgcctttattttattgaaacctggctatgaagctacagtcgaacttgaaaaggagttgatcatggcggttcgatcgacaattggcccctttgcatctccacgcaagttaattttcagtgatcttccaaaaactagaagtggtaaaattatgcgccgcattctccgtaagattttggctggtgaagtcgaccagattggagacttgagtaccttggctgaccctaaggttgttgagcacatcatccatgctgttcattatgcccatcagaagaagccctag

SEQ ID NO: 28623 - protein, 662 aa, Schizosaccharomyces pombe [sequence omitted]

SEQ ID NO: 28624 - DNA, 1641 bp, Pseudomonas oleovorans
  CDS (1)..(1641): transl_table=11
atgttaggtcagatgatgcgtaatcagttggtcattggttcgcttgttgagcatgctgcacgatatcatggtgcgagagaggtggtttcagtcgaaacctctggagaagtaacaagaagttgttggaaagaagtggagcttcgtgctcgtaagctcgcttctgcattgggcaagatgggtcttacgcctagtgatcgttgtgcaacgattgcatggaacaatattcgtcatcttgaggtttactacgctgtctctggcgcaggaatggtatgccatacaatcaatccgaggcttttcattgagcagatcacatatgtgataaaccatgcggaggataaggtagtacttcttgatgatacgttcttgccaatcattgctgagattcacggttcgttaccaaaagtcaaggcgtttgtcttgatggctcataataattcaaatgcatctgctcaaatgccaggattgattgcatacgaggatctaattggtcagggtgatgataactatatatggcctgatgtagatgaaaatgaggcgtctagtctatgttacacatcaggtactacgggcaacccgaagggtgtactttattcacaccgctcgacagttttgcattcaatgaccaccgcaatgccagacacactaaatttgtctgcgcgagataccattttgcccgtagttccaatgtttcatgtaaatgcatgggggactccatattccgctgcaatggttggtgcgaagctagttcttcctggtccggctcttgatggcgctagtttatcgaagttgattgctagcgaaggagttagcattgctcttggggtgccggttgtttggcaggggttgttagcggcacaagccggtaatggttctaaaagccaaagcctcacgcgggttgttgtaggaggttcggcctgtcctgcgtctatgattagagaatttaacgatatatatggtgttgaagttattcatgcttggggtatgactgagctttcgccatttggcacggcaaacactccactcgcgcaccacgtagatttatctccagatgaaaagctttcactgcgcaaaagccaagggcgcccgccttacggtgtcgagttaaaaatcgttaatgatgaggggattagactacctgaagatggtcgaagtaaaggcaacctaatggcgcgtgggcactgggttattaaagattactttcatagcgatcctggttcgacactctcagatggttggttttcaactggagacgtggctaccatagattcggacggtttcatgacaatctgtgatcgtgcaaaggacattataaagtctggcggtgagtggatcagtacggtagagctggagagtattgcgattgcgcaccctcatattgttgatgctgctgttatagctgcaaggcacgaaaaatgggacgagcgacctctcctcatcgcagttaaatcccctaattcggaattaacaagtggtgaggtatgtaattatttcgcagataaggtggctagatggcaaattccagatgccgctatctttgttgaagaactgccacgcaatggtactggcaagattttgaagaatcgtttgcgcgagaaatatggtgatattttattgcgcagtagttcttctgtctgtgaataa

SEQ ID NO: 28625 - protein, 546 aa, Pseudomonas oleovorans
MLGQMMRNQLVIGSLVEHAARYHGAREVVSVETSGEVTRSCWKEVELRARKLASALGKMGLTPSDRCATIAWNNIRHLEVYYAVSGAGMVCHTINPRLFIEQITYVINHAEDKVVLLDDTFLPIIAEIHGSLPKVKAFVLMAHNNSNASAQMPGLIAYEDLIGQGDDNYIWPDVDENEASSLCYTSGTTGNPKGVLYSHRSTVLHSMTTAMPDTLNLSARDTILPVVPMFHVNAWGTPYSAAMVGAKLVLPGPALDGASLSKLIASEGVSIALGVPVVWQGLLAAQAGNGSKSQSLTRVVVGGSACPASMIREFNDIYGVEVIHAWGMTELSPFGTANTPLAHHVDLSPDEKLSLRKSQGRPPYGVELKIVNDEGIRLPEDGRSKGNLMARGHWVIKDYFHSDPGSTLSDGWFSTGDVATIDSDGFMTICDRAKDIIKSGGEWISTVELESIAIAHPHIVDAAVIAARHEKWDERPLLIAVKSPNSELTSGEVCNYFADKVARWQIPDAAIFVEELPRNGTGKILKNRLREKYGDILLRSSSSVCE

SEQ ID NO: 28626 - DNA, 1647 bp, Escherichia coli
  CDS (1)..(1647): transl_table=11
atgaaagtgacattaacgtttaacgaacaacgtcgtgcggcgtatcgtcagcaagggttatggggcgatgcttcgctggccgattactggcagcagaccgctcgtgcgatgccagacaaaattgccgtggtcgataatcatggtgcatcgtacacctatagcgcgctcgatcacgccgcgagctgtctggcaaactggatgttagcgaagggtattgaatcaggcgatcgcatcgcatttcaactgcctggctggtgtgaatttaccgttatctatcttgcctgcctgaaaatcggtgcagtttccgtgccgctgttgccttcctggcgggaagcagaactggtgtgggtgctcaataagtgtcaggcaaaaatgttctttgcaccgacgttgtttaaacaaacgcgtccggtagatttaatcctgccgctgcaaaatcagcttccacaactacaacaaattgtcggcgtggacaaactggctcccgccacctcttccctctcattaagtcagattatcgccgacaatacctcactgaccacggcgataacgacccacggcgatgaattagctgcggtgctgtttacctccggaaccgagggtctgccaaagggcgtgatgctaacgcataacaatattctcgccagtgagcgggcttattgcgcgcgactgaatctgacctggcaggatgtctttatgatgcctgcgccacttggtcacgcaacgggctttctgcatggcgtaacggcaccattcttaattggcgctcgcagcgtgttgttagatattttcactcctgatgcgtgtctcgcgctgcttgagcagcagcgttgcacctgtatgctcggcgcaacgccgtttgtctatgatcttttgaatgtactagagaaacaacccgcggacctttcagcgctgcgtttctttctttgcggcggaaccacaatccccaaaaaagtggcgcgtgaatgccagcagcgcggcattaaattattaagtgtttatggttccacagaaagttcgccgcatgcggtggtgaatctcgatgatcctttgtcgcgctttatgcacaccgatggttacgctgccgcaggtgtagagattaaagtggtcgatgacgcacgcaagaccttaccgccaggttgcgaaggtgaagaagcctcgcgtggccccaatgtgtttatggggtattttgatgaacctgaattaaccgcccgtgccctggatgaagaaggctggtattacagcggcgatctctgccgtatggatgaggctggctatataaaaattaccggacgcaaaaaagatattattgtccgcggcggcgaaaatattagcagccgtgaagtggaagatattttattgcagcatcctaaaattcacgatgcctgtgtggttgcaatgtccgatgaacgtttaggtgaacgatcatgcgcttatgtcgtgctgaaagcgccgcatcattcattatcgctggaagaggtagtggctttttttagccgtaaacgggtcgcaaaatataaatatcctgaacatatcgtggtaatcgaaaaactaccgcgaactacctcaggtaaaatacaaaagtttttgttaagaaaagatattatgcggcgtttaacgcaggatgtctgtgaagagattgaataa

SEQ ID NO: 28627 - protein, 548 aa, Escherichia coli
MKVTLTFNEQRRAAYRQQGLWGDASLADYWQQTARAMPDKIAVVDNHGASYTYSALDHAASCLANWMLAKGIESGDRIAFQLPGWCEFTVIYLACLKIGAVSVPLLPSWREAELVWVLNKCQAKMFFAPTLFKQTRPVDLILPLQNQLPQLQQIVGVDKLAPATSSLSLSQIIADNTSLTTAITTHGDELAAVLFTSGTEGLPKGVMLTHNNILASERAYCARLNLTWQDVFMMPAPLGHATGFLHGVTAPFLIGARSVLLDIFTPDACLALLEQQRCTCMLGATPFVYDLLNVLEKQPADLSALRFFLCGGTTIPKKVARECQQRGIKLLSVYGSTESSPHAVVNLDDPLSRFMHTDGYAAAGVEIKVVDDARKTLPPGCEGEEASRGPNVFMGYFDEPELTARALDEEGWYYSGDLCRMDEAGYIKITGRKKDIIVRGGENISSREVEDILLQHPKIHDACVVAMSDERLGERSCAYVVLKAPHHSLSLEEVVAFFSRKRVAKYKYPEHIVVIEKLPRTTSGKIQKFLLRKDIMRRLTQDVCEEIE

SEQ ID NO: 28628 - DNA, 1683 bp, Bacillus subtilis
  CDS (1)..(1683): transl_table=11
atgcagtctcaaaagccgtggcttgccgagtatcccaacgatatcccgcatgagcttccgttgccgaataaaaccctgcaatccatcctgacagactccgccgcacgattccctgataaaaccgcaatatcgttttatggaaaaaaactcacctttcatgacattctgacggatgctcttaaacttgcagcttttttgcagtgcaatggcctgcaaaaaggagacagagtggctgttatgctgcccaattgcccgcaaacagtgatttcttattatggcgtcttgtttgccggtggcatcgtggtgcagacgaatccgctttataccgagcatgagcttgaataccagcttagagatgctcaggtaagtgtaatcatcaccttagatttgcttttcccgaaggcaataaaaatgaaaacgttatcaatagtcgaccagattttgataaccagtgtaaaagactatttgccttttccgaaaaatattctttacccgctgacgcaaaaacaaaaagtgcatatcgactttgacaaaacagctaacattcacacgttcgcttcctgtatgaagcaggaaaaaactgaactcctgacaatcccgaagatcgatcctgagcatgatatcgctgtcctccagtataccggaggaacaaccggagctccaaaaggggtcatgctcacgcaccaaaatattttggcaaatactgaaatgtgcgccgcttggatgtatgacgtgaaagaaggcgctgaaaaagtgctgggcatcgttccattttttcatgtctacggactgacggcagtcatgaactattcgattaaactaggcttcgaaatgattcttcttcctaagtttgatccgctcgaaacacttaaaatcatcgacaaacacaaaccgacgctctttcctggcgcaccgacaatttacattggccttttgcatcaccctgaattgcagcattatgatctgtcatccattaaaagctgtcttagcggatcagccgcgctccccgtggaggtaaagcagaaatttgaaaaggtgactggtggaaagcttgtggaaggctatggtttgtctgaggcatccccagtgacgcacgccaactttatctggggaaaaaacaagccgggcagtatcggctgtccttggccgagtacggacgctgcgatctattctgaagagacgggtgagcttgccgctccgtatgagcatggagaaatcattgtaaaaggtccgcaagtcatgaaaggatactggaataaaccagaggaaaccgccgcagtgctgagagatggctggctgttcaccggggacatgggctatatggatgaagaaggctttttctatattgctgacaggaagaaggatatcatcattgccggcggttacaatatttacccgcgtgaggtagaagaagcgctttatgaacatgaagccatccaggaaattgttgtcgcaggcgttcccgattcctacaggggagaaacagtaaaagcatttgtcgtattaaagaaaggcgcaaaagccgatacagaagaactggacgcttttgcgagatcacgtctagctccctataaggtgcccaaagcctatgagttcagaaaggagctgccgaaaacggcggtgggaaaaattttaagaaggcgtttacttgaagaagaaaccgaaaatcatcatatcaaataa

SEQ ID NO: 28629 - protein, 560 aa, Bacillus subtilis
MQSQKPWLAEYPNDIPHELPLPNKTLQSILTDSAARFPDKTAISFYGKKLTFHDILTDALKLAAFLQCNGLQKGDRVAVMLPNCPQTVISYYGVLFAGGIVVQTNPLYTEHELEYQLRDAQVSVIITLDLLFPKAIKMKTLSIVDQILITSVKDYLPFPKNILYPLTQKQKVHIDFDKTANIHTFASCMKQEKTELLTIPKIDPEHDIAVLQYTGGTTGAPKGVMLTHQNILANTEMCAAWMYDVKEGAEKVLGIVPFFHVYGLTAVMNYSIKLGFEMILLPKFDPLETLKIIDKHKPTLFPGAPTIYIGLLHHPELQHYDLSSIKSCLSGSAALPVEVKQKFEKVTGGKLVEGYGLSEASPVTHANFIWGKNKPGSIGCPWPSTDAAIYSEETGELAAPYEHGEIIVKGPQVMKGYWNKPEETAAVLRDGWLFTGDMGYMDEEGFFYIADRKKDIIIAGGYNIYPREVEEALYEHEAIQEIVVAGVPDSYRGETVKAFVVLKKGAKADTEELDAFARSRLAPYKVPKAYEFRKELPKTAVGKILRRRLLEEETENHHIK

SEQ ID NO: 28630 - DNA, 1686 bp, Escherichia coli O157
  CDS (1)..(1686): transl_table=11
  misc_feature (417)..(417): y is t or c
ttgaagaaggtttggcttaaccgttatcccgcggacgttccgacggagatcaaccctgaccgttatcaatctctggtagatatgtttgagcagtcggtcgcgcgctacgccgatcagcctgcgtttgtgaatatgggggaggtgatgaccttccgcaagctggaagaacgcagtcgcgcgtttgccgcttatttgcaacaagggttggggctgaagaaaggcgatcgcgttgcgttgatgatgcctaatttattgcaatatccggtggcgctgtttggcattttgcgtgccgggatgatcgtcgtaaacgttaacccgttgtataccccgcgtgagcttgagcatcagcttaacgatagcggcgcatcggcgattgtcattgtgtccaactttgctcacacgctggaaaaagtggtygataaaaccgcagttcagcacgttatcctgacccgtatgggcgatcagctttccacagcgaaaggcacactggttaacttcgttgttaaatacatcaaacgtctggtgccgaaatatcatctgccagatgccatttcatttcgtagcgccctgcacaacggctaccgtatgcagtatgtcaaacctgaactggtgccagaagatttagccttcctgcaatacactggcggcaccacaggtgtggcgaaaggcgcgatgctgactcaccgcaatatgctggcgaacctggaacaagttaacgctacgtatgggcctctgctgcatccgggcaaagagctggtggtgacggcgctgccgctgtatcacatttttgcactgaccattaactgcctgctgtttatcgaactgggtgggcagaacctgcttatcactaacccgcgggatattccggggctggtcaaagagctggcgaaatatccgtttaccgctatcaccggcgtaaacaccttgttcaacgcgttgctgaacaataaagagtttcaacaactggatttctccagtctgcacctttctgcaggcggtgggatgcctgttcagcaagtggtggcagaacgctgggtgaaactgaccggacagtatctgctggaaggttatggcctgaccgaatgtgcgccgctggtcagcgtgaacccctatgatattgattatcatagcggtagcattggtttgccggtgccgtcgacggaagccaaactggtggatgacgacgataatgaagtatcgccaggtcagccaggtgaactttgcgtcagaggtccacaggtgatgctgggctattggcagcgtccggatgctaccgatgaaatcatcaaaaacggctggttacacactggcgacatcgcggtaatggatgaagaaggattcctgcgcattgtcgatcgtaaaaaagacatgattttggtttccggttttaacgtctatcccaacgagattgaagatgtcgtcatgcagcatcctggcgtacaggaagtcgcggctgttggtgtaccttccggctccagtggtgaagcggtgaaaatcttcgtagtgaaaaaagatccatcgcttaccgaagagtcactggtgaccttttgccgccgtcagctcacgggctacaaagtaccgaagctggtggagtttcgtgatgagttaccgaaatctaacgtcggaaaaattttgcgacgagaattacgtgacgaagcgcgcggcaaagtggacaataaagcctga

SEQ ID NO: 28631 - protein, 561 aa, Escherichia coli O157
MKKVWLNRYPADVPTEINPDRYQSLVDMFEQSVARYADQPAFVNMGEVMTFRKLEERSRAFAAYLQQGLGLKKGDRVALMMPNLLQYPVALFGILRAGMIVVNVNPLYTPRELEHQLNDSGASAIVIVSNFAHTLEKVVDKTAVQHVILTRMGDQLSTAKGTLVNFVVKYIKRLVPKYHLPDAISFRSALHNGYRMQYVKPELVPEDLAFLQYTGGTTGVAKGAMLTHRNMLANLEQVNATYGPLLHPGKELVVTALPLYHIFALTINCLLFIELGGQNLLITNPRDIPGLVKELAKYPFTAITGVNTLFNALLNNKEFQQLDFSSLHLSAGGGMPVQQVVAERWVKLTGQYLLEGYGLTECAPLVSVNPYDIDYHSGSIGLPVPSTEAKLVDDDDNEVSPGQPGELCVRGPQVMLGYWQRPDATDEIIKNGWLHTGDIAVMDEEGFLRIVDRKKDMILVSGFNVYPNEIEDVVMQHPGVQEVAAVGVPSGSSGEAVKIFVVKKDPSLTEESLVTFCRRQLTGYKVPKLVEFRDELPKSNVGKILRRELRDEARGKVDNKA

SEQ ID NO: 28632 - DNA, 1875 bp, Oryza sativa
  CDS (1)..(1875)
atggctgcctctctcgagctccagactccagtagcagcagcagcagctctcctcctctccactgctagttcgacgatatcgatggagggcacggtgctctgctccgccaaccacgcgccgctcacgcccatcagcttcctcgagcgcaccgcgctcgtgtaccccgaccgtctcgctattgtcgcctcggatggcagcgccggcgtggccgtgtcgcgcacctggcgggacactcgggcccgctgcctccgcctcgccgccgccctcaccggcctcctcggcgtccagcgccacgacgtggttgcggtgttcgcgcagaacattcctgctgtttgcgagctccacttcggcgtccccatggccggcgccgtcatctgcacgctcaactcgcgcctcgacgccgccatggcggccgtcctgctgcgccactccgaggccaaggtcgtcttcgtcgaccgcgctctgctcggcgtcgcccagaaagccctcgtgctcgtcgccgaagccggagccaggcgtcccgtcttggttctcatcagcgagctcctcgacgaaaacgaacgatcacctcctgatgccaagatcaaggtcacccgagtcgattacgagtacgagcacctcctgagcgccgccgccgccggatcgtcgccggacttcgcgatccggtggccggccgacgagaacgagccgatcgccctgaactacacctccgggacgacgtcgaggcccaagggcgtgatctacagccaccgcggcgcgtacctgagcagcctcgccgccgtgatcgtgaacgccatggcggagacgccggtgtacctgtggaccgtgccgatgttccactgcaacgggtggtgccaggtgtggggcgtggcggcgcagggcggcacgaacgtgtgcgtccgcagggtgaccgcggcggccatcttcgacagcgtggcgcggcacggcgtgacgcacatgggcggcgcgccgacggtgctgagcatgatcgtgaacgcgacggcggacgagcggcggcggcagccgggcgggaggaggaggagggtgacggtgatgaccggcggcgcgccgccgccgccgcaggtgctgttccggatggaggagcaggggttcctggtgatccactcgtacgggctgacggagacgtacgggccggcgacggtgtgcacgtggaagccggagtgggacgcgctgacggcggaggagcgcgcccggatcaagtcgcggcaggggctccaccacgtcgggctggaggcggcggacgtgaaggacccggcgacgatgcggagcgtgccggcggacgggcggacggtcggggaggtgatgctccgggggaacacggtgatgagcgggtactacaaggacggcggcgcgacggcggaggcgctcgccggcgggtggctccggtcgggcgacctggcggtgcgggaggaggacgggtacatcaagatcctggaccggtccaaggacatcatcatctccggcggggagaacatcagcacggtcgaggtggaggcggcgctgttcgggcacccggcggtggaggaggcggcggtggtggggcggccggacgagtactggggcgagacgccgtgcgcgttcgtgaagctgagaggaggaggaggaggaggaggaggcggcgcggcggtggaggaggagctgatggcgttctgccgcgcgcggctgccgcgatacatggcgccgcggacggtggtggtggtggaggaggagcttccgaagacggcgacggggaaggtgcagaaggtggcgctgcgggagcgggccaaggccatgggcagcctccccgccgccgcctcttcctcctccaggcgcgcacccacagggacagctgggtctgggagaagcaagctctga

SEQ ID NO: 28633 - protein, 624 aa, Oryza sativa
MAASLELQTPVAAAAALLLSTASSTISMEGTVLCSANHAPLTPISFLERTALVYPDRLAIVASDGSAGVAVSRTWRDTRARCLRLAAALTGLLGVQRHDVVAVFAQNIPAVCELHFGVPMAGAVICTLNSRLDAAMAAVLLRHSEAKVVFVDRALLGVAQKALVLVAEAGARRPVLVLISELLDENERSPPDAKIKVTRVDYEYEHLLSAAAAGSSPDFAIRWPADENEPIALNYTSGTTSRPKGVIYSHRGAYLSSLAAVIVNAMAETPVYLWTVPMFHCNGWCQVWGVAAQGGTNVCVRRVTAAAIFDSVARHGVTHMGGAPTVLSMIVNATADERRRQPGGRRRRVTVMTGGAPPPPQVLFRMEEQGFLVIHSYGLTETYGPATVCTWKPEWDALTAEERARIKSRQGLHHVGLEAADVKDPATMRSVPADGRTVGEVMLRGNTVMSGYYKDGGATAEALAGGWLRSGDLAVREEDGYIKILDRSKDIIISGGENISTVEVEAALFGHPAVEEAAVVGRPDEYWGETPCAFVKLRGGGGGGGGGAAVEEELMAFCRARLPRYMAPRTVVVVEEELPKTATGKVQKVALRERAKAMGSLPAAASSSSRRAPTGTAGSGRSKL

SEQ ID NO: 28634 - DNA, 1740 bp, Oryza sativa
  CDS (1)..(1740)
atggccgagcagcggtggcggccgccgtacccgtacgcgtcctccgccgccggcggtggcggcgtcgaccgtcgcagtcgcagcggcttctgcgccgccacgcggacgttccacagcctccgctccgtgggacctctcccgccggaggagctcccgctgacggtcgccgcgtacgcgttctcgctgctgtcctcggcgccgccgctcgtcgtcgccggccggggccccgcgctcgtcgacgccgccacgggtattgccgtctcctacccggccttcgtcgcgcgggtccgcttcctcgccggcggcctctggtgctccctcgggctgcgtcccggggacgtcgcgctcgtcgtgagcccgtcctgcctcgacgtcgccgtgctctacttcgcgctcatgtccatcggcgtcgtcgtgtcgcccgccaacccggcctccaccgccgacgagtacgcgcatcaggtcaggctatccaggccagccatcgcgttcgtggcccccgaggtggccgcgaggttgccacgccatgtgagccgcgtcgtcatcgggtcggaggtgttcgacaggctagcctccgcctccgccgccggcggatgggcggcgcctccggcggtggcgatgaagcagccgagcaccgcggcgttgctgtactcgtcgggcaccaccgggcgggtcaaggcggtggcgatcacgcaccgcaacctcatcgcgcagatcagcgcgtacaacgcgatacgtgagacggtggcgagggaggccgccaccgacgcgggcaagggcaagccgccgccgccgtcgccgtcgccgccggccgccgtgacgctgttccccttgccgctgttccacgtgatggggttcgggctgctgacgcgcaccatctcgtcgggggagacggccgtggtgatgcgccggttcgacctcgccgccgcggcgcgcgcggtggagcggtaccgcgtgacgaagctgtccgccgcgccgccggtggtggtggcgctgaccaagtccgacgaggcgcgccgccgtgacctctcgtcgctggtcgccatcgtcgtcggcggcgccccgctgggccgcgaggtctcccagcgcttcgccaccgtcttccccagcgtgcagatcgtccagagttacggtttgacggagtcgaccgggccggtggccaccatggctgggccggaggagtcggcggcgtacggatcggtggggaggcttgcgccgcgcgtgcaggcgaagatcgtcgacacggccaccggcgaggggctttgcttgacactgtcatatatggggatctttttttcaggctatgtgggtgatcctgaagcaactgcagcaacgatcactccagacggctggttgaaaactggtgacctctgctacttcaacgaagatggttatctctacgttgttgatcgattgaaggagctgataaaatacaagggatatcaggtaccaccagctgagctggagcacattctacagtctcgtcctgaaatcgctgatgctgctgttgtcccatatcctgatgaagaagctgggcaactgccaatggcttttgtagtgaggcaaccgggtgcataccttaccgagcaacaagtcatgaactgcgtcgctaaacatgttgcgccctacaagaaagtgcgccgtgtggcttttgtcaatgcaataccgaaatctcctgcagggaagatcctgagacgagagcttgtactgcaggccatggcctccacctccagactttga

SEQ ID NO: 28635 - protein, 579 aa, Oryza sativa
MAEQRWRPPYPYASSAAGGGGVDRRSRSGFCAATRTFHSLRSVGPLPPEELPLTVAAYAFSLLSSAPPLVVAGRGPALVDAATGIAVSYPAFVARVRFLAGGLWCSLGLRPGDVALVVSPSCLDVAVLYFALMSIGVVVSPANPASTADEYAHQVRLSRPAIAFVAPEVAARLPRHVSRVVIGSEVFDRLASASAAGGWAAPPAVAMKQPSTAALLYSSGTTGRVKAVAITHRNLIAQISAYNAIRETVAREAATDAGKGKPPPPSPSPPAAVTLFPLPLFHVMGFGLLTRTISSGETAVVMRRFDLAAAARAVERYRVTKLSAAPPVVVALTKSDEARRRDLSSLVAIVVGGAPLGREVSQRFATVFPSVQIVQSYGLTESTGPVATMAGPEESAAYGSVGRLAPRVQAKIVDTATGEGLCLTLSYMGIFFSGYVGDPEATAATITPDGWLKTGDLCYFNEDGYLYVVDRLKELIKYKGYQVPPAELEHILQSRPEIADAAVVPYPDEEAGQLPMAFVVRQPGAYLTEQQVMNCVAKHVAPYKKVRRVAFVNAIPKSPAGKILRRELVLQAMASTSRL

SEQ ID NO: 28636 - DNA, 1716 bp, Oryza sativa
  CDS (1)..(1716)
atggagggcgccctgctctgcgccgccaaccacgcgccgctcacgcccatcaccttcctcgaccgcgccgccctcgtctaccccgaccgccccgccatcgtcgcctcctcctccgggctcacccgcacctggcgggagacgcgtgaccgctgcctccgcctcaccgccgccctcgccgccctcggcgtccaccgccaccacgtggttgcggtattcgcgcagaatattccggcgatgtgcgagctccacttcggcatcccgatggccggcgccgtcatctgcacgctcaactcccgcctcgacgccgccatggcctccgtcctgctccgccactcggaggccaagctcatcttcgtcgactgcgcgctgctcgacgtcgcccacgacgccatccgccgcatctcccaatcgggcgccacgcctcccgtcctcgtcctcatcagcgagctcctcgacgacccatccgatgccaagctcccgtccggtcgtgtcgactacgagtacgagcacctcgtcggcaatgccgggtcgtcgccggagttcgcggtgcggtggcccgccgacgagaacgagccgatcgcgctcaactacacgtcgggcacgacgtcgaggcccaagggcgtgatctacagccaccgcggcgcgtacctgaacagcctcgccgccgtgctcctcaacgacatggcgtccacgccggtgtacctgtggacggtgcccatgttccactgcaacgggtggtgcatggcgtggggcgtcgcggcgcagggcggcaccaacgtgtgcgtccgcagggtcaccgcggccaccatcttcgacgccgtggcgcgccacggcgtcacccacatgggcggcgcgcccacggtgctgagcatgatcgtgaacgccacggcggaggagcagcggccggtggcgaggagggtgacggtgatgaccggcggcgcgccgccgccgccgaaggtgctgcaccggatggaggagcaggggttcctggtgatccactcgtacgggctgacggagacgtacggcccggcgacggtgtgcacgtggaggccggagtgggacgcgctgccggcggaggagcgggcgcggatcaagtcgcggcagggggtgcaccaccacggcctggaggtggacgtcaaggaccccgccacgatgcggagcgtgccgcgcgacgggaagacgatgggggaggtgatgctgcgggggaacacggtgatgagcggctactacaaggacggcgcggcgacggcggaggcgctcgccggtgggtggttccggtccggcgacctggcggtgcggcacgaggacgggtacgtgaaggtgctcgaccggtccaaggacatcataatctcgggcggggagaacatcagcacaatcgaggtggaggcggcgctgttcagccacccggcggtggaggaggcggcggtggtggggcggccggacgactactggggcgagacgccgtgcgcgttcgtgaagctgaggcccggcgcggcggcggcggcgaaggcgggggtggtggaggaggagctgatggcgtactgcagggcgaggctgccgaggtacatggcgccgcggacggtggtggtggtggaggaggggctgccgaagacggcgacggggaaggtgcagaagttcgagctgcgggcgcgcgccaaggccatgggcaccgtcccggcggcggcggcggcgaagtcgaagaggagcaagctctga

SEQ ID NO: 28637 - protein, 571 aa, Oryza sativa
MEGALLCAANHAPLTPITFLDRAALVYPDRPAIVASSSGLTRTWRETRDRCLRLTAALAALGVHRHHVVAVFAQNIPAMCELHFGIPMAGAVICTLNSRLDAAMASVLLRHSEAKLIFVDCALLDVAHDAIRRISQSGATPPVLVLISELLDDPSDAKLPSGRVDYEYEHLVGNAGSSPEFAVRWPADENEPIALNYTSGTTSRPKGVIYSHRGAYLNSLAAVLLNDMASTPVYLWTVPMFHCNGWCMAWGVAAQGGTNVCVRRVTAATIFDAVARHGVTHMGGAPTVLSMIVNATAEEQRPVARRVTVMTGGAPPPPKVLHRMEEQGFLVIHSYGLTETYGPATVCTWRPEWDALPAEERARIKSRQGVHHHGLEVDVKDPATMRSVPRDGKTMGEVMLRGNTVMSGYYKDGAATAEALAGGWFRSGDLAVRHEDGYVKVLDRSKDIIISGGENISTIEVEAALFSHPAVEEAAVVGRPDDYWGETPCAFVKLRPGAAAAAKAGVVEEELMAYCRARLPRYMAPRTVVVVEEGLPKTATGKVQKFELRARAKAMGTVPAAAAAKSKRSKL

SEQ ID NO: 28638 - DNA, 1665 bp, Oryza sativa
  CDS (1)..(1665)
atggggtcggtggcggcggaggaggtggtggtgttccggtcgaagctgccggacatcgagatcgacaacagcatgacgctgcaggagtactgcttcgcgaggatggcggaggtcggggcgcggccgtgcctgatcgacgggcagaccggggagtcgtacacgtacgcggaggtggagtccgcgtcgcggcgcgccgcggcggggctccggcggatgggggtgggcaagggcgacgtggtgatgagcctcctccgcaactgccccgagttcgccttctccttcctcggcgcggccaggctgggcgccgccaccacgacggcgaacccgttctacacgccgcacgaggtccaccgccaggcggaggccgcgggcgccagggtgatcgtcaccgaggcgtgcgccgtcgagaaggtgcgggagttcgccgcggagaggggcgtccccgtggtcaccgtggacggcgcgttcgacggctgcgtggagttccgcgaggtgctcgccgcggaggagctcgacgccgacgccgacgtccaccccgacgacgtcgtcgccctcccctactcctccggcaccaccggcctccccaagggcgtcatgctcacccaccgcagcctcatcaccagcgtcgcccagcaggtggatggagagaaccctaacctgtacttcagcaaggatgatgttatactatgcctgctgccactgttccacatctactcgctcaactccgtgctgctggctggcctgcgtgccgggtcgaccatcgtgatcatgcggaagtttgatcttggcgcgctcgtcgaccttgtgcgcaagcacaacatcaccatcgcccccttcgtgccccccatcgtggtggagatcgccaagagcccccgcgtcaccgcggaggacctcgcctccatccgcatggtcatgtccggtgccgcgcccatggggaaggaccttcaggatgcattcatggccaagatccccaatgccgtcctcggacagggttacggtatgactgaggctgggccagtgctggcaatgtgcctggcgtttgccaaggagcccttcaaggttaagtccgggtcgtgcggtacagtggtgcgcaacgcggagctgaagatcgtcgaccccgacaccggcacctccctcggccggaaccagtccggcgagatctgcatccgcggagaacagatcatgaaaggctatctgaatgatcctgaggcgaccaagaacaccatcgacgaggacgggtggctgcacaccggagacatcggcttcgtcgacgacgacgacgagatcttcatcgtggacaggctcaaggagatcatcaagtacaaggggttccaggtgccaccggccgagctggaggcgctgctcatcactcacccggagatcaaggacgccgccgtcgtctcgatgaaggatgatcttgccggtgaagtgccagtcgccttcattgtccggacagaaggctcagaaatcaccgaggatgagatcaagaaattcgttgcaaaagaggtggtgttctacaagaggatcaacaaggtgttcttcaccgattccatccccaagaacccttccggcaagatcctcaggaaggacttgagagccaggctcgccgccggcatccccgacgccgtcgccgccgccgccgccgatgcgcccaaaagcagctaa

SEQ ID NO: 28639 - protein, 554 aa, Oryza sativa
MGSVAAEEVVVFRSKLPDIEIDNSMTLQEYCFARMAEVGARPCLIDGQTGESYTYAEVESASRRAAAGLRRMGVGKGDVVMSLLRNCPEFAFSFLGAARLGAATTTANPFYTPHEVHRQAEAAGARVIVTEACAVEKVREFAAERGVPVVTVDGAFDGCVEFREVLAAEELDADADVHPDDVVALPYSSGTTGLPKGVMLTHRSLITSVAQQVDGENPNLYFSKDDVILCLLPLFHIYSLNSVLLAGLRAGSTIVIMRKFDLGALVDLVRKHNITIAPFVPPIVVEIAKSPRVTAEDLASIRMVMSGAAPMGKDLQDAFMAKIPNAVLGQGYGMTEAGPVLAMCLAFAKEPFKVKSGSCGTVVRNAELKIVDPDTGTSLGRNQSGEICIRGEQIMKGYLNDPEATKNTIDEDGWLHTGDIGFVDDDDEIFIVDRLKEIIKYKGFQVPPAELEALLITHPEIKDAAVVSMKDDLAGEVPVAFIVRTEGSEITEDEIKKFVAKEVVFYKRINKVFFTDSIPKNPSGKILRKDLRARLAAGIPDAVAAAAADAPKSS

SEQ ID NO: 28640 - DNA, 1710 bp, Oryza sativa
  CDS (1)..(1710)
atgatcacggtggcggcaccggaggcgcagccgcaggtggcggcggcggtcgatgaggcgccgccggaggcggtgacggtgttccggtccaagcttccggacatcgacatccccagccacctgcccctgcacgagtactgcttcgccagggcggccgagctccccgacgcgccgtgcctcatcgcggcggccacggggaggacgtacacgttcgccgagacgcgcctgctgtgccgcagggccgccgcggcgctgcaccggctgggcgtcggccacggcgaccgcgtcatggtgctgctccagaactgcgtggagttcgccgtggcgttcttcgccgcgtcgttcctcggcgcggtcaccaccgccgccaacccgttctgcacgccgcaggagatccacaagcagttcaaggcctccggcgtgaagctcatcctcacccagtccgtctacgtcgacaagctccggcagcacgaggcgttcccaaggatcgacgcctgcaccgtcggcgacgacacgctcaccgtgatcaccatcgacgacgacgaggcgacgccggaaggctgcctgccgttctgggacctgatcgcggacgccgacgaggggtccgtcccggaggtggccatctcgccggacgaccccgtggcgctgccgttctcgtcgggcacgacgggcttgcccaagggcgtggtgctgacgcacaggagcgtcgtgtcgggcgtggcgcagcaggtggacggcgagaacccgaacctgcacatgggtgccggcgacgtggcgctgtgcgtgctgccgctgttccacatcttctcgctcaactccgtgctgctgtgcgcggtgcgcgccggcgcggcggtggcgctgatgcccaggttcgagatgggcgccatgctgggggccatcgagcggtggcgcgtgacggtggcggccgtcgtgccgccgctcgtgctcgcgctcgccaagaacccgttcgtggagcgccacgacctcagctccatccgcatcgtgctctccggcgccgccccgctcggcaaggagctcgaggacgccctccgcgcccgcctgcctcaggccatcttcggacagggatacgggatgacggaggcggggccggtgctgtcgatgtgcccggcgttcgccaaggagccgacgccggcgaagtccgggtcgtgcgggacggtggtgcggaacgcggagctcaaggtggtcgacccggacacgggcttctccctcggccgcaacctccccggcgagatctgcatccgcggcccacagatcatgaaaggttacctgaacgatcccgaggcgaccgccgcgacgatcgacgtcgaggggtggctgcacaccggcgacatcggctacgtcgacgacgacgacgaggtcttcatcgtcgaccgtgtcaaggagctcatcaaattcaaggggttccaggtgccgccggccgagctggagtcgctgctcatcgctcacccgtccatcgctgacgccgccgtcgtcccgcaaaaggatgacgtcgccggcgaggtcccggtcgcgttcgtggtccgcgccgccgactccgacatcacggaggagtccatcaaggaattcatatccaagcaggtggtgttctacaagaggctacacaaggtgcacttcatccatgcgatccccaagtcggcgtctgggaagatactgaggagagagctcagagccaagctcgcggcgtgctga

SEQ ID NO: 28641 - protein, 569 aa, Oryza sativa
MITVAAPEAQPQVAAAVDEAPPEAVTVFRSKLPDIDIPSHLPLHEYCFARAAELPDAPCLIAAATGRTYTFAETRLLCRRAAAALHRLGVGHGDRVMVLLQNCVEFAVAFFAASFLGAVTTAANPFCTPQEIHKQFKASGVKLILTQSVYVDKLRQHEAFPRIDACTVGDDTLTVITIDDDEATPEGCLPFWDLIADADEGSVPEVAISPDDPVALPFSSGTTGLPKGVVLTHRSVVSGVAQQVDGENPNLHMGAGDVALCVLPLFHIFSLNSVLLCAVRAGAAVALMPRFEMGAMLGAIERWRVTVAAVVPPLVLALAKNPFVERHDLSSIRIVLSGAAPLGKELEDALRARLPQAIFGQGYGMTEAGPVLSMCPAFAKEPTPAKSGSCGTVVRNAELKVVDPDTGFSLGRNLPGEICIRGPQIMKGYLNDPEATAATIDVEGWLHTGDIGYVDDDDEVFIVDRVKELIKFKGFQVPPAELESLLIAHPSIADAAVVPQKDDVAGEVPVAFVVRAADSDITEESIKEFISKQVVFYKRLHKVHFIHAIPKSASGKILRRELRAKLAAC

SEQ ID NO: 28642 - DNA, 1737 bp, Oryza sativa
  CDS (1)..(1737)
atggagcagcttcccaagcgcccggcgaactacgtgccactgagccctgtggggttcctgccgcgcgccaatgccgtctacggcgaccgcacctccgtcatctacggccgcgtccgcttcacctggagccagacctacgcccgctgccgccgcctcgcctcctccctcctctccctcggcgtccgcaaccacgacgtcgtgtcggttttggcgccgaacgtgccggcaatgtacgagatgcacttcgcggtgccgatggccggggcggtgctcaacaccatcaacacgcggctcgacgcgagggcggtggcgggcatcctgcggcactccgaggccaaggtgttcttcgtcgactaccagtacgtgcgcctcgccagcgacgcgctccagatcgtcgccgacgaggggaggcacgtcccgctcgtcgccgtcatcgacgacattgacgtgcccaccggcgtccgcctcggcgagctcgagtacgaggggctggtcgcccgtggcgaccccgccgccgagctgcccagcctcgccgacgagtgggacgccgtcacgctcaactacacgtcgggcaccacgtcggcgcccaagggcgtggtgtacagccaccgcggcgcgtacctgagcaccatgagcttgctcatgtcgtgggtcgtcggcgacgagccggtgtacctgtggacgctgcccatgttccactgcaacgggtggaccttcacctggggcatggcagcgcgcggcggcgtcaacgtctgcatccgcgacgcgcgcgccgcggacatctaccgcgccatcgcgcgccacggcgtcacccacctgtgctgcgcgccggtggtgttcaacatcctgctcgagggcggcgaggcggcggcgaagcagctcgcggccccggtccacgtgctcaccggcggggcgccaccgccggccgccctcctcgagcgcgtcgagcggatcggcttccgcgtgacgcacgcgtacgggctcaccgaggccaccggcccggcgctggcgtgcgagtggcgcgcgcagtgggaccgcctgccgctgccggagcgcgcgcggctcaagtcccggcagggcgtcagcgtcctgtccctcgccgacgccgacgtcaaggacgccaagacgatggcgagagtgccgcgcgacggcaagaccgtcggcgagatcgtgctccgcggcagcagcatcatgaagggctacctcaacaacccggaggcgaacagcgacgccttcaagggcgagtggttcctgaccggcgacgtcggcgtcgtgcacgccgacggctacatcgagatcaaggacaggtccaaggacgtgatcatcagcggcggcgagaacatctgcagcaaggaggtggaggaggtgctgttccagcaccccgccgtcgccgacgcggcggtggtcgccatgccgcacccgcactggggcgagacgccgtgcgcgttcgtcgtggcgagggacaaggcggccggggtgtgcgaggacgacgtcgtcgcgttctgccgcaagcacatggcgcggttcatggtgcccaagaaggtggtcgtctacgacgccatcccgaggaacggcaacggcaaggtcgagaagaacttgctccgggaggcggccaagaagctggcgccggcggccgtgccggcgcagaagacgaaggtgaagacgacgacgacgacggtcggcggccgccgcggcgagcacccggtggcgcatgtcatggccgtgtcaaggctttag

SEQ ID NO: 28643 - protein, 578 aa, Oryza sativa
MEQLPKRPANYVPLSPVGFLPRANAVYGDRTSVIYGRVRFTWSQTYARCRRLASSLLSLGVRNHDVVSVLAPNVPAMYEMHFAVPMAGAVLNTINTRLDARAVAGILRHSEAKVFFVDYQYVRLASDALQIVADEGRHVPLVAVIDDIDVPTGVRLGELEYEGLVARGDPAAELPSLADEWDAVTLNYTSGTTSAPKGVVYSHRGAYLSTMSLLMSWVVGDEPVYLWTLPMFHCNGWTFTWGMAARGGVNVCIRDARAADIYRAIARHGVTHLCCAPVVFNILLEGGEAAAKQLAAPVHVLTGGAPPPAALLERVERIGFRVTHAYGLTEATGPALACEWRAQWDRLPLPERARLKSRQGVSVLSLADADVKDAKTMARVPRDGKTVGEIVLRGSSIMKGYLNNPEANSDAFKGEWFLTGDVGVVHADGYIEIKDRSKDVIISGGENICSKEVEEVLFQHPAVADAAVVAMPHPHWGETPCAFVVARDKAAGVCEDDVVAFCRKHMARFMVPKKVVVYDAIPRNGNGKVEKNLLREAAKKLAPAAVPAQKTKVKTTTTTVGGRRGEHPVAHVMAVSRL

SEQ ID NO: 28644 - DNA, 1659 bp, Oryza sativa
  CDS (1)..(1659)
atgggacgctcaccggagatggaggtggacgcgcgcagcggctactgcgccgccacccgcacgttccggagcaggcgcgccgacgtgccgctgcccgccgacccggaggtcgacgtggtcagcttcctcgcctcgcgccgccactcgggcgttgtggccctcgtcgacgccgcgactgggcgccggatcaccttcaccgagctctggcgcgccgtggccggggcggcatccgccctcgccgcgcaccccgtctccctccgcaagggccacgtcgcgctcatcctctcccctaactccgtccacttccccgtcgccgccctcgccgccatgtcgcttggcgccgtcctcaccaccgccaacccgctcaatacccccgccgagatcgccaagcaggtcgccgacgcccgccccgtcctcgccttcaccacccgcgagctcctccccaagctcccgcgtgcccacgacctccgcgtcgtcctcctggaatccgcccgcctccccggcgacagctccgacccgcggatcgtcgccaccatcgaggagatctccgccacgacgcccgacccggcgcgccgcaaggaccgcgtcacgcaggacgatccggccaccctgctctactcctcggggacgacggggccaagcaagggcgtcgtcgccacgcaccggagcctcatctccatggtccagatcatcatgacgcgattccgcctcgagggctcggacaagacagagacattcctctgcacggtgcccatgttccacgtctacggcctcgtcgccttcgccacggggctgctcggttgcggcgccacggtggtcgtgctctccaagtacgagctcccggagatgctgcgctcgatcaacgcctacggggtgacctaccttccgctcgtgccgccgatcctggtcgccatggtggcgcacccgaagccgctcccgctcgggcagatgcgcaaggtgctatccggcggcgcgccgctgggcaaggagctgatcgaagggttcagggagaagtatccgcaggtggagatcctgcaggggtacgggctgacagagagcaccgccatcggcgcgtccacggactccgccgaggagagccgccggtacgggacggccgggcttctgtctcccaataccgaggctaagattgtcgacccagattccggcgaggcgctgccggtaaaccgcaccggcgagctctggatccgtggaccgtacgtcatgaaaggctacttcaagaacgcagaggcaacacagtcaacgctgacaccagatggatggctaaagaccggtgatctctgctacatagatgaggatggatatctcttcgtagtggaccgcctcaaggagttgatcaaatacaaaggttaccaggtgcctccggcagaactggaagctcttttgttgacgcacccagaggttacggatgttgccgttataccgtttcctgatagggaggtcggccagttcccgatggcctatatagtgaggaagaaaggaagcaacttgtcagagcgcgaggtgatggagtttgtggcaaaacaggttgcgccttacaagaaggttagaaaggtggcgtttgtgacggacattcccaagaatgcatccgggaagatactgaggaaggatcttattaagcttgccacatccaaactatga

SEQ ID NO: 28645 - protein, 552 aa, Oryza sativa
MGRSPEMEVDARSGYCAATRTFRSRRADVPLPADPEVDVVSFLASRRHSGVVALVDAATGRRITFTELWRAVAGAASALAAHPVSLRKGHVALILSPNSVHFPVAALAAMSLGAVLTTANPLNTPAEIAKQVADARPVLAFTTRELLPKLPRAHDLRVVLLESARLPGDSSDPRIVATIEEISATTPDPARRKDRVTQDDPATLLYSSGTTGPSKGVVATHRSLISMVQIIMTRFRLEGSDKTETFLCTVPMFHVYGLVAFATGLLGCGATVVVLSKYELPEMLRSINAYGVTYLPLVPPILVAMVAHPKPLPLGQMRKVLSGGAPLGKELIEGFREKYPQVEILQGYGLTESTAIGASTDSAEESRRYGTAGLLSPNTEAKIVDPDSGEALPVNRTGELWIRGPYVMKGYFKNAEATQSTLTPDGWLKTGDLCYIDEDGYLFVVDRLKELIKYKGYQVPPAELEALLLTHPEVTDVAVIPFPDREVGQFPMAYIVRKKGSNLSEREVMEFVAKQVAPYKKVRKVAFVTDIPKNASGKILRKDLIKLATSKL

SEQ ID NO: 28646 - DNA, 1653 bp, Oryza sativa
  CDS (1)..(1653)
atggaaggctgtatgccgagcgatgcaaactacgcgccgctcaccccggtgagcttcttggagcgcgccgccgtcgtgtacggtgaccgcacggccgtcgtctctggcggcagggagtactcgtggcgcgagacgcgggaacggtgcctcgctggggcgtccgcgctcgcgcgcctcggcgtcggccgccgggacgtggtcgccgtcatcgcagcgaacattccggcgatgtacgagctgcacttcagcgtgccgatggccggcggcgtgctctgcacgctgaacacccggcacgacgcggccatggtgtccgtccttctcagacattcggaggccaaggttttcctcgtcgaatcgcagttcctcgccgtcgcccacgacgccctgaggctgctcgccgatgctaaagccaaatttccccttgtcatcgcgatctccgacaccggcgacagcagcagcagcgacggtggcgggctagagtacgaggcgcttctgagggacgcgccgcggggcttcgagatcaggtggccggccgacgagcgcgacccgatatcgctcaactacacgtcggggacgacgtcgaggccgaagggcgtcatctacagccaccgcggcgcgtacctgaactcgctggccgcgctgctctgcaacgacatgacgtccatgccggtgtacctctggaccgtgcccatgttccactgcaacgggtggtgcatggcgtgggccacggcggcgcagggcgggacgaacatctgcgtcaggaacgtcgtgcccaaggtcatcttcgagcagatcgtgcgccacggcgtgaccaacatgggcggcgcgcccacggtgctcaacatgatcgtgaacgcgccggcgtcggagcggaggccgctgccgaggagggtgctcatctcgacgggcggcgcgccgccgcctccgcaggtgctggccaagatggaggagctcggtttcaacgtccagcacgggtacggcctcaccgagacgtacgggccggcgacgcggtgcgtgtggagacccgagtgggacgcgctgccgctcgccgagcgcgcgcggatcaaggcgctccagggggtgcagcaccagatgttgcaggacgtcgacatcaaggacccggtgaccatggcgagcgtgccgtccgacgggcgcgccgtcggcgaggtcatgctccgcggcaacacggtcatgagcgggtactacaaggacgcggcggccacggaggaggccatgcgcggcgggtggctgcgcacgggcgacctcggcgtgcgccaccctgacgggtatatccagctcaaggatcgcgccaaggacatcatcatatcgggcggcgagaacatcagctcgatcgaggtggagtcggtgctgttcggccaccacgcggtgctcgacgcggcggtggtggcgaggccggacgaccactggggcgagacggcgtgcgcgttcgtcacgctgaaggacggggcaagcgcgacggcgcacgagatcatcgcgttctgccgtgcgcggctgccgcgttacatggcgccgaggacggtggtgttcggcgacctgcccaagacgtcgacggggaagacgcagaagttcttgctccgggagaaggccagggccatgggaagcctgcctatgcaaagcaaatccaagttgtag

SEQ ID NO: 28647 - protein, 550 aa, Oryza sativa
MEGCMPSDANYAPLTPVSFLERAAVVYGDRTAVVSGGREYSWRETRERCLAGASALARLGVGRRDVVAVIAANIPAMYELHFSVPMAGGVLCTLNTRHDAAMVSVLLRHSEAKVFLVESQFLAVAHDALRLLADAKAKFPLVIAISDTGDSSSSDGGGLEYEALLRDAPRGFEIRWPADERDPISLNYTSGTTSRPKGVIYSHRGAYLNSLAALLCNDMTSMPVYLWTVPMFHCNGWCMAWATAAQGGTNICVRNVVPKVIFEQIVRHGVTNMGGAPTVLNMIVNAPASERRPLPRRVLISTGGAPPPPQVLAKMEELGFNVQHGYGLTETYGPATRCVWRPEWDALPLAERARIKALQGVQHQMLQDVDIKDPVTMASVPSDGRAVGEVMLRGNTVMSGYYKDAAATEEAMRGGWLRTGDLGVRHPDGYIQLKDRAKDIIISGGENISSIEVESVLFGHHAVLDAAVVARPDDHWGETACAFVTLKDGASATAHEIIAFCRARLPRYMAPRTVVFGDLPKTSTGKTQKFLLREKARAMGSLPMQSKSKL

SEQ ID NO: 28648 - DNA, 1647 bp, Oryza sativa
  CDS (1)..(1647)
atggatgccggcacggtgcggtgcgcggcgaaccacgcgccgctgacgccgatcagcttcatccagcgcgccgcggccgtctacggcgaccgcgccgcggtggtgtgcggggagaggcggtacacgtggagggaggcgcgggggcggtgcgtccgcttggccgccgcgctcgccgcccgcggcgatgtggttgctgtcctgagcccaaacgtgccggctatgtacgagctgcacttcgccgtgccgatggccggcgcggtcctgtgcacgttcaacgcgcggcacgacgcggccatgatctccaccctcctcagccactccggcgccaaggtgttcttcgtcgagtcgcacctcctcgacgttgggagagccgctctgaggcgcctcgccggctcaaccagcgccgcgagccttccggttctcctaaccatctccgacgacggcgccggcgcccgcgactcgggctgcgtggactacgaggatctcgtcagggacgcgccgtcggagtttgacatccggtggccggtggacgagatggacccgatcacgctcaactacacctccggcacgacgtcgcggcccaagggcgtggtgtacaaccaccgcggcgcctacctcaacaccatcgcgacggtcctcgcgtacgacatcaccgccatgccgacgtacctgtggactgtgcccatgttccactgcaacggctggaacctgccgtggggcgtcgccatgcagggcggcaccaacatctgcctccgccacttcacggcgaaggtcatcttcgacagcatcgcgcggcacggggtgacgcacatgggcggcgcgccgacggtgctcaacatgatcgccaacgcgccggccgcggacaggagggctctgccggggcccgtgcgcgtcatgacgggcggcgcggcgccgccgccccgcgtcttgctcgccgtggaggagctcggcttcgtgctgtaccacatctacggcctcaccgagacgtacggccccgccaccgtctgcacgtggatgccggagtgggacgcgttgccggcggaggagcgcgcgcggctgaaggcgcggcaggggttccatcacatcgcggtgcaggacgtcgccgtcaagaactcggccacgatggagaacgtgccgtacgacgggcagacggtgggcgaggtgatgttccgggggaacacggtgatgagcgggtactacaaggacatcggcgcgacgaaggaatccatggccggcgggtggctgcacagcggggacctcgccgtgcgccaccctgacgggtacatccagctcaaggaccgggccaaggacatcatcatatcgggcggcgagaacatcagctcgatcgaggtggagtcggtgatcttcagccacccggcggtgctggaggcggcggtggtggcgaggccggacgattactggggggaaacgccgtgcgcgttcgtcaagctcaaggatggcgccaacgccacggaaggcgagatcataagcttttgccgggagaggctgccgcattacatggcgccgaagacggtggtgttcgatgatttgcccaagacgtcgacggggaagacgcagaagttcgtgctccgggagaaggcccgggccatgggcagtctcaccaagtctgccaatagtaaactgtaa

SEQ ID NO: 28649 - protein, 548 aa, Oryza sativa
MDAGTVRCAANHAPLTPISFIQRAAAVYGDRAAVVCGERRYTWREARGRCVRLAAALAARGDVVAVLSPNVPAMYELHFAVPMAGAVLCTFNARHDAAMISTLLSHSGAKVFFVESHLLDVGRAALRRLAGSTSAASLPVLLTISDDGAGARDSGCVDYEDLVRDAPSEFDIRWPVDEMDPITLNYTSGTTSRPKGVVYNHRGAYLNTIATVLAYDITAMPTYLWTVPMFHCNGWNLPWGVAMQGGTNICLRHFTAKVIFDSIARHGVTHMGGAPTVLNMIANAPAADRRALPGPVRVMTGGAAPPPRVLLAVEELGFVLYHIYGLTETYGPATVCTWMPEWDALPAEERARLKARQGFHHIAVQDVAVKNSATMENVPYDGQTVGEVMFRGNTVMSGYYKDIGATKESMAGGWLHSGDLAVRHPDGYIQLKDRAKDIIISGGENISSIEVESVIFSHPAVLEAAVVARPDDYWGETPCAFVKLKDGANATEGEIISFCRERLPHYMAPKTVVFDDLPKTSTGKTQKFVLREKARAMGSLTKSANSKL

SEQ ID NO: 28650 - DNA, 1659 bp, Oryza sativa
  CDS (1)..(1659)
atggcgagcgcgtcggtgccggccgccggctacggcgcggacggcgtgtaccgctcgctgcgcccgcccgcgcccgtcgcgtccgacccgggcctctccctcaccgacctcctcctccgccgcgccgacgcctgcccctccgcggtcgcgctcgccgacgcggccgccggcggccgcgccctcaccttcgcggagctgaggtcggccgtcctctccaccgccgtcgcgctctcctcccgcgcgggcgtgcgacccggcgacgccgtgctcctcctcgcgcccaactgcgtgctctacccggtctgcttcttcgccgtcaccgccctcggcgccgtcggcaccaccgtcaacccggactacaccccgcgggagatcgccaagcaggtctccgacgcgcgcgccaagctcgtcatcaccatctccgccctggtgcccaagattgcggggctccgcctccccgtcatcctcctcgacgacgacgcgaacgccgcggccgcctccttgcctccggacgccaccgtcacgctctacaccaacctcgtcgccggcgtgaaggaggcggattaccgccgcccaccaatcaagcagagcgacacggcggctctcctctactcgtcgggcacgacgggggatagcaagggcgtcatcctgacgcaccgcaacttcatcgccgcggcgaggatggtgacctccgaccaagacgagcgccgggaggggcccaacgtgttcctctgcttcctccccatgttccacatcttcggcctgtccgtcatcacgtacgcgcagctgcatcgcgggaacgccatcatcgccatgtcgcggttcgacatcaactccctgatggaggccgtgcagaggcaccgcgtcacgcacctgttctgcgtgccgccggtcattatcgcgctcgccaagcacgggaaggccggtaagtacgatctcagctctctcaagttcatcggctccggcgccgcgccgctcggcaaggatgtgatggaggtcgtggccaagaaattcccggacagtgagattgttcagggttatggtatgactgagacttgtggaatcatatcgctcgagtacccagaaaaaggacaggctcgtgaatttgggtcaactggcacgcttgtctcaggagttgaggcaaagattgtcgacataaagacattaaaacatctaccgcccaatcaagtaggagaaatttgtgttcgagggccaaatgtaatgcaagggtatttcaacaatgtgcaagctactgaatttacaatcaagcaagggtggttgcacactggtgatcttggatacttcgacggaggaggccagctttttgttgttgatagacttaaagaactgattaagtacaaaggtttccagattgcacctgccgagcttgaagggttacttctatctcatccagagattctagatgctgttgttatcccgtttcctgatgctaaagctggggaggttcccattgcctatgttgttcggtcacctgacagttcattgacagaagttgatgtccaaaaatttattgaaaaacaggtggcgtactacaaaagattgaagagagttacctttgtgggcagcgtgcccaaatcagcttcaggaaagattctgagaaggcagcttatcgcccaagtgagatcatccaagttgtag

SEQ ID NO: 28651 - protein, 552 aa, Oryza sativa
MASASVPAAGYGADGVYRSLRPPAPVASDPGLSLTDLLLRRADACPSAVALADAAAGGRALTFAELRSAVLSTAVALSSRAGVRPGDAVLLLAPNCVLYPVCFFAVTALGAVGTTVNPDYTPREIAKQVSDARAKLVITISALVPKIAGLRLPVILLDDDANAAAASLPPDATVTLYTNLVAGVKEADYRRPPIKQSDTAALLYSSGTTGDSKGVILTHRNFIAAARMVTSDQDERREGPNVFLCFLPMFHIFGLSVITYAQLHRGNAIIAMSRFDINSLMEAVQRHRVTHLFCVPPVIIALAKHGKAGKYDLSSLKFIGSGAAPLGKDVMEVVAKKFPDSEIVQGYGMTETCGIISLEYPEKGQAREFGSTGTLVSGVEAKIVDIKTLKHLPPNQVGEICVRGPNVMQGYFNNVQATEFTIKQGWLHTGDLGYFDGGGQLFVVDRLKELIKYKGFQIAPAELEGLLLSHPEILDAVVIPFPDAKAGEVPIAYVVRSPDSSLTEVDVQKFIEKQVAYYKRLKRVTFVGSVPKSASGKILRRQLIAQVRSSKL

SEQ ID NO: 28652 - DNA, 1725 bp, Oryza sativa
  CDS (1)..(1725)
atgggctcgccggggcatggggatgcggcggagagggacatcgacgatctcccacggaacgacgccaactacacggcgctgacgccgctctggttcctggagcgcgccgccgtggtccacccggacagggccgccgtcgtgcacggcccggtgaggtacacctgggcggagacctaccgccgctgccgccgcctcgcctccgccctcgcgcagcgatccgtcggccccggctgcacggtcgctgtgattgctccaaatgtcccggcactgtatgaagctcatttcggcgtccccatgtctggagcggtggtgaactgcgtaaacatcaggttaaacgccgagacaattgccttcctccttgaccactcagtggcagaggtcgtcatggtggaccaggaattcttcaccctagctgaagagtccctgaagatactggccgagaagaagaaatggtcgttcaggcccccgatcctgatcgtcatcggcgacccgacctgcgatccgaagcctctgcagtacgctctggggagaggagcgatcgagtacgaggagttcctgaagaccggtgacccggagttcgcctggaagccgcccaaggatgaatggcagagcatcgcgttgggttacacctccgggactacttcgagccccaagggcgtcgtgctgcaccaccgtggcgcctatgtcatggcgctcggtgtcgccatggtttgggggatgcctgagggagctgtgtacctgtggactctgcccatgttccattgtaatggttggtgttacacttgggcaatggctgcgatgtgtggaaccaacatatgtcttcgccaggtgagttcaaaggcgatatactctggcatagtgaaccatggagtgacacacatgtgcgccgcgccggtcgtcttcaacaacctcatcaacgctccggcgagcgagaccttcctgccgctcccgcgcgtggtcaacatcatggtggccggagccgccccgacgccgtcgctgctcgcggcgctgtcgatccgcggcttccgcgtgacccacacgtacgggctgtcggagacgtacggcccgtcgacggtgtgcgcgtggaagccggagtgggacaggctgccgctggaggagcggtcgcggctgcactgccggcagggcgtgaggtacggggcgctggagggcctcgacgtggtggacccgaagacgatggcgccggtggccgccgacggaaagtcgtacggggagatcgtgatgcggggcaacgccgtgatgaagggctacctgaagaaccccaaggcgaacgcggaggcgttcgccggcgggtggtaccactccggcgaccttggggtgaagcaccccgacgggtacatcgaggtgaaggaccggatgaaggacatcatcatctccggcggggagaacatcagcagcctggaggtggagaaggtgctgtacgcgcacccggcggtgctggaggcgtcggtggtggcgagggcggacgagcagtggggggagtcgccgtgcgcgttcgtgacgctcaaggaaggcgccgacagctccgacgaggcggcggtggccggcgacatcatgcggttctgcagggagaggatgccggggtactgggtgcccaagtcggtggtgttcgggccgctgcccaagacggcgacggggaagatcaagaagcacgagctgaggaccaaggccaaggagctcggccccgtcaagaagagcaggatgtga

SEQ ID NO: 28653 - protein, 574 aa, Oryza sativa
MGSPGHGDAAERDIDDLPRNDANYTALTPLWFLERAAVVHPDRAAVVHGPVRYTWAETYRRCRRLASALAQRSVGPGCTVAVIAPNVPALYEAHFGVPMSGAVVNCVNIRLNAETIAFLLDHSVAEVVMVDQEFFTLAEESLKILAEKKKWSFRPPILIVIGDPTCDPKPLQYALGRGAIEYEEFLKTGDPEFAWKPPKDEWQSIALGYTSGTTSSPKGVVLHHRGAYVMALGVAMVWGMPEGAVYLWTLPMFHCNGWCYTWAMAAMCGTNICLRQVSSKAIYSGIVNHGVTHMCAAPVVFNNLINAPASETFLPLPRVVNIMVAGAAPTPSLLAALSIRGFRVTHTYGLSETYGPSTVCAWKPEWDRLPLEERSRLHCRQGVRYGALEGLDVVDPKTMAPVAADGKSYGEIVMRGNAVMKGYLKNPKANAEAFAGGWYHSGDLGVKHPDGYIEVKDRMKDIIISGGENISSLEVEKVLYAHPAVLEASVVARADEQWGESPCAFVTLKEGADSSDEAAVAGDIMRFCRERMPGYWVPKSVVFGPLPKTATGKIKKHELRTKAKELGPVKKSRM

SEQ ID NO: 28654 - DNA, 1668 bp, Oryza sativa
  CDS (1)..(1668)
atgggcgacgccgcggtacccgccatggtggtggaggaggaggaacaggagcacgtgttccggagcaggttcccgccggtggccgtgccggacggcgtcaccgtgccggagttcgtgctggacggcgccgaggcctacgccgacagggtggcgctcgtggaggccgcggcgggcgggcggtcgtacacgtacggcgaggtggcgcgcgacacggcgcggttcgccagggcgctccggtcggtgggcgtccggaaggggcacgtcgtcgtcgtcgcgctcccaaacctcgccgtgtaccccgtcgtgtcgctcgggatcatgtcggcgggggccgtgttctccggcgtgaacccgcgcgcgctcgccgcggagatcaagaagcaggtggaggactccgaggcgaagctggtcgttgccaacgaggtcgcgttcgacaaggtgaaggacgccggcgtgccggtgatcggcgtcggcgacagggagcggatgcctggggcgatcagctgggacgggctcctcgccgcggcggaccgcaccggcgccggggtggtgccggtggacgcggcgcagcagtccgacctgtgcgcgctcccctactcctccggcaccaccggcgtgtccaagggcgtgatgctgagccaccgcaacctggtgtccaacctctgctcgtccatgttcgccgtggcgccggagacggccgggcaggtggtgacgctggggctcatgccgttcttccacatctacggcatcaccggcatctgctgcgccacgctccggcacaagggcacggtggtggtgatggaccgcttcgacctccgcacgttcctccgtgcgctcgtcgaccaccgcgtcatgttcgcgccgctggttccccccgtgatgctcgccatggtcaagagccccgtcgccgacgagttcgacctctccgacctcgccctcaagtccgtcatgaccgccgccgcgccgctcgcccccgacctcctcgccgcgttccagcgcaagttccccggcgtgcaggtggaggaagcctacggcctcaccgagcacagctgcatcaccctcacgcacgccgccggcgacggccacggccacgtcgccaagaagagctcggtggggttcatcctgccgaacctggaggtgaagttcgtggacccggacaccgggaggtcgctgccggcgaacacgccgggggagctgtgcgtgcggagccagagcgtgatgcaggggtactacaagaggaaggaggagacggagcgcacggtggacggcaaggggtggctgcacaccggcgacgttgggtacatcgacggcgacggcgacgtgttcatcgtggacaggatcaaggagctgatcaagtacaaggggtttcaggtcgcccccgccgagctcgaggccgtcctcctctcccacccctccgttgaggacgccgccgtcttcggggtgccggacgaggaggccggcgaggtgccggtggcgtgcgtggtgcggcggcacggtgcggaggagggggaggaggagatagtggcgtacgtggcggagagggtggcgtcgtacaagcgggtccgggtgctgcacatcgtcgacgccatccccaagtcggtgtccgggaagatcctgaggaggcagcttagggacgagttcatcaagaggatgaaaccgtcagcttga

SEQ ID NO: 28655 - protein, 555 aa, Oryza sativa
MGDAAVPAMVVEEEEQEHVFRSRFPPVAVPDGVTVPEFVLDGAEAYADRVALVEAAAGGRSYTYGEVARDTARFARALRSVGVRKGHVVVVALPNLAVYPVVSLGIMSAGAVFSGVNPRALAAEIKKQVEDSEAKLVVANEVAFDKVKDAGVPVIGVGDRERMPGAISWDGLLAAADRTGAGVVPVDAAQQSDLCALPYSSGTTGVSKGVMLSHRNLVSNLCSSMFAVAPETAGQVVTLGLMPFFHIYGITGICCATLRHKGTVVVMDRFDLRTFLRALVDHRVMFAPLVPPVMLAMVKSPVADEFDLSDLALKSVMTAAAPLAPDLLAAFQRKFPGVQVEEAYGLTEHSCITLTHAAGDGHGHVAKKSSVGFILPNLEVKFVDPDTGRSLPANTPGELCVRSQSVMQGYYKRKEETERTVDGKGWLHTGDVGYIDGDGDVFIVDRIKELIKYKGFQVAPAELEAVLLSHPSVEDAAVFGVPDEEAGEVPVACVVRRHGAEEGEEEIVAYVAERVASYKRVRVLHIVDAIPKSVSGKILRRQLRDEFIKRMKPSA

SEQ ID NO: 28656 - DNA, 1677 bp, Oryza sativa
  CDS (1)..(1677)
atggacaagctcggcgccaacccggccaactcgtgcgcgctcacgccgctgggcttcctggagcgcgccgccaccgtgttcggcgactgcccgtccgtcgtctaccacgacaccgtcttcacgtggtcgcagacccaccgccgctgcctccgcctcgcctccgcgctcgtctcctccctcggcatctcccgcggcgacgtcgtgtccgtgctcctgccgaacgtgccggcgatgtacgagatgcacttcgccgtgccgatgagcggcgccgtgctgaacagcatcaacacgcggctcgacgcgcgcacggtgtccgtcctgctccgccactccggctccaagctcatcttcgtcgacccggcgctgctccccgtcctccgcgacgcgctccgcctcctcccggcggggcacacggccccgcgcgtcgtcctcgtcgaggatccccatgagaaggagttccctcccgcccccgccgccgcgctgacgtacgagaggctcgtcgagaagggggacccggagttcgcgtgggtgcggccggcgagcgagtgggacccgatgatcctcaactacacctccggcaccacgtcggcgcccaagggggtggtgcactgccaccgggggatcttcctcatcaccgtcgactcgctggtcgactgggcggtgccgccgcggccgacgtacctgtggacgctccccatgttccacgccaatggctggagcttcccatgggggatggccgtggtgggcggcaccaacgtctgcctccgccgcgtcgacgccgccgaggtgttcgacacaatcgcgcgccgcggcgtcaaccacctgtgcggcgcgcccgtcgtgctcaacatgctggcgaacgcgcccgagggcgtgcggaagccgctcccggggaaggtgcggatcctcacggccggcgcgccgccgccggccgccgtgctgtaccgcacggaggcgatcggcttcgaggtcagccacgggtacgggctgacggagaccgcgggtctggtgctctcgtgcgcgtggaagggcgagtgggacaagctcccggcctccgagcgcgcgcggctcaaggcgaggcagggcgtgcgcacgccggggatggccgaggtggacgtcgtggacggcgagaccggccgcagcgtgccccgcgacgggtcgaccatgggcgagatcgtgctccgcggcggctgcatcacgctgggctacctcaacgacgaggcggcgacgaaggcggcgatccgggacaacgggtggttctacaccggcgacgtcggggtgatgcacccggacgggtacgtggagatccgggaccggtccaaggacgtgatcatcagcggcggggagaacatcagcagcgtggaggtggagtccgtgctgtacggccacccggcggtgaacgaggcggcggtggtggcgcggccggacgagttctggggggagacgccgtgcgcgttcgtcagcctcaagcagggcggcggcgcggtgacggcggcggacgtggtcgcgtggagccgggagcgcatgccgcggtacatggtcccaaagacggtgatcttccgcgacgagttaccgaagacgtccaccgggaagatccagaagtacgtgctccggaatatcgccaaggagatggggcccaccacgggcaccaacaccaaacgcaacagtaaaatgtag

SEQ ID NO: 28657 - protein, 558 aa, Oryza sativa
MDKLGANPANSCALTPLGFLERAATVFGDCPSVVYHDTVFTWSQTHRRCLRLASALVSSLGISRGDVVSVLLPNVPAMYEMHFAVPMSGAVLNSINTRLDARTVSVLLRHSGSKLIFVDPALLPVLRDALRLLPAGHTAPRVVLVEDPHEKEFPPAPAAALTYERLVEKGDPEFAWVRPASEWDPMILNYTSGTTSAPKGVVHCHRGIFLITVDSLVDWAVPPRPTYLWTLPMFHANGWSFPWGMAVVGGTNVCLRRVDAAEVFDTIARRGVNHLCGAPVVLNMLANAPEGVRKPLPGKVRILTAGAPPPAAVLYRTEAIGFEVSHGYGLTETAGLVLSCAWKGEWDKLPASERARLKARQGVRTPGMAEVDVVDGETGRSVPRDGSTMGEIVLRGGCITLGYLNDEAATKAAIRDNGWFYTGDVGVMHPDGYVEIRDRSKDVIISGGENISSVEVESVLYGHPAVNEAAVVARPDEFWGETPCAFVSLKQGGGAVTAADVVAWSRERMPRYMVPKTVIFRDELPKTSTGKIQKYVLRNIAKEMGPTTGTNTKRNSKM

SEQ ID NO: 28658 - DNA, 1557 bp, Oryza sativa
  CDS (1)..(1557)
atggagaccccgactctgaccacgctgctcaaggcggcggtggccacgttcccctcgcgccgcgccctcgccgtcccgggcaaggtcgacctgtcgcacgcggcgctcgacgcgctcgtcgacgccgcggccgcgcgcctcgccgccgatgcgggcgtgctccccggccacgtcgtcgcgctcgccttccccaacaccgtcgagctggtgatcatgttcttggcggtgatccgagcgcgcgcggtggcggcgccgctgaacccggcgtacacgcaggaggagttcgagttctacctctccgactccggggcgcgtctcctcatcaccaaccccgagggcaacgtcgccgcgcaggcggccgcctccaagctgggcctcgcccacaccaccgccagcctcaaggacgccgccggccaagtccacctcgccggcttccccgcctccgccgccgccgcggccaaggacttcgccaacgacccgtccgacgtggcgctgttcctgcacacctccggcaccacgagccggcccaagggcgtgccgctcacgcagcgcaacctggcggcgtccgtccagaacatccgcgccgtgtaccgcctcaccgaggcggacgcgacggtgatcgtgctcccgctcttccacgtccacggcctcctctgcggcctcctcgcctccctggcgtccggcgcgtccgtgacgctcccggcggcggggcgcttctcggcgtccaccttctgggccgacatgcgcggcgccggcgcgacgtggtacacggcggtgccgacgatccaccagatcatcatcgaccggcacacctcgaagccggaggcggagtacccggcgctgcggttcatccgcagctgcagcgcgtcgctggcgccggcgatcatggagaagctggaggcggcgttcggggcgccggtggtggaggcgtacgcgatgacggaggcgtcgcacctgatgacgtcgaacccgctgccggaggacggggcgaggaaggccgggtcggtggggcgcgcggtgggtcaggagatggcgatcctggacgaggaagggcggcgggtggaggccgggaagagcggcgaggtgtgcgtgcgcggcgccaacgtgacgagcgggtacaaggggaacccggaggcgaacgaggcggcgttccggttcgggtggttccacaccggcgacatcggcgtcgtggacgaggaggggtacctgcggctggtggggcggatcaaggagctgatcaaccgcggcggcgagaagatatcgccgatcgaggtggactcggtgctgctcgggcacccggccatcgcgcaggccgtggcgttcggggtgcccgacgccaagtacggggaggagatcaactgcgcggtgatcccccgggagggcgtgtcgctcggggaagaggaggtgctggcctactgccggaggaacctggccgcgttcaaggtgcccaagaaggtgtacatcgccgacgagcttcccaagacggccaccggcaagatccagcgccgcatcgtcgcgcagcacttcgtcgtgccggtgctgcccaccaaggcgtaa

SEQ ID NO: 28659 - protein, 518 aa, Oryza sativa
METPTLTTLLKAAVATFPSRRALAVPGKVDLSHAALDALVDAAAARLAADAGVLPGHVVALAFPNTVELVIMFLAVIRARAVAAPLNPAYTQEEFEFYLSDSGARLLITNPEGNVAAQAAASKLGLAHTTASLKDAAGQVHLAGFPASAAAAAKDFANDPSDVALFLHTSGTTSRPKGVPLTQRNLAASVQNIRAVYRLTEADATVIVLPLFHVHGLLCGLLASLASGASVTLPAAGRFSASTFWADMRGAGATWYTAVPTIHQIIIDRHTSKPEAEYPALRFIRSCSASLAPAIMEKLEAAFGAPVVEAYAMTEASHLMTSNPLPEDGARKAGSVGRAVGQEMAILDEEGRRVEAGKSGEVCVRGANVTSGYKGNPEANEAAFRFGWFHTGDIGVVDEEGYLRLVGRIKELINRGGEKISPIEVDSVLLGHPAIAQAVAFGVPDAKYGEEINCAVIPREGVSLGEEEVLAYCRRNLAAFKVPKKVYIADELPKTATGKIQRRIVAQHFVVPVLPTKA

SEQ ID NO: 28660 - DNA, 1680 bp, Oryza sativa
  CDS (1)..(1680)
atggggtccatggcggcggcggcggaggcggcgcaggaggaggagacggtggtgttccggtccaagctccccgacatcgagatccccagccacctcaccctgcaggcctactgcttcgagaagcttccggaggtggccgcccgcccctgcctcatcgacgggcagaccggggcggtgtacagctacggcgaggtggaggagctctcccggcgcgcggcggcggggctgcggcggctcggggtggggaagggcgacgtggtgatgagcctcctccgcaactgccccgagttcgccttcaccttcctcggcgccgccaggctgggcgcggccaccaccaccgccaacccgttctacaccccgcacgagatccaccgccaggcgtcggcggcgggcgccagggtgatcgtgaccgaggcgtgcgcggtggagaaggtgcgcgggttcgccgccgaccgcggcatccccgtggtcgccgtcgacggggacttcgacggctgcgtcgggttcggggaggcgatgctggacgcgtccatcgagccgctcgacgccgacgaggaggtccaccccgacgacgtcgtcgccctcccttactcctccggcaccaccggcttgcccaagggcgtcatgctcacccaccgcagcctcgtcaccagcgtcgcgcagcaggtggacggggagaacccgaacctgtacttcaggagggaggacgtggtgctgtgcttgctgccgctgttccacatctactcgctcaactccgtgctgctggcggggctgcgagccgggtcggcgatcgtgatcatgcgcaagttcgacctgggcgcgctggtggacctgacgcggaggcacggcgtcaccgtcgcgccgttcgtgccgcccatcgtggtggagatcgccaagagcccccgcgtcaccgccgacgacctcgcctccatccgcatggttatgtccggcgccgcccccatggggaaggacctccaggacgccttcatggccaagatccccaacgccgtcctgggacaggggtatgggatgactgaggctggacctgtgctggccatgtgtctggccttcgcaaaggagccattcgaggtcaagtccggctcgtgcgggacagtcgtcagaaacgcggagctgaagatcgttgaccctgacaccggcgccacccttggccggaaccagtccggggagatttgcatccggggagaacaaatcatgaaaggttatctgaatgacccggagtccacgaagaacaccatcgacaagggcggttggctgcacacaggagacattggttatgttgacgacgacgacgagattttcattgttgaccggctcaaggaaataataaaatacaaggggttccaagtacctcctgcggaacttgaagctcttctcatcacacaccctgatatcaaggatgctgccgttgtaccgatgatagacgaaattgcgggtgaagtgccggttgcattcattgtacggattgaaggatctgcaatcagcgagaatgagatcaagcaatttgtggcaaaggaggttgttttctacaagaggctcaacaaagttttcttcgcggattcaattccgaagagtccttctggcaagattctcaggaaggacctcagagcaaagcttgcagccggcatccctaccaatgataatacacagttgaaaagctaa

SEQ ID NO: 28661 - protein, 559 aa, Oryza sativa
MGSMAAAAEAAQEEETVVFRSKLPDIEIPSHLTLQAYCFEKLPEVAARPCLIDGQTGAVYSYGEVEELSRRAAAGLRRLGVGKGDVVMSLLRNCPEFAFTFLGAARLGAATTTANPFYTPHEIHRQASAAGARVIVTEACAVEKVRGFAADRGIPVVAVDGDFDGCVGFGEAMLDASIEPLDADEEVHPDDVVALPYSSGTTGLPKGVMLTHRSLVTSVAQQVDGENPNLYFRREDVVLCLLPLFHIYSLNSVLLAGLRAGSAIVIMRKFDLGALVDLTRRHGVTVAPFVPPIVVEIAKSPRVTADDLASIRMVMSGAAPMGKDLQDAFMAKIPNAVLGQGYGMTEAGPVLAMCLAFAKEPFEVKSGSCGTVVRNAELKIVDPDTGATLGRNQSGEICIRGEQIMKGYLNDPESTKNTIDKGGWLHTGDIGYVDDDDEIFIVDRLKEIIKYKGFQVPPAELEALLITHPDIKDAAVVPMIDEIAGEVPVAFIVRIEGSAISENEIKQFVAKEVVFYKRLNKVFFADSIPKSPSGKILRKDLRAKLAAGIPTNDNTQLKS

SEQ ID NO: 28662 - DNA, 1677 bp, Oryza sativa
  CDS (1)..(1677)
atggcagctcccacctccatggcgaacgcggatggcgagagcacgcgcaccggctactgcgccgcgaccaagtcgttccgcagcctccggccgccggtgccgctgcctccgccggacgtcccgctctccttcccggagttcgcgttctcgctgctgccgcggtcgtcgtcgtcgtcgtcgtcgtctcttctcccggcgaacccggcgctcgtcgacgcggccactggcgaggccgtctcgttccaggcgttcctgtcgcgggtgcgcgcgctcgccggagccctccgctcgcgcgtcgggctgcgcggcggcgacgtcgcgttcgtgctcgcgcccgcagggctcgacgtgcccgtgctgtacttcgcgctcctctccatcggcgccgtcgtgtcccccgccaacccggccctcacccccgccgaggtttcccgcctcgtctccctctccggcgcatccgtcgccttcgccgtctcgtccacagccaccaagctccccgctggcctcaccaccgtcgtcctcctcgactcgccacacttccgctccctcttgatggattgcggccaagcccaaggacaggagccgctgccggtggtggtggtgcggcagtcggagacggcggcgatccagtactcctcggggacgacggggcgggtgaaggcggcggcgctgcctcaccggagcttcatcgccatggtggcagggttccacgcgctgcgggccaaggctcgggaggtcaggacgctgctcggtgccccgatgttccactccatggggttcttgttcgtgctgcagggcgtcgcgctgggggcgacgacggtggtggtgacggacgcggtggcgcgggccgggatacgggggctcgtggaggcggcggagcgttgggcggtcatggacatgacggcctcgccgccggtggtgctggggatgaccaagcagaggtgccggctgccggcgctggagcggataacctgcggcggcgccccgctgccggcgccggcgatcgaacggttccgccggcgattcccccacgtcgatttgtgcatgggttatggatcaaccgaggcaggtggcatatcaaggatgatcagccaggaagagtgcaaccacataggctctgctggccgtgtcactgagaatgtcgaggtaaagattgttgaccatgtaacaggcaagccattgcctgccgggcagcaaggggagctttgggtgagagggcctgccgtcatgacaggttacgtgggtgacaacgaggccaatgcaaccacctttaattctgaaggatggctgaaaactggtgacctttgctatattgatcaggacgggtttctttttgtagttgacaggctaaaggaactgattaaatacaaggcctaccaggtaccacctgcagagctggagcttgtcctgcattctttgccacaaattgttgatgctgcagttatgccgtatcctcacgaagaagcagggcagataccagtagcacttgtcgtaaagcaaccaggaagcaagcttactgaagcagaagtcatgtacaatgtcgccaagcaggtagctccatacaagaagatccggaaagtgctgtttgttgactccatacccaaatcgccatctgggaagatcttgagaagggaattggtaaatcatctgcggttgtgtgaattgtcgagattgtga

SEQ ID NO: 28663 - protein, 558 aa, Oryza sativa
MAAPTSMANADGESTRTGYCAATKSFRSLRPPVPLPPPDVPLSFPEFAFSLLPRSSSSSSSSLLPANPALVDAATGEAVSFQAFLSRVRALAGALRSRVGLRGGDVAFVLAPAGLDVPVLYFALLSIGAVVSPANPALTPAEVSRLVSLSGASVAFAVSSTATKLPAGLTTVVLLDSPHFRSLLMDCGQAQGQEPLPVVVVRQSETAAIQYSSGTTGRVKAAALPHRSFIAMVAGFHALRAKAREVRTLLGAPMFHSMGFLFVLQGVALGATTVVVTDAVARAGIRGLVEAAERWAVMDMTASPPVVLGMTKQRCRLPALERITCGGAPLPAPAIERFRRRFPHVDLCMGYGSTEAGGISRMISQEECNHIGSAGRVTENVEVKIVDHVTGKPLPAGQQGELWVRGPAVMTGYVGDNEANATTFNSEGWLKTGDLCYIDQDGFLFVVDRLKELIKYKAYQVPPAELELVLHSLPQIVDAAVMPYPHEEAGQIPVALVVKQPGSKLTEAEVMYNVAKQVAPYKKIRKVLFVDSIPKSPSGKILRRELVNHLRLCELSRL

SEQ ID NO: 28664 - DNA, 1830 bp, Oryza sativa
  CDS (1)..(1830)
atggagacggagttgcacctcgccgccggctactgcgccgccacgggcgtctaccggagcggccaccctccgcagttcgccgccgccgccgcgctctccttcccggagtacatcctcccgcacatgctcctccccggccgccgagcccgcccggccttcgtcgacgcctccaccggcgccgcgctctccttcgccggcctccgcgcgctctcgctccgcgtcgcgcgcgcgctcgccgccgccggcctccgccgcggccgcgtcgcgctcctcctgtcgccgaactcgctccacttccccgcgctctcgctcgccgtgctctccctaggcgccgtgctctccgccgccaacccgctcctcacgcccgacgagctcgctcggcaagccgacgacgcgaagcctttcctcgcgctcgtcaccggcgaactcgcccccaagctccgctccatcgcgcccgacgtcaaacttgtcctcgtcgagcagctcctcgccgacgtcgccgcagaggtcgacgacgacgagacattggatctgccggcggcgaacattggccgcgacgacgcggcgctgctgttctactcgtcggggacgacggggaggagcaagggcgtggtgagcacgcacggcaacgcgatcgccatggccgcgtcgctggagcgcgcgtggggtggcggcggcggcggcggcgagaagccgcagcagtacgacgaccacgacgaggcgtacggctgcgtgctgcccatgttccacatgttcggcttctcgtcgttcgtgatggggacggcggcgctgggcgccacggcggtggtggtccccggcaggttctcggtggagaagacgatggcggcggtggaggagtacggggtgacgaggcttctggtcgtgccgccgatggtcgtgaagatggtcgcggcggcggccggcgacggcgagccgtcgcggcgtcgtctccggctgcggcaggtggtgtcgtccggcgcgccgttgcagcgcgagcacatggcgcgcttccgcagctgcttcccggcggtcaacctcggccagtgctacgggctaacggagacgacgggcattgtcaccatgtgcgatctgcagcacaacgacaacggcatcgacaaggtggaaatgccaccgtcatcgacggatatgacgttcgtcgctgttgcagcgacgacgacggaggtgaaggagagaagcaccggcggcggcggcggcggcggtggcgtctcgattgggcggctcatgccggatgtggaggccaagatcgtggacccggactccggcgagctcctcccgccccgccgcaccggcgagctctgggtccgaggcccctccaccatgcgaggctacctgaacaacgaggaggcgaccgccctggccctggtcgccgccgccggctctgtctccgtctccggcggcggcgagcggtggctgcggaccggtgacctgtgctacgtggactcgcgtgggctggtgtacgtggtagacagggtgaaggagctgatcaagtgcaacgcctaccaggtggctccggccgagctggaggacgtcttggccacccaccctgacatccacgacgcagccgtcgcgccgtatcccgacaaggaggccggcgagatcccgatggcatatgtggtcaagaaacaaggcagcggccatcttcaggaagatgaagtcatttcctttgtacagaacaaggtggcgccatacaagaagatcaggaaagtggtgttcgttgactccattccaaggtctccttcaggcaaaatcctcaggcgccagctgaaaaacttgctacaggggtctatcctgcatcgaagcaggatgtaa

SEQ ID NO: 28665 - protein, 609 aa, Oryza sativa
METELHLAAGYCAATGVYRSGHPPQFAAAAALSFPEYILPHMLLPGRRARPAFVDASTGAALSFAGLRALSLRVARALAAAGLRRGRVALLLSPNSLHFPALSLAVLSLGAVLSAANPLLTPDELARQADDAKPFLALVTGELAPKLRSIAPDVKLVLVEQLLADVAAEVDDDETLDLPAANIGRDDAALLFYSSGTTGRSKGVVSTHGNAIAMAASLERAWGGGGGGGEKPQQYDDHDEAYGCVLPMFHMFGFSSFVMGTAALGATAVVVPGRFSVEKTMAAVEEYGVTRLLVVPPMVVKMVAAAAGDGEPSRRRLRLRQVVSSGAPLQREHMARFRSCFPAVNLGQCYGLTETTGIVTMCDLQHNDNGIDKVEMPPSSTDMTFVAVAATTTEVKERSTGGGGGGGGVSIGRLMPDVEAKIVDPDSGELLPPRRTGELWVRGPSTMRGYLNNEEATALALVAAAGSVSVSGGGERWLRTGDLCYVDSRGLVYVVDRVKELIKCNAYQVAPAELEDVLATHPDIHDAAVAPYPDKEAGEIPMAYVVKKQGSGHLQEDEVISFVQNKVAPYKKIRKVVFVDSIPRSPSGKILRRQLKNLLQGSILHRSRM

SEQ ID NO: 28666 - DNA, 1776 bp, Oryza sativa
  CDS (1)..(1776)
atgcagcgcgacgcgatcgccgccgcccggaacgccggctgctcgagcggccgcatctcgcagccgccgccgccgccgttctactccgccgccaccggaatctacagcagcatccaccctcccgtggcgctccccaccgacccctccctcaccctcgtcgcccacctcttcgcccgcctccccctcgccgacccgggcgcccccaccctcgtcgacgccgccaccgcgtccgcggtgtcccgcgccgacctccgccgcctcgtcgcctccctcgccgcggggctccgccgccgccatggcgttcggaaggggtccgttgtgctgctgctcctcccgaactccgtcgcgttccccgtctcgttcctcgccgtgctcgccgccggcgccgtcgccaccaccatgaacccctccagctcccccgccgagattgccgcccaggcgcgggccaccggcgcatgcctcgtcctcgcctcgcgcgacggcgccgcgaggctcccgcctctcgctgcccccgtcgtcctcgtgcccgaaatcctggaccattccgccgcggccgacgacggcgacgacgaccaacgcgtgttcgccgcgttccgcgccatgctcgacggcggcggcggcgacggcaccgagacggcggtcccggtggtgggccaggacgacgcggtggccatcctctactcgtcggggacgtcggggaggagcaagggggtggtgctgacgcaccgcaacctgatcgccatgacggagctgttcgtccggttcgaggcgtcgcagtaccacgcgcgaggtgctcgcgaaaatgtctacatggcggcgctgcccatgtcccacgtgtacggcctctccctcttcgccgtcggcctcctctcgatcggtgccacggtggtggtgatgaggagattcgacgccggcgacgccgtcgccgccatcgggaggtacaaggtgacgcacatgccgctcgtgccgcccatcatggcggccatggtcagggccgccgcggccggcggcgtgccgccgtcgcaggtggcctcgctggtgcaggtctcgtgcggcgcggctccgatcaccgccgcgctcatccacgaattccttcaggctttcccccacgtcgacttcattcagggttatggcatgacagaatctactgccgtaggaactcgcggatttaacactagcaagcacaaaaagtatacctcggtaggccttttggcccccaacatgcacgccaagattgttcatcttgagagtagttcatgtttgcctccaggcttctcaggggagctatggctccatggcccaggaatcatgaaaggttacttgagtgatgatgatgatgcctgcacgagaaaggatggctggttgcgtaccggagacattgcctactttgatctggatggctacctatacattgtaggccgcttgaaggacacaatcaagtacaaaggatttcagatagctccgggggacttggaagaagttttgatccaccaccctgaaattcttgatgttgctgtgacatctgctgaggatgaagaagctggagagataccagtagcttttgtggtgaggagatctggaagcaacctttcttgtaagcaagtgatggagtatgtggccaagcaggttgctccatataagagagtgaggaaggtggtatttgtggaggcaattcccaagtcacctgctggaaaagttttgaggaggcttctcaggaactcgcatgacactgctgctgctgctacctcttcttgcagtatcagctccaagctctga

SEQ ID NO: 28667 - protein, 591 aa, Oryza sativa
MQRDAIAAARNAGCSSGRISQPPPPPFYSAATGIYSSIHPPVALPTDPSLTLVAHLFARLPLADPGAPTLVDAATASAVSRADLRRLVASLAAGLRRRHGVRKGSVVLLLLPNSVAFPVSFLAVLAAGAVATTMNPSSSPAEIAAQARATGACLVLASRDGAARLPPLAAPVVLVPEILDHSAAADDGDDDQRVFAAFRAMLDGGGGDGTETAVPVVGQDDAVAILYSSGTSGRSKGVVLTHRNLIAMTELFVRFEASQYHARGARENVYMAALPMSHVYGLSLFAVGLLSIGATVVVMRRFDAGDAVAAIGRYKVTHMPLVPPIMAAMVRAAAAGGVPPSQVASLVQVSCGAAPITAALIHEFLQAFPHVDFIQGYGMTESTAVGTRGFNTSKHKKYTSVGLLAPNMHAKIVHLESSSCLPPGFSGELWLHGPGIMKGYLSDDDDACTRKDGWLRTGDIAYFDLDGYLYIVGRLKDTIKYKGFQIAPGDLEEVLIHHPEILDVAVTSAEDEEAGEIPVAFVVRRSGSNLSCKQVMEYVAKQVAPYKRVRKVVFVEAIPKSPAGKVLRRLLRNSHDTAAAATSSCSISSKL

SEQ ID NO: 28668 - DNA, 1695 bp, Oryza sativa
  CDS (1)..(1695)
atggggtccatggagcagcagcagccggagtcggcggcgccggcgacggaggcgtcgccggagatcatcttccggtcgaagctgcaagacatcgccatcaccaacaccctcccgctccaccgctactgcttcgagcggctcccggaggtggcggcgcgcccatgcctcatcgacggagccaccggcggcgtgctcacctacgccgacgtcgaccgcctgtcccgccgcctcgccgccgcgctccgccgcgcgccgctggggctccggcggggcggcgtcgtgatgagcctgctgcggaactcgccggagttcgtgctgtccttcttcgccgcgtcgcgcgtcggcgccgcggtgaccacggcgaacccaatgtccaccccgcacgagatcgagagccagctcgccgccgccggcgccaccgtcgtcatcaccgagtccatggccgccgacaagctcccctcccactcccacggcgccctcaccgtcgtcctcatcgacgagcgccgcgacggctgcctccacttctgggacgacctcatgtcggaggacgaagcgtcgccgctcgccggcgacgaggacgacgagaaggtgttcgacccggacgacgtggtggcgctgccgtactcgtcggggacgacgggtctccccaagggggtgatgctaacgcaccggagcctgagcacgagcgtggcgcagcaggtcgacggcgagaacccaaacatcgggctccacgccggcgacgtgatcctgtgcgcgctgcccatgttccacatctactcgctcaacaccatcatgatgtgcggcctccgcgtcggcgccgccatcgtcgtcatgcgccgcttcgacctcgccgccatgatggacctcgtcgagcgccaccgcgtcaccatcgcgccgctcgtgccgcccatcgtcgtggccgtggccaagagcgaggcggcggcggcgcgagacctctcgtcggtgcggatggtgctctccggcgcggcgcccatgggcaaggacatcgaggacgcgttcatggccaagctccccggcgccgtgctcggacaggggtatggaatgactgaggcagggccagtgctgtcaatgtgcctagcattcgccaaggagcccttcaaggtgaagtccggtgcgtgcgggacggtggtgcgcaacgccgagctgaagatcatcgaccccgacaccgggaagtcgcttggccggaacctgcccggcgagatctgcatcagggggcaacagatcatgaaaggttacctgaacaacccagaggccacgaagaacaccattgatgcagaagggtggctgcacaccggcgacatcggctacgtcgacgacgacgacgagatcttcatcgtggataggctcaaggagatcatcaaatacaggggcttccaggtagcccctgcagagctggaggcccttctcatcacccatccaagcattgctgatgctgctgttgttgggaaacaaattgagcctgaaatcggagaaataccagtcgccttcgtggcgaaaaccgaagggagtgagctgagtgaagatgatgtcaaacaattcgtagcaaaggaggtgatctactacaagaagatccgggaggtcttcttcgttgacaaaatccccaaggcgccgtcagggaagatcctgagaaaggaactgaggaagcagctgcaacatcttcaacaagaagcttaa

SEQ ID NO: 28669 - protein, 564 aa, Oryza sativa
MGSMEQQQPESAAPATEASPEIIFRSKLQDIAITNTLPLHRYCFERLPEVAARPCLIDGATGGVLTYADVDRLSRRLAAALRRAPLGLRRGGVVMSLLRNSPEFVLSFFAASRVGAAVTTANPMSTPHEIESQLAAAGATVVITESMAADKLPSHSHGALTVVLIDERRDGCLHFWDDLMSEDEASPLAGDEDDEKVFDPDDVVALPYSSGTTGLPKGVMLTHRSLSTSVAQQVDGENPNIGLHAGDVILCALPMFHIYSLNTIMMCGLRVGAAIVVMRRFDLAAMMDLVERHRVTIAPLVPPIVVAVAKSEAAAARDLSSVRMVLSGAAPMGKDIEDAFMAKLPGAVLGQGYGMTEAGPVLSMCLAFAKEPFKVKSGACGTVVRNAELKIIDPDTGKSLGRNLPGEICIRGQQIMKGYLNNPEATKNTIDAEGWLHTGDIGYVDDDDEIFIVDRLKEIIKYRGFQVAPAELEALLITHPSIADAAVVGKQIEPEIGEIPVAFVAKTEGSELSEDDVKQFVAKEVIYYKKIREVFFVDKIPKAPSGKILRKELRKQLQHLQQEA

SEQ ID NO: 28670 - DNA, 1620 bp, Oryza sativa
  CDS (1)..(1620)
atgggttcgttgccggagcagttcgtcttccgctcgaggctccccgacatcgccatcccggaccacctcccgctgcacgactacgtgttcgagcgcctcgccgaccgccgcgaccgggcatgccttatcgatggcgccacgggggagacgctctcgttcggcgacgtcgacgcgctgtcgcgccgcgtggcggctgggttgagctcgattggtgtttgccatggtagtaccgtgatgctgctgctgccgaactccgtcgagttcgcggtggcgttcctcgcgtcgtcacggctcggggcggtcaccaccacggccaacccgctgcacaccccgccggagatcgccaagcaggtggcggcgtccggcgcgacggtggtggtcaccgagccggcgttcgtcgccaaggtgagcggcctcgcgggcgtgaccgtcgtcgccaccgggggcggcgccgagaggtgcgcgtcgttcgcgggcctcgccgccgccgacggctcggcgctgccggaggtcgccatcgacgtcgccaacgacgccgtggcgctgccctactcgtcgggcacgacggggctccccaagggggtgatgctgtcgcaccgcgggctggtgaccagcgtggcgcagctcgtcgacggcgagaacccgaacctccacctccgggaggacgacgtggtgctctgcgtgctccccatgttccacgtctactccctccactccatcctcctctgcgggatgcgcgccggcgccgccatcgtggtcatgaagcggttcgacaccgtcaagatgctgcagctggtggagcgccacggcgtcaccatcgcgccgctcgtccctcccatcgtcgtcgagatggccaagagcgacgccctcgaccgccacgacctctcctccatccgcatggtcatctccggcgccgcccccatgggcaaggagcttcaggacatcgtccacgccaagctccccaacgccgtcctcggacaggggtacgggatgacggaggcagggccggtgctatcaatgtgcatggcgttcgcgaaggagccgacgccggtgaagtccggcgcgtgcggcacggtggtgcggaacgccgagctgaagatcgtcgacccggacaccggcttgtcactcccgcgcaaccagccgggggagatttgcatcaggggaaaacaaatcatgaaaggatacctgaacaacccggaggcgaccgagaagacgatcgacaaggacgggtggctgcacactggcgacatcggcttcgtcgacgacgacgacgagatcttcatcgtggaccggctcaaggagctcatcaagtacaagggcttccaggtcgcccccgccgagctcgaggccatgctcatcgcccacgccgccgtcgccgacgccgccgtcgtcccaatgaaggacgattcctgcggcgagatcccagtggcgttcgtcgtcgcacgcgacggctcggggatcaccgacgacgagatcaagcagtacgtcgcaaagcaggtggtgttctacaagaggctgcacaagatcttcttcgtggacgcaatcccgaaggcgccgtcgggaaagattttgaggaaggatctgagagcaaagttggctgctggaattccggcgtgctga

SEQ ID NO: 28671 - protein, 539 aa, Oryza sativa
MGSLPEQFVFRSRLPDIAIPDHLPLHDYVFERLADRRDRACLIDGATGETLSFGDVDALSRRVAAGLSSIGVCHGSTVMLLLPNSVEFAVAFLASSRLGAVTTTANPLHTPPEIAKQVAASGATVVVTEPAFVAKVSGLAGVTVVATGGGAERCASFAGLAAADGSALPEVAIDVANDAVALPYSSGTTGLPKGVMLSHRGLVTSVAQLVDGENPNLHLREDDVVLCVLPMFHVYSLHSILLCGMRAGAAIVVMKRFDTVKMLQLVERHGVTIAPLVPPIVVEMAKSDALDRHDLSSIRMVISGAAPMGKELQDIVHAKLPNAVLGQGYGMTEAGPVLSMCMAFAKEPTPVKSGACGTVVRNAELKIVDPDTGLSLPRNQPGEICIRGKQIMKGYLNNPEATEKTIDKDGWLHTGDIGFVDDDDEIFIVDRLKELIKYKGFQVAPAELEAMLIAHAAVADAAVVPMKDDSCGEIPVAFVVARDGSGITDDEIKQYVAKQVVFYKRLHKIFFVDAIPKAPSGKILRKDLRAKLAAGIPAC

SEQ ID NO: 28672 - DNA, 1734 bp, Oryza sativa
  CDS (1)..(1734)
atggatagcctgccaaagagagacgctaactacgtccctttgagccccatcaccttcctccacagagccgcctccgtctacgccgaccgcacctccgtcgtgtacggcgccaccagcttcacgtggcgccagacgcaccaccgctgcctccgcctcgccgccgcgctccagtccctcgccgtctcaaagaacgacgtcgtgtccgtcatcgcgcccaacacgccggcgctgtacgagatgcacttcgccgtgccgatggccggagcggtgctgaacgccatcaacacccgcctcgacgcggccaacgtcgccgccatcgtcaggcacgccgagcccaaggtgctcttcgtcgactaccagttcatccgcgtcgccaccgacgcgctcaaggccgtcatgggcgacggcgacggcgacggcggcgaggtcagggcgcccttgccgctgctcgtcgtcatcgacgacgccgacaagccgacgggcgcccgcgtcggcgagctcgagtacgagcagctggtggcgcggggagacccggcgaggtacccgcctcggccggtggaggacgagtgggacgccgtcgcgctcaactacacctccggcacgacgtcggcgcccaagggcgtcgtgtacagccaccgcggcgcgtacctcaacaccatgggccttcttctccagtggggcgtcggccacgagccggtctacctgtggtcgctcccgatgttccactgcaacggctggaccttcacctggggcgtggcggcgcgcggcggcacgaacgtctgcatccgcgcgccgaccgccgacgccatgtacgcggcgttcgccgcgcacggcgtcacccacatgtgcgccgcgccggtgctcttcaacatcctcctcgacggcgcgtgccgggagccgctgcgccgccccgtggaggtgctcaccggcggcgcgccgccgcccgcggcgctgctcgagcgcgtcgagcggctcggcttccacgtcacgcacgcctacggcatgacggaggccaccggcgtggtgatggtgtgcgagtggcgggagcagtgggacgccctgccaccgtcggagcgcgcgcggctcaaggcgcggcagggcgtgagcgcgctcaccctcgccgacgccgacgtgaaggacctcaagacgatggagagcgtgccccgcgacggcgccaccatgggcgaggtcgtgctccgcggcagcaacgtcatgaagggatacttcaagaacccgcgcgccacggcggacgcgttccgggacgggtggttcctcaccggcgacgtgggcgtcgtccacccggacgggtacgtggagatcaaggaccggtccaaggacgtgatcatctccggcggcgagaacatcagcagcgtggaggtggaggcggcgctgtaccagcacccggcggtgcgggaggcggcggtggtggccatgccgcacccgcactggggcgagacgccgtgcgcgttcgtggcgctgaagcgggagttcgccggcgccggcgaggtgagcgagcaggaggtggtgtccttctgccggaacaggatggcgcactacatggtgccgaggaaggtggtgttcgtcgacgagctccccaagaactccacggggaaggtgcagaagctcgcgctgcgcgacatggcgcgccgcctccgcctcagggcgcccgacaaggcgaggcccgtcgctgcccctgcccgccatgggccgttgactcaaactgctaggctttga

SEQ ID NO: 28673 - protein, 577 aa, Oryza sativa
MDSLPKRDANYVPLSPITFLHRAASVYADRTSVVYGATSFTWRQTHHRCLRLAAALQSLAVSKNDVVSVIAPNTPALYEMHFAVPMAGAVLNAINTRLDAANVAAIVRHAEPKVLFVDYQFIRVATDALKAVMGDGDGDGGEVRAPLPLLVVIDDADKPTGARVGELEYEQLVARGDPARYPPRPVEDEWDAVALNYTSGTTSAPKGVVYSHRGAYLNTMGLLLQWGVGHEPVYLWSLPMFHCNGWTFTWGVAARGGTNVCIRAPTADAMYAAFAAHGVTHMCAAPVLFNILLDGACREPLRRPVEVLTGGAPPPAALLERVERLGFHVTHAYGMTEATGVVMVCEWREQWDALPPSERARLKARQGVSALTLADADVKDLKTMESVPRDGATMGEVVLRGSNVMKGYFKNPRATADAFRDGWFLTGDVGVVHPDGYVEIKDRSKDVIISGGENISSVEVEAALYQHPAVREAAVVAMPHPHWGETPCAFVALKREFAGAGEVSEQEVVSFCRNRMAHYMVPRKVVFVDELPKNSTGKVQKLALRDMARRLRLRAPDKARPVAAPARHGPLTQTARL

SEQ ID NO: 28674 - DNA, 1695 bp, Oryza sativa
  CDS (1)..(1695)
atgcagcccgacgccgccgccaccgcccaccccagcttgagcttctactccgccgccacgggcctctacagcagcctccaccctcccctacccctcccctccgacccctctctctccctcgtcccccacctcttctcccatctccccctccaccaccattccctcctcgtcgatgcccccaccgccgccaccctctcctgcgccgacttccgccgcctcgtctcctccctcgccgccggcctccgccgccgcctccacatcgccaggggatccctcgtcctgctcctcctccccaactctctcaccttccccgttgccttcctcgccgtcctcgccaccggcgccgtcgccaccaccatgaacccctccagcgcccccgccgagatcgccgcgcgcctgcgggacaccgccccctccctcgtgctcgcctccacccacaacgccgctaagcttccgcctctcgccgccccgctcgtcctcgtgcccgacaccttccagcagcaacatgatgatgatcagttcgacttcttcttccacgcgctgctcgagaccgaccccgaaacgccggtggagatgggggtgggggtggggcaggacgacgccgccgccgtcctctactcgtcggggacgagcgggcggagcaagggcgtggtggtgacgcaccgcaacctgatcgcaatggtggagctgttcgtgcggttcgaggcgtcgcagtacacgcggcctgctcgtgacaatgtctacctggcggcattgcccatgttccacgtctacggcctctccctcttcgccgtgggcctcctctcgctcggctgcacggttgtcgtgatgaggaggttcaacgtcgacgacgccgtcaaggccatccgcaagtacaaggtgacgcacctgccgctcgtgccgcccatcatgtcggcactgctcagggccaacccgcccttggaattggattccttgctgcaggtctccagcggcgctgctcccctcaaccacaccctcattcaccacttccttcacgccttcccccacgttgatttcattcaggggtatggcatgactgaatctactgccgtaggaactcgcggcttcaatacatgcaagcacaagaagtatgcctcagtaggtcttttagcccccaacatgcatgctaaaattgttcatctggaaagtggttcttgtctgcctccaggctcttatggggagttatggctccatggcccggctataatgaaagaattttgcttcgtcacaggttacttgaatgatgatgatgatgctttcactagaaaggatggctggttgaggactggtgatattgcttactttgattcagatgggtatttgttcatagtgggtcgcttgaaagacacaatcaagtacaaaggatttcagatagctccagctgacttggaagctgttctgatccggcaccctgaaattattgatgttgctgtgacatctgatgaagatgaagaagctggagagatacctgtagcttttgtggtgagaaaatctggaagcactctttcttgtacgcatgtcatggagtatgtggccaagcaggtggcgtcgtataagagagtgaggaaggtaatattcgtggaggcgatacctaagtcagctgctggcaaggttctgaggaggcttctcaaggactctcttgttgatgcttccagtggcagatccaggctatga

SEQ ID NO: 28675 - protein, 564 aa, Oryza sativa
MQPDAAATAHPSLSFYSAATGLYSSLHPPLPLPSDPSLSLVPHLFSHLPLHHHSLLVDAPTAATLSCADFRRLVSSLAAGLRRRLHIARGSLVLLLLPNSLTFPVAFLAVLATGAVATTMNPSSAPAEIAARLRDTAPSLVLASTHNAAKLPPLAAPLVLVPDTFQQQHDDDQFDFFFHALLETDPETPVEMGVGVGQDDAAAVLYSSGTSGRSKGVVVTHRNLIAMVELFVRFEASQYTRPARDNVYLAALPMFHVYGLSLFAVGLLSLGCTVVVMRRFNVDDAVKAIRKYKVTHLPLVPPIMSALLRANPPLELDSLLQVSSGAAPLNHTLIHHFLHAFPHVDFIQGYGMTESTAVGTRGFNTCKHKKYASVGLLAPNMHAKIVHLESGSCLPPGSYGELWLHGPAIMKEFCFVTGYLNDDDDAFTRKDGWLRTGDIAYFDSDGYLFIVGRLKDTIKYKGFQIAPADLEAVLIRHPEIIDVAVTSDEDEEAGEIPVAFVVRKSGSTLSCTHVMEYVAKQVASYKRVRKVIFVEAIPKSAAGKVLRRLLKDSLVDASSGRSRL

SEQ ID NO: 28676 - DNA, 1698 bp, Brassica napus
  CDS (1)..(1698)
atgataactgcaactctacaagaacctcagattcatcaaccggtggatacaactactccccccgccgatgctcctcctacgccgccgcgtattttccgatcaaagcttccggacatagacatccccaaccacctccctctccacaattactgcttccagaagctctcctctgtttccgacaagccttgtctgatcgtagggtccacgggaaaaaactacacgtacggcgaaacgcacctcatatgtcggagagtcgccgccgggctacacaaaatggggattcgaaaaggcgacgtgataatgatcctccttcaaaactcagccgagttcgtcttctccttcatgggcgcttccatgatcggcgccgtctccaccaccgcgaaccctttctacacttctcaggagattcacaaacaggtcaaatcctccggagctaagcttataatcactcactcccattacgtcgataagctgagaaacctcgacggagaaacaagaatcggtgaagatctcaccgttatcaccacggaggagaatcctcccccggagaattgtcttcctttctccacactactactcactgacgacgagacaacctcgctagatgttgttgatgtcggtggtgatgacgccgcggcgcttcctttctcctctggcacgacggggttacctaaaggagtagttttaacgcacaagagcttaatcacgagcgtcgcgcaacaagtcgatggagacaacccgaatctttacctgaaaccaaacgacgtcgtactctgcgttttgcctcctttccacatctactcgctcaacagcgtccttctcaactccatccgatccggtgcgacggttcttttgatgcacaaattcgaaatcggggcgttattggatctaatacagagacacaaggtgacggtagcggcgcttgttccgccgcttgtgattgctttggccaagaacccaactgttaactcttacgatctctcttccgttagattggttctctccggtgcagctcccttaggcaaagatctcgaggatagtctaggccgccgtctccctcaggccgtccttggccagggatatggtatgacagaggcaggaccagtgttgtcaatgagccttgggtttgctaaagagccaactccgtcaaaatcaggctcttgtgggactgtagtccgaaacgcagagcttaaagtggttcaccttgagacacgtctctctcttggttacaaccaacctggtgagatttgtatccgcggtcaacaaatcatgaaagagtacttgaacgatccggaagccacgtcagctacaattgacgaggaaggttggcttcacacaggggacattgggtatgttgatgaagctgatgagatattcattgttgatcgactcaaagaggtcatcaagttcaaaggctttcaggtgcctccagctgagctagaggctttgctcatcaatcaccactccattgcggatgctgcggttgttcctcaaagagatgaagtggctggagaagttccggtggctttcgtagtccgaccaaatggaaacgttatcacggaagaagatataaaagaatatatagccaaacaggtggtattctacaagagattgcacaaggtcttctttgttccctccattcccaaatctccttccggaaaaattctgagaaaggatcttaaagccaaactttgttaa

SEQ ID NO: 28677 - protein, 565 aa, Brassica napus
MITATLQEPQIHQPVDTTTPPADAPPTPPRIFRSKLPDIDIPNHLPLHNYCFQKLSSVSDKPCLIVGSTGKNYTYGETHLICRRVAAGLHKMGIRKGDVIMILLQNSAEFVFSFMGASMIGAVSTTANPFYTSQEIHKQVKSSGAKLIITHSHYVDKLRNLDGETRIGEDLTVITTEENPPPENCLPFSTLLLTDDETTSLDVVDVGGDDAAALPFSSGTTGLPKGVVLTHKSLITSVAQQVDGDNPNLYLKPNDVVLCVLPPFHIYSLNSVLLNSIRSGATVLLMHKFEIGALLDLIQRHKVTVAALVPPLVIALAKNPTVNSYDLSSVRLVLSGAAPLGKDLEDSLGRRLPQAVLGQGYGMTEAGPVLSMSLGFAKEPTPSKSGSCGTVVRNAELKVVHLETRLSLGYNQPGEICIRGQQIMKEYLNDPEATSATIDEEGWLHTGDIGYVDEADEIFIVDRLKEVIKFKGFQVPPAELEALLINHHSIADAAVVPQRDEVAGEVPVAFVVRPNGNVITEEDIKEYIAKQVVFYKRLHKVFFVPSIPKSPSGKILRKDLKAKLC

SEQ ID NO: 28678 - DNA, 1656 bp, Brassica napus
  CDS (1)..(1656)
atggctccacaagaagacgccatgcagaaacagagcagcaacaagagtgacgtcatattccgatcaaagcttccggatatttacatcccgaaccacctccctctccacgactacatcttccaaaacatctccgagttcgcctccaagccttgcctgatcaacggtcccaccggccacgtgtacacttactccgaggtccatgtcgcttcccgtcgcatcgccgccggttttcaaaaactcggcgttaaccaaaacgacgtcgtgatgatcctcctctcgaattgccccgagttcgtcctctctttcctcgccgcctccttccgcggcgcaacggccaccgccgctaacccgtttttcactccggcggagatcgccaaacaggccaaagcctcgaactcgaagctcatcgtcaccgagtctcgctacgtcgataaaatcaaagacctccaaaacgacggcgttataatcgtctgcaccgacgaggaaccttctccgatcccggaaggctgcctccgattcaccgagttgactcagtcaaccgaaattgaaacggtggagatttcttccgacgacgtggtggcgcttccttactcctccggcacgacgggtctacccaaaggagtgatgctgactcacaagggactagtcacgagcgtcgctcagcaagtcgacggcgataatccgaatctttacttccacagcgatgacgtcatactctgtgtcttgcccatgttccatatctacgctttgaactcgatcatgctgtgtgggcttagagttggtgcctcgatcttgatcatgccaaagttcgagattaatctgctcttggagctgatacagaggtgtaaagtgacggttgctccgatggttccgccgattgttttggcgatggcgaagtcgccggagacggagaagtatgacttgagctcgattagggttgtgaaatctggtgctgctccgcttggtaaggagcttgaagatgccgtcagtgccaagtttcctaacgccaaactcggtcagggatacggaatgacggaagcaggtccggtgctagcaatgtcgttagggttcgcgaaagagccgtttccagtgaagtcgggagcttgtggtacggtggttagaaacgccgaaatgaaaatcatcgatccagacaccggagactcactttccaaaaacaaacctggagagatttgcatccgtggtcaccagatcatgaaaggttacctcaacaacccggcggctacatcagagaccatagacaaagacggctggcttcacacgggagatatcggattgatcgatgacgacgacgagcttttcattgtcgatagattgaaagaacttatcaagtacaaaggttttcaagtggctccggctgagctagaggctctcctcatcggtcatcaggatatcaccgacgtggccgttgtcgccatgaaagaagaggctgctggtgaagttcccgttgcgtttgttgtgaaatccaaggattcagagttatcagaagatgatgtgaaacaattcgtggcgaaacaggttgtgttttacaagagaatcaacaaagtgttcttcgttgagtccattcctaaagctccgtcagggaagatattgaggaaagacctgagggcaaaactagcaaatgggttggtaaactaa

SEQ ID NO: 28679 - protein, 551 aa, Brassica napus
MAPQEDAMQKQSSNKSDVIFRSKLPDIYIPNHLPLHDYIFQNISEFASKPCLINGPTGHVYTYSEVHVASRRIAAGFQKLGVNQNDVVMILLSNCPEFVLSFLAASFRGATATAANPFFTPAEIAKQAKASNSKLIVTESRYVDKIKDLQNDGVIIVCTDEEPSPIPEGCLRFTELTQSTEIETVEISSDDVVALPYSSGTTGLPKGVMLTHKGLVTSVAQQVDGDNPNLYFHSDDVILCVLPMFHIYALNSIMLCGLRVGASILIMPKFEINLLLELIQRCKVTVAPMVPPIVLAMAKSPETEKYDLSSIRVVKSGAAPLGKELEDAVSAKFPNAKLGQGYGMTEAGPVLAMSLGFAKEPFPVKSGACGTVVRNAEMKIIDPDTGDSLSKNKPGEICIRGHQIMKGYLNNPAATSETIDKDGWLHTGDIGLIDDDDELFIVDRLKELIKYKGFQVAPAELEALLIGHQDITDVAVVAMKEEAAGEVPVAFVVKSKDSELSEDDVKQFVAKQVVFYKRINKVFFVESIPKAPSGKILRKDLRAKLANGLVN

SEQ ID NO: 28680 - DNA, 1557 bp, Glycine max
  CDS (1)..(1557)
atggatactccaatgaccctcacgggcttgctccgcgacgtcgccgccaaattcccttcccgccgcgccatctccgtcgccggaaaattcgacctcacccactcccgcctccatcaactggttgaatccgccgccgcccgcttagtcgccgccggaatcaaacccggcgacgtcatcgctctcaccttccccaataccgtcgagtttgttgtcttgtttctagccgtcattcgagtgcgcgccacagccgcgccgttaaacgcggcttacacagccgaagagtttgagttttacttgtccgactccgagtccaagcttcttctaacatcagcagaaggaaacaactcagctcaagccgcagcttcaaaactcaacatccttcacagcacagcttcaataacccaagccggagacaaagaagccgagctgagcctctcattaagccactccgagtcagagtcaattaactcggttgagtcactcggaaacgatccagatgacgtggcgcttttccttcacacctcgggcaccacgagccgacccaagggagtgcctttgacgcaacacaacctgttctcttccgtgaacaacattaaatcggtgtaccgactcactgagtccgactcgacggtgatcgttcttcctttattccacgtgcacggtttgatcgcggggctcctgagttcgctcggcaccggggcggcggtggcgctgccggcagcggggagattctccgcctcgtcattctggaaggacatgattaaatacagcgccacgtggtacacagcggttcctacaatacaccagatcatactggaccgccactcgaacagccccgaaccggtttacccgcgcctccggttcattcgaagctgcagcgcgtcgctcgcaccggctattctgggtaaacttgaggaggccttcggtgcgccagtgctggaggcttacgcgatgacggaagcgtcgcatttgatggcttcgaaccctttgccgcaagatgggccccacaaggccgggtcggttgggaaacccgtgggtcaagaaatggttatattggacgaaacgggtcgggttcaagatgctgaagttagtggagaggtttgcattaggggtcctaatgttacgaagggatataaaaataacgtggatgccaatacggcggcgtttttgtttggttggtttcacaccggtgatgttgggtacttggattctgatgggtatttgcatctcgtgggtcggatcaaggagctcatcaaccgaggaggagaaaagatatcaccaatagaagtggatgctgtccttctttcacacccagacattgctcaggcagttgcttttggagtgcctgatccaaagtatggggaggagatatactgtgctgtaatcccaagagaaggatcagacattgatgatgcagagttgctaagatattgcaagaagaatcttgcatctttcaaagtccccaaaaaggtcttcattaccgattctttgcccaagactgccaccggaaagattttgcgtcgtcttgtggcagaacactttgtctctcaaatttga

SEQ ID NO: 28681 - protein, 518 aa, Glycine max
MDTPMTLTGLLRDVAAKFPSRRAISVAGKFDLTHSRLHQLVESAAARLVAAGIKPGDVIALTFPNTVEFVVLFLAVIRVRATAAPLNAAYTAEEFEFYLSDSESKLLLTSAEGNNSAQAAASKLNILHSTASITQAGDKEAELSLSLSHSESESINSVESLGNDPDDVALFLHTSGTTSRPKGVPLTQHNLFSSVNNIKSVYRLTESDSTVIVLPLFHVHGLIAGLLSSLGTGAAVALPAAGRFSASSFWKDMIKYSATWYTAVPTIHQIILDRHSNSPEPVYPRLRFIRSCSASLAPAILGKLEEAFGAPVLEAYAMTEASHLMASNPLPQDGPHKAGSVGKPVGQEMVILDETGRVQDAEVSGEVCIRGPNVTKGYKNNVDANTAAFLFGWFHTGDVGYLDSDGYLHLVGRIKELINRGGEKISPIEVDAVLLSHPDIAQAVAFGVPDPKYGEEIYCAVIPREGSDIDDAELLRYCKKNLASFKVPKKVFITDSLPKTATGKILRRLVAEHFVSQI

SEQ ID NO: 28682 - DNA, 1644 bp, Glycine max
  CDS (1)..(1644)
atggaaaagcaacaacctacacagcctcagcctcaccacgacttcattttccgttccaaactccccgacatttacatcccaacgcacctccctctccacacttaccttttccaaaacctctcacaattcaaagaccttccatgcctcatcaatgccgccaccggcgagactttcacctacgccgccgtcgaactcaccgcccgcaaagttgcctccggtttcaacaaactcggcatccaaaaaggcgacgtcatcctccttctcctccagaactgcccccaattcgtcttcgcattcctcggcgcctcctaccgcggtgccaccgtcaccgccgccaatcctttctacactccggcggaggtagcgaaacaagccacagcgtccaactccaaactcatcataacgcaagcatcttacgtggataaagtaaaggattttgcgagagaaaacgacgtcaaagtgatatgcgttgactcggcgccggatggttaccttcacttctcggtgttaacggaggccgacgagggagacattcccgccgttaaaatatctcaagatgacgtggttgcgctgccgtactcgtctggcacgacggggcttccgaagggagtgatgctaacgcacaagggactcgttacgagcgtggctcaacaggttgacggagagaaccctaatttgtactttctcagcgacgatgtggtagtgtgtgttctgccacttttccacatttattcgctcaactctgttttgctgtgttcgcttcgagttggggctgccgttttgatcgttccgaagtttgagatagttgcgttgctggagttggtgcagaaacacaatgtgagcgtcgcgccgtttgtgccgccaatcgttttggccattgctaagagtcctgatgtggagcgatacgacgtgtcgtcgattcggatgatcatgtctggcgcggcacccatgggaaaggaacttgaggattctgtgagggctaagcttcccaacgccacacttggacagggttatgggatgacggaggcaggaccagtgctatcaatgtgcttagcgtttgcgaaggagccaatgcaggtcaaatcaggtgcctgcgggaccgtcgtaagaaacgcggagatgaaaattattgatcctgatactggcgcttcgcttcataggaatcaagctggtgagatttgcattagaggcaaccagatcatgaaaggttacctaaatgatcaagaggccacagaaagaactatagacaaaggaggatggttgcacacaggtgatattggatacatagatgataatgatgagctcttcatcgttgaccggttaaaggagttgattaaatataaaggatttcaagtggctccagctgagctcgaagccatgctagttgctcatcctaacatctctgatgctgccgttgtatcaatgaaggatgaagttgcaggagaggttccagttgcatttgttgtacgatcaaatggttcaatgatttctgaggatgaaataaagcaatacatctcaaagcaggttgtattttacaaaagaattagtagagttttctttgtgggctcaattccaaaggcaccctctggaaagatctttcgaaaagacctcagggcctggcttgcaaccgatcttgctatttag

SEQ ID NO: 28683 - protein, 547 aa, Glycine max
MEKQQPTQPQPHHDFIFRSKLPDIYIPTHLPLHTYLFQNLSQFKDLPCLINAATGETFTYAAVELTARKVASGFNKLGIQKGDVILLLLQNCPQFVFAFLGASYRGATVTAANPFYTPAEVAKQATASNSKLIITQASYVDKVKDFARENDVKVICVDSAPDGYLHFSVLTEADEGDIPAVKISQDDVVALPYSSGTTGLPKGVMLTHKGLVTSVAQQVDGENPNLYFLSDDVVVCVLPLFHIYSLNSVLLCSLRVGAAVLIVPKFEIVALLELVQKHNVSVAPFVPPIVLAIAKSPDVERYDVSSIRMIMSGAAPMGKELEDSVRAKLPNATLGQGYGMTEAGPVLSMCLAFAKEPMQVKSGACGTVVRNAEMKIIDPDTGASLHRNQAGEICIRGNQIMKGYLNDQEATERTIDKGGWLHTGDIGYIDDNDELFIVDRLKELIKYKGFQVAPAELEAMLVAHPNISDAAVVSMKDEVAGEVPVAFVVRSNGSMISEDEIKQYISKQVVFYKRISRVFFVGSIPKAPSGKIFRKDLRAWLATDLAI

SEQ ID NO: 28684 - DNA, 1689 bp, Glycine max
  CDS (1)..(1689)
atgataactctagctccttctcttgatactccaaaaactgatcaaaaccaagtttctgatccccaaactagccatgtcttcaaatcaaaattaccagatatcccaatctccaaccacctccctctccactcctactgcttccagaacctctcccaatttgcccaccgcccttgcctcatcgtcggacccgcctccaaaaccttcacctacgccgacacccacctcatttccagcaagatcgccgccggattgtccaacctcggaatcctcaagggcgacgtcgtcatgatcctcctccagaactccgccgatttcgtcttctccttcctcgccatctccatgattggcgccgtcgccaccaccgccaacccgttctacaccgccccggagatcttcaagcagttcaccgtctccaaggcgaagtcgatcataacacaggcaatgtacgtggacaagctccgcaaccacgacggcgcgaagctcggcgaggacttcaaggtcgtaaccgtcgacgatccgccggagaattgcctccacttctctgtcctctcggaggcgaacgagagcgacgtgccagaggtggagatccacccggacgacgcggtggcgatgccgttctcctccggcacgacgggtttacctaaaggagtgattctcacgcacaagagtttaaccacgagtgtggcgcagcaagttgacggagagaaccctaacctctacctcaccaccgaggacgtgctcctctgcgtgcttccgctctttcacatattctcgctcaacagtgtgctattgtgcgccctcagggcggggagtgcagttttgttgatgcagaagttcgagatcgggacactgctggagctgatacagcggcaccgagtgtcggtggcgatggtggtgcccccgctggtgttggcgttggcaaagaatccgatggtggcggattttgacctgagttcaatacggttagtgctgtccggagctgctcccttggggaaggagctcgaggaggctctccggaacaggatgcctcaagctgttttgggacagggttacgggatgacagaagcagggccagtgctgtccatgtgcttgggctttgcaaagcaacctttccaaacaaaatcaggctcttgtggtaccgtagtcagaaatgcagaactcaaggttgttgaccctgaaactggtcgttctcttggctacaatcaacccggtgaaatttgcatccgagggcaacagatcatgaaaggatatctgaacgatgaggcagcgacagcatcgaccatagattcagagggttggcttcacaccggtgatgttggctacgtagatgatgatgacgaaattttcattgttgacagggtgaaggaactcatcaaatataaaggcttccaggtgccccctgcagaacttgaagggcttcttgtaagccatccctccattgcagatgcagctgttgtcccacaaaaggatgttgctgctggtgaagttcctgttgccttcgttgtgagatcaaacggctttgatctaactgaagaggctgtaaaagagtttatagctaaacaggtagtgttttacaaaagactgcacaaagtttattttgttcatgctattcccaagtctccatcaggaaagatattaaggaaagacctcagagcaaagctagaaaccgccgccactcagacgccttaa

SEQ ID NO: 28685 - protein, 562 aa, Glycine max
MITLAPSLDTPKTDQNQVSDPQTSHVFKSKLPDIPISNHLPLHSYCFQNLSQFAHRPCLIVGPASKTFTYADTHLISSKIAAGLSNLGILKGDVVMILLQNSADFVFSFLAISMIGAVATTANPFYTAPEIFKQFTVSKAKSIITQAMYVDKLRNHDGAKLGEDFKVVTVDDPPENCLHFSVLSEANESDVPEVEIHPDDAVAMPFSSGTTGLPKGVILTHKSLTTSVAQQVDGENPNLYLTTEDVLLCVLPLFHIFSLNSVLLCALRAGSAVLLMQKFEIGTLLELIQRHRVSVAMVVPPLVLALAKNPMVADFDLSSIRLVLSGAAPLGKELEEALRNRMPQAVLGQGYGMTEAGPVLSMCLGFAKQPFQTKSGSCGTVVRNAELKVVDPETGRSLGYNQPGEICIRGQQIMKGYLNDEAATASTIDSEGWLHTGDVGYVDDDDEIFIVDRVKELIKYKGFQVPPAELEGLLVSHPSIADAAVVPQKDVAAGEVPVAFVVRSNGFDLTEEAVKEFIAKQVVFYKRLHKVYFVHAIPKSPSGKILRKDLRAKLETAATQTP

SEQ ID NO: 28686 - DNA, 1695 bp, Glycine max
  CDS (1)..(1695)
atgtcagaagcagcagctacttcttttgaaactcaacacagctctacagaatcgtgtgtacctaaaacaacaactactacttcttctgatgtatcatcatcaccccaaactacccacattttcaaatctaaattaccagacatacccctccccaacaacctccccctccacaaatactgcttccttaaactccccgaaatcgccgaccggccatgcctcatcgccggcagcagaaaatacacctacggcgaaactcacgtgacatcgcgaagggtggccgccggcatgtcgaagctgggcatccagaagggagacgtcatcatgattctcctcccgaactccccggagttcgtgttcttcttcatggcgtcctccatgctcggcgccgtggccaccaccgccaatcccttctataccgccgccgaaatcacgaagcaactcgccgcctccaaggccaagcttgtagtcaccctctccgcccacgtccacaagctcgaccaacaacagggtttgaaggtggtcaccgtggacgagccggcggcggatgagaactgcatgagtttccgggaaggcgaggagagcgaggtggcggaggtggagatatcggcggaggacgcggtggcgctgccgttctcgtcggggactacggggctggcgaagggggtggttctgacgcacaagagcctggtgacgggcgtggcgcagaacatggagggagagaacccgaacgtgtacctgaaggaagaggacgttgtgctgtgcgtgcttcccttgtttcacatattctccatgcacagtgtcatgatgtgcgcgctcagagcggggagtgccattttgttgatcgaaaagtttgagataagggcgctgctggaggagattgagaggcacagggtcaccgtggcgatggtggtgccgcctctcgtggtggcgctggcgaagaaccccgcggtggaggagtatgatttgagctccatacggttggtcatgtccggggctgcgccgctggggcaccagttggaagaggttctacggaataggttgcccaacgcaattctgggacagggatacgggatgacagaggctggaccggtgttggcgatgtgtttagggtttgcaaagtatccattcccgacaaagacaggctcttgcggaacagtagtcagaaatgctgagttgaaggtcattcaccctcttactgccctttctcttccccctaaccaccctggcgaaatttgcatccgtggccaacagatcatgaaaggttacctgaatgacgagaaggctactgcagcaactattgacgtagatggttggcttcatacaggcgatattggctatgtcgatgatgatgatgagattttcctgattgacagggccaaggagctcatcaaatttaaaggcttccaggtgccaccagcagaacttgaagaccttcttatgagccacccttccattgcagatgcggccgttgtcccgcaaaacgacgatgctgcaggtgaagttccagtggctttcgtggtgggctttgatcttacagaagaggcagtcaaggattttatagcgaaacaggtagtgttttacaaaagactacacaaagtgtattttgttcctgcaattccaaagtctccaaccggaaagatattaagaaaagaactcagagcaaagctcgcgagcattattattcagaggacctag

SEQ ID NO: 28687 - protein, 564 aa, Glycine max
MSEAAATSFETQHSSTESCVPKTTTTTSSDVSSSPQTTHIFKSKLPDIPLPNNLPLHKYCFLKLPEIADRPCLIAGSRKYTYGETHVTSRRVAAGMSKLGIQKGDVIMILLPNSPEFVFFFMASSMLGAVATTANPFYTAAEITKQLAASKAKLVVTLSAHVHKLDQQQGLKVVTVDEPAADENCMSFREGEESEVAEVEISAEDAVALPFSSGTTGLAKGVVLTHKSLVTGVAQNMEGENPNVYLKEEDVVLCVLPLFHIFSMHSVMMCALRAGSAILLIEKFEIRALLEEIERHRVTVAMVVPPLVVALAKNPAVEEYDLSSIRLVMSGAAPLGHQLEEVLRNRLPNAILGQGYGMTEAGPVLAMCLGFAKYPFPTKTGSCGTVVRNAELKVIHPLTALSLPPNHPGEICIRGQQIMKGYLNDEKATAATIDVDGWLHTGDIGYVDDDDEIFLIDRAKELIKFKGFQVPPAELEDLLMSHPSIADAAVVPQNDDAAGEVPVAFVVGFDLTEEAVKDFIAKQVVFYKRLHKVYFVPAIPKSPTGKILRKELRAKLASIIIQRT

SEQ ID NO: 28688 - DNA, 1749 bp, Zea mays
  CDS (1)..(1749)
atgggttccacttccacggggccggtgagcgggttcgcggcgccggagcgggacatcgacgatctgccgcggaacgacgccaactacacggcgctcacgccgctctggttcctcgagcgcgcggcgctggcgcatccgggcagggcctccgtcgtgcacggccccgtgcgctacacctgggctgacacctatcgccgctgccgccgcctcgcatccgccctcgcgcgcctatccgtcggccacggaagcacggttgctgtgatagctcctaatgtcccagccgtctatgaagctcacttcggtgtcccaatgtcaggagctgttgtgaactgcgtcaatattcggctaaacgccgagacaatagcattcctccttgaacactccgtggcagaagttgtgatggtggaccaagaattcttcaccctagccgaagaatcgctgaaaataattggcaagaagaagacatcggctttcaggcggcctccaatcttgatcgtcatcggcgacccgacctgtgatcccaagtctctacagcatgctctgggaaagggagctatagagtatgaagagtttctgaaaaccggtgacccggagttcagttggaagccaccgaaggacgaatggcagagcatcgccctaggctacacttctgggactacttccagcccaaagggcgtcgtgttgcatcaccgcggtgcttatctcatggcactcagcgttgccatcgtgtgggggatgcctgaaggggctgtctacctgtggactctgcccatgttccattgcaatggttggtgctacacttgggcgctggcagcgttctgcggaacaagcatatgtcttcgccaggtgagcacaaaagctatatacgaaggcatcaccaagcaaggagtgacgcacttctgtgccgcacctgtcgtccttaacaacctgatcaacgctccggcaagcgagaccttcctgccgctgccccgcgtcgtcaatgtcaacgtggccggagccgccccgacgccgtccctgctgggcgcgctgtccatccgtgggttccgcgtcacgcacacgtacggcctgtcagagacgtacggtccctcgacggtgtgcgcgtggaagcccgagtgggacgagctgccgctggaggagcggtcccggctgcactgccgacagggcgtcaggtacatcgcgatggagggcctggacgtcgtggaccccaagacgatggcgcccgtcccggccgacggcaagtcgtacggcgagatcgtgctgcggggcaacgccgtgatgaaggggtacctcaagaaccccggggcgaacgcggaggcgttcgcgggcgggtggtaccactcgggcgacctcggcgtgaagcaccccgacgggtacgtcgaggtgagggaccggatgaaggacgtgatcatctccggaggggagaacatcagcagcctggaggtcgagaaggtgctgtgcgcgcacccggcagtgttcgaggtatcggtggtcgccagggccgacgagcggtggggcgagtcgccgtgcgcgttcgtgacgctcaaggacggagcagcagccgacgggtcggacgaggcgacgctggccaacgacatcatgcgcttctgccgggagaggatgccggggtactgggtgcccaagtcggtcattttcgggccgctgcccaagacggccacggggaagatcaagaagcacgagctgagggccagggccaaagagctcggccctgtgaagaagagcaggatgtga

SEQ ID NO: 28689 - protein, 582 aa, Zea mays
MGSTSTGPVSGFAAPERDIDDLPRNDANYTALTPLWFLERAALAHPGRASVVHGPVRYTWADTYRRCRRLASALARLSVGHGSTVAVIAPNVPAVYEAHFGVPMSGAVVNCVNIRLNAETIAFLLEHSVAEVVMVDQEFFTLAEESLKIIGKKKTSAFRRPPILIVIGDPTCDPKSLQHALGKGAIEYEEFLKTGDPEFSWKPPKDEWQSIALGYTSGTTSSPKGVVLHHRGAYLMALSVAIVWGMPEGAVYLWTLPMFHCNGWCYTWALAAFCGTSICLRQVSTKAIYEGITKQGVTHFCAAPVVLNNLINAPASETFLPLPRVVNVNVAGAAPTPSLLGALSIRGFRVTHTYGLSETYGPSTVCAWKPEWDELPLEERSRLHCRQGVRYIAMEGLDVVDPKTMAPVPADGKSYGEIVLRGNAVMKGYLKNPGANAEAFAGGWYHSGDLGVKHPDGYVEVRDRMKDVIISGGENISSLEVEKVLCAHPAVFEVSVVARADERWGESPCAFVTLKDGAAADGSDEATLANDIMRFCRERMPGYWVPKSVIFGPLPKTATGKIKKHELRARAKELGPVKKSRM

SEQ ID NO: 28690 - DNA, 1545 bp, Brassica napus
  CDS (1)..(1545)
atggagagcgatacactcaccggactattgaagaacgtcgccgagaaattccccgatcgccgagcgctctctgtttccggaaaattcgatctcacccacgcgcgtctcaacgttctaatcgaacgcgccgcttcacgccttgtctcctccgccggaatcaatcctggcgatgtggtggctctcactttccccaacaccgtcgagtttgttattatgtttctggcggtgctaagagcccgagccacggcggcgccgttgaacgcggcgtacacggcggaggaattcgagttttacctctccgattcagactcgaagctgttactaacctctaaagaaggtaacgcaccggctcaagaagcagcttcgaagctcaacatctctcacgtcaccgccacgctcctcgacgccggctctgacctcgctctctccgtcgccgattccgactcggtctctgactcagcttcggagctcgttaacagccccgacgatcctgctctcttcctccacacttccggcaccacgagccgtcccaagggtgtaccgctcacgcagctgaatcttgtctcctccgtcaagaacattaaatcggtttacaaactcaccgagtctgattcgactgtcattgttctccctctgttccacgttcatggattgttagcaggattgctcagctcgcttggagctggtgcggccgtgactctcccagctgctggtagattctctgcgacaacgttttgggctgacatgaacaagtataacgccacgtggtatactgctgttcccaccattcatcagatcatattggaccgccacgccagccaacctgagccggagtatcctagactccggttcattaggagttgcagtgcttctttggctccggtgatattgtccaggcttgaggaagctttcggagcaccggttctagaggcttatgctatgacggaagcaacccacctgatgagttctaatcctttaccggaggaaggtccgcacaagcctgggtctgttgggaaaccggtgggtcaagaaatggcgatccttaatgagaaaggggagatacaagagccacatagcaagggagaggtttgtataagaggtccaaatgtgacaaagggttacaagaacaacccggaggccaacaaggcaggtttcgagtttgggtggttccacactggtgatatcggttactttgattccgatgggtatttgcatctggtgggtcggatcaaagagcttattaaccgtggaggtgagaaaatatccccaattgaagtggattcagtgctcttaactcatcctgatgtttctcaaggagttgcgtttggagttcctgatgagaaatatggcgaagagattaactgtgcggtgattccaagagaaggaacaacagtgaccgaagaggacataaaaacgttctgtaagaagaatctggcagctttcaaggtgccgaagagagtgttcatcactgataacctccccaaaactgcctctggtaagattcagcgccgtatcgtcgctcagcatttcctcgagaaaccctaa

SEQ ID NO: 28691 - protein, 514 aa, Brassica napus
MESDTLTGLLKNVAEKFPDRRALSVSGKFDLTHARLNVLIERAASRLVSSAGINPGDVVALTFPNTVEFVIMFLAVLRARATAAPLNAAYTAEEFEFYLSDSDSKLLLTSKEGNAPAQEAASKLNISHVTATLLDAGSDLALSVADSDSVSDSASELVNSPDDPALFLHTSGTTSRPKGVPLTQLNLVSSVKNIKSVYKLTESDSTVIVLPLFHVHGLLAGLLSSLGAGAAVTLPAAGRFSATTFWADMNKYNATWYTAVPTIHQIILDRHASQPEPEYPRLRFIRSCSASLAPVILSRLEEAFGAPVLEAYAMTEATHLMSSNPLPEEGPHKPGSVGKPVGQEMAILNEKGEIQEPHSKGEVCIRGPNVTKGYKNNPEANKAGFEFGWFHTGDIGYFDSDGYLHLVGRIKELINRGGEKISPIEVDSVLLTHPDVSQGVAFGVPDEKYGEEINCAVIPREGTTVTEEDIKTFCKKNLAAFKVPKRVFITDNLPKTASGKIQRRIVAQHFLEKP

SEQ ID NO: 28692 - DNA, 1698 bp, Brassica napus
  CDS (1)..(1698)
atgataactgcaactctacaagaacctcagattcatcaaccggtggatacaactactccccccaccgatgctcctcctactccgccgcgtattttccgatcaaagcttccggacatagacattcccaaccacctccctctccacacctactgcttccagaagctcccctctgtttccgacaagccctgtctgatcgtaggctccacgggaaaaaactacacgtacgaagaaacgcacctcatatgtcggagagtcgccgccgggctacacaaaatggggattcgaaaaggcgacgtgataatgatcctccttcaaaactcagccgagttcgtcttctccttcatgggcgcttccatgatcggcgccgtctccaccaccgcgaaccctttctacacttctcaggagattcacaaacaggtcaaatcctccggagctaagcttataatcactcactcccattacgtcgataagctgagaaacctcgacggagaaacaagaatcggtgaagatctcaccgttatcaccacggaagacaatcctcccccggagaattgtcttcctttctccacactactactcactgacgacgagacaacctcgctagatgttgttgatgtcggtggtgacgacgcagcggcgcttcctttctcctctggcacgacggggttacctaaaggagtagttttaacgcacaagagcttaatcacgagcgtcgcgcaacaagtcgatggagacaacccgaatctttacctgaaaccaaacgacgtcgtactctgcgttttgcctcttttccacatctactcgctcaacagcgttcttctcaactccatccgatccggtgcgacggttcttttgatgcacaaattcgaaatcggggcgttattggatctaatacagagacacaaggtgacggtagcggcgcttgtcccgccgcttgtgattgctttggccaagaacccaactgttaactcttacgatctctcttccgttagattggttctctctggtgcagctcccttaggcaaagatctcgaggatagtctaggccgccgtctccctcaggccgtccttggccagggatatggtatgacagaggcaggaccagtgttgtcaatgagccttgggtttgctaaagagccaactccgtcaaaatcaggctcttgtgggactgtagtccgaaacgcagagcttaaagtggttcaccttgagacacgtctctctcttggttacaaccaacctggtgagatttgtatccgcggtcaacaaatcatgaaagagtacttgaacgatccggaagccacgtcagctacaattgacgaggaaggttggcttcacacaggggacattgggtatgttgatgaagctgatgagatattcattgttgatcgactcaaagaagtcatcaagttcaaaggctttcaggtgcctccagctgagctagaggctttgctcatcaatcaccactccattgcggatgctgcggttgttcctcaaagagatgaagtggctggagaagttccggtggctttcgtagtccgatcaaatggaaacgttatcacggaagaagatataaaagaatatatagccaaacaggtggtattctacaagagattgcacaaggtcttctttgttccctccattcccaaatctccttccggaaaaattctgagaaaggatcttaaagccaaactttgttga

SEQ ID NO: 28693 - protein, 565 aa, Brassica napus
MITATLQEPQIHQPVDTTTPPTDAPPTPPRIFRSKLPDIDIPNHLPLHTYCFQKLPSVSDKPCLIVGSTGKNYTYEETHLICRRVAAGLHKMGIRKGDVIMILLQNSAEFVFSFMGASMIGAVSTTANPFYTSQEIHKQVKSSGAKLIITHSHYVDKLRNLDGETRIGEDLTVITTEDNPPPENCLPFSTLLLTDDETTSLDVVDVGGDDAAALPFSSGTTGLPKGVVLTHKSLITSVAQQVDGDNPNLYLKPNDVVLCVLPLFHIYSLNSVLLNSIRSGATVLLMHKFEIGALLDLIQRHKVTVAALVPPLVIALAKNPTVNSYDLSSVRLVLSGAAPLGKDLEDSLGRRLPQAVLGQGYGMTEAGPVLSMSLGFAKEPTPSKSGSCGTVVRNAELKVVHLETRLSLGYNQPGEICIRGQQIMKEYLNDPEATSATIDEEGWLHTGDIGYVDEADEIFIVDRLKEVIKFKGFQVPPAELEALLINHHSIADAAVVPQRDEVAGEVPVAFVVRSNGNVITEEDIKEYIAKQVVFYKRLHKVFFVPSIPKSPSGKILRKDLKAKLC

SEQ ID NO: 28694 - DNA, 1557 bp, Brassica napus
  CDS (1)..(1557)
atgtcattaaccatggatagcgatacactcaccggactattgaagaacgtcgccgagaaattccccgatcgccgagcgctctctgtttccggaaaattcgatctcacccacgcgcgtctcaacgttctaatcgaacgcgccgcttcacgccttgtctcctccgccggaatcaatcctggcgatgtggtggctctcactttccccaacaccgtcgagtttgttattatgtttctggcggtgctaagagcccgagccacggcggcgccgttgaacgctgcgtacacggcggaggaattcgagttttacctctccgattcagactcgaagctgttactaacctctaaagaaggtaacgcaccggctcaagaagcagcttcgaagctcaacatctctcacgtcaccgccacgctcctcgacgccggctctgacctcgctctctccgtcgccgattccgactcggtctctgactcagcttcggaactcgttaacagccccgacgaccctgctctcttcctccacacttccggcaccacgagccgtcccaagggtgttccgctcacgcagctgaatcttgtctcctccgtcaacaacattaaatcggtttacaaactcaccgagtctgattccactgtgattgttctccctctgttccacgttcatggattgttggcagggttgctcagctcgcttggagctggtgcggccgtgactctcccagctgctggtagattctctgcgacaacgttttgggctgacatgaagaagtataacgccacgtggtatactgctgttcccaccattcatcagatcatattggaccgccacgccagccaacctgagccggagtatcctagactccggttcattaggagttgcagtgcttctttggctccggtgatattgtccaggcttgaggaagctttcggagcaccggttctagaggcttatgctatgacggaagcaacccacctgatgagttctaatcctttacctgaggaaggtccacacaagcctgggtctgttgggaaaccagtgggtcaagaaatggcgatccttaatgagaaaggggagatacaagagccaaatagcaagggagaggtttgtataagaggtccaaatgtgacaaagggttacaagaacaatccggatgccaacaaggcaggtttcgagtttggatggttccacactggtgatatcggttactttgattccgatgggtatttgcatctggtgggtcggatcaaagagcttattaaccgtggaggtgagaaaatatccccaattgaagtggattcagtgctcttaactcatcctgatgtttctcaaggagttgcgtttggagttcctgatgagaaatatggcgaagagattaactgtgcggtgattccaagagaaggaacaacagtgaccgaagaggacataaaaacgttctgtaagaagaatctggcagctttcaaggtgccgaagagagtgttcatcactgataacctccccaaaactgcctctggtaagattcagcgccgtatcgtcgctcagcatttcctcgagaaaccctaa

SEQ ID NO: 28695 - protein, 518 aa, Brassica napus
MSLTMDSDTLTGLLKNVAEKFPDRRALSVSGKFDLTHARLNVLIERAASRLVSSAGINPGDVVALTFPNTVEFVIMFLAVLRARATAAPLNAAYTAEEFEFYLSDSDSKLLLTSKEGNAPAQEAASKLNISHVTATLLDAGSDLALSVADSDSVSDSASELVNSPDDPALFLHTSGTTSRPKGVPLTQLNLVSSVNNIKSVYKLTESDSTVIVLPLFHVHGLLAGLLSSLGAGAAVTLPAAGRFSATTFWADMKKYNATWYTAVPTIHQIILDRHASQPEPEYPRLRFIRSCSASLAPVILSRLEEAFGAPVLEAYAMTEATHLMSSNPLPEEGPHKPGSVGKPVGQEMAILNEKGEIQEPNSKGEVCIRGPNVTKGYKNNPDANKAGFEFGWFHTGDIGYFDSDGYLHLVGRIKELINRGGEKISPIEVDSVLLTHPDVSQGVAFGVPDEKYGEEINCAVIPREGTTVTEEDIKTFCKKNLAAFKVPKRVFITDNLPKTASGKIQRRIVAQHFLEKP

SEQ ID NO: 28696 - DNA, 1710 bp, Brassica napus
  CDS (1)..(1710)
atggcggcgactaagtctcgtgacatcgacgaccttccgaaaattcaggcgaactacaccgcgttgacgccgctctggttcttagacagggctgcggcggttcatccgacgaggaaatcgctgattcacggatccttggagtacacgtggcggcagacttacgagcgatgtcgccgtctagcctccgctctcgccgatcgttcgattggacctggctccacggtggctgtaattgcacccaacactccagcaatgtacgaagctcatttcggaataccaatgtgtggagccgtcttgaacgccgtcaacatccgtctcaacgcccccactatcgctttccttctcggccactctcagagcgctgttatcatggtggatcaagagtttttcactcttgcagaggagtctttgagactcatggaggagaaagctgggagcagcttcaaacgcccgctcctaatcgtcataggtgatcacacttgtcctccagagtcgcttcaccgggctttgtcgaaaggagttgtagaatacgaggattttcttggaagtggagatcctaactatgcgtgggagacaccagctgatgagtggcagagtattgctcttggttacacctcgggaacaaccgctagcccgaaaggtgtggtgcttcatcatcgaggagcgtatctaatggctttaagcaatcctcttatttgggggatgcaagaaggctctgtttacttgtggactctccctatgtttcattgcaatggttggtgtttcacttgggctcttgctgcgctctccggtactaacatctgtctccgtcaggtcacggcgaaagaagtgtattcgagcatagccaagtataacgttacccatttctgtgcggctcctgtggtcctcaacactattgtcaatgctcctcaagaggacactatcctcccccttccccatactgtccatgtcatgaccgcaggagctgctcctccaccttctgttctcttctccatgaaccagaagggcttccgagtcactcacacctatgggctatccgagacgtacggtccttccaccgtagccgcctggaagcccgagtgggactccctccctcctgagacgcaggccaagctcaatgctcgccaaggtgtccgctacatcggcatggagcagcttgatgtcatcgacactcagacaggaaaacctgttcctgcagacggtaaaaccgccggagagattgttttccgagggaacatggtgatgaaaggatacttaaagaatcctaaagctaacgaggagactttcgctggtgggtggttccattcaggggatatcgcggtgaaacatccagacaactacatcgagatcaaggacaggtcgaaggacattataatctccggcggtgagaacatcagcagcgtggaggtggaaaacgtcgtgtatcatcacccggcggtgcttgaagcctctgttgtggccaggccagacgagcggtggcaggaatctccgtgtgcttttgtgacggtcaagagcggttacgagaaacaagaccagaataatttggctcaggatataatgaaattctgcaaggagaagctgccggcgtactgggttccgaagtcggtggtgtttgggccgttaccgaagactgctactggaaagattcagaagcatgttttgaggactaaggcgaaagagttaggaccagtaccaagaagcaggttgtag

SEQ ID NO: 28697 - protein, 569 aa, Brassica napus
MAATKSRDIDDLPKIQANYTALTPLWFLDRAAAVHPTRKSLIHGSLEYTWRQTYERCRRLASALADRSIGPGSTVAVIAPNTPAMYEAHFGIPMCGAVLNAVNIRLNAPTIAFLLGHSQSAVIMVDQEFFTLAEESLRLMEEKAGSSFKRPLLIVIGDHTCPPESLHRALSKGVVEYEDFLGSGDPNYAWETPADEWQSIALGYTSGTTASPKGVVLHHRGAYLMALSNPLIWGMQEGSVYLWTLPMFHCNGWCFTWALAALSGTNICLRQVTAKEVYSSIAKYNVTHFCAAPVVLNTIVNAPQEDTILPLPHTVHVMTAGAAPPPSVLFSMNQKGFRVTHTYGLSETYGPSTVAAWKPEWDSLPPETQAKLNARQGVRYIGMEQLDVIDTQTGKPVPADGKTAGEIVFRGNMVMKGYLKNPKANEETFAGGWFHSGDIAVKHPDNYIEIKDRSKDIIISGGENISSVEVENVVYHHPAVLEASVVARPDERWQESPCAFVTVKSGYEKQDQNNLAQDIMKFCKEKLPAYWVPKSVVFGPLPKTATGKIQKHVLRTKAKELGPVPRSRL

SEQ ID NO: 28698 - DNA, 1698 bp, Brassica napus
  CDS (1)..(1698)
atgataactgcaactctacaagaacctcagattcatcaaccggtggatacaactactccccccgccgatgctcctcctactccgccgcgtattttccgatcaaagcttccggacatagacattcccaaccacctccctctccacacctactgcttccagaagctctcctctgtttccgacaagccttgtctgatcgtagggtccacgggaaaaaactacacgtacggcgaaacgcacctcatatgtcggagagtcgccgccgggctacacaaaatggggattcgaaaaggcgacgtgataatgatcctccttcaaaactcagccgagttcgtcttctccttcatgggcgcttccatgatcggcgccgtctccaccaccgcgaaccctttctacacttctcaggagattcacaaacaggtcaaatcctccggagctaagcttataatcactcactcccattacgtcgataagctgagaaacctcgacggagaaacaagaatcggtgaagatctcaccgttatcaccacggaggagaatcctcccccggagaattgtcttcctttctccacactactactcactgacgacgagacaacctcgctagatgttgttgatgtcggtggtgatgacgccgcggcgcttcctttctcctctggcacgacggggttacctaaaggagtagttttaacgcacaagagcttaatcacgagcgtcgcgcaacaagtcgatggagacaacccgaatctttacctgaaaccaaacgacgtcgtactctgcgttttgcctcttttccacatctactcgctcaacagcgttcttctcaactccatccgatccggtgcgacggttcttttgatgcacaaattcgaaatcggggcgttattggatctaatacagagacacaaggtgacggtagcggcgcttgtcccgccgcttgtgattgctttggccaagaacccaactgttaactcttacgatctctcttccgttagattggttctctctggtgcagctcccttaggcaaagatctcgaggatagtctaggccgccgtctccctcaggccgtccttggccagggatatggtatgacagaggcaggaccagtgttgtcaatgagccttgggtttgctaaagagccaactccgtcaaaatcaggctcttgtgggactgtagtccgaaacgcagagcttaaagtggttcaccttgagacacgtctctctcttggttacaaccaacctggtgagatttgtatccgcggtcaacaaatcatgaaagagtacttgaacgatccggaagccacgtcagctacaattgacgaggaaggttggcttcacacaggggacattgggtatgttgatgaagctgatgagatattcattgttgatcgactcaaagaagtcatcaagttcaaaggctttcaggtgcctccagctgagctagaggctttgctcatcaatcaccactccattgcggatgctgcggttgttcctcaaagagatgaagtggctggagaagttccggtggctttcgtagtccgatcaaatggaaacgttatcacggaagaagatataaaagaatatatagccaaacaggtggtattctacaagagattgcacaaggtcttctttgttccctccattcccaaatctccttccggaaaaattctgagaaaggatcttaaagccaaactttgttga

SEQ ID NO: 28699 - protein, 565 aa, Brassica napus
MITATLQEPQIHQPVDTTTPPADAPPTPPRIFRSKLPDIDIPNHLPLHTYCFQKLSSVSDKPCLIVGSTGKNYTYGETHLICRRVAAGLHKMGIRKGDVIMILLQNSAEFVFSFMGASMIGAVSTTANPFYTSQEIHKQVKSSGAKLIITHSHYVDKLRNLDGETRIGEDLTVITTEENPPPENCLPFSTLLLTDDETTSLDVVDVGGDDAAALPFSSGTTGLPKGVVLTHKSLITSVAQQVDGDNPNLYLKPNDVVLCVLPLFHIYSLNSVLLNSIRSGATVLLMHKFEIGALLDLIQRHKVTVAALVPPLVIALAKNPTVNSYDLSSVRLVLSGAAPLGKDLEDSLGRRLPQAVLGQGYGMTEAGPVLSMSLGFAKEPTPSKSGSCGTVVRNAELKVVHLETRLSLGYNQPGEICIRGQQIMKEYLNDPEATSATIDEEGWLHTGDIGYVDEADEIFIVDRLKEVIKFKGFQVPPAELEALLINHHSIADAAVVPQRDEVAGEVPVAFVVRSNGNVITEEDIKEYIAKQVVFYKRLHKVFFVPSIPKSPSGKILRKDLKAKLC

SEQ ID NO: 28700 - DNA, 1656 bp, Brassica napus
  CDS (1)..(1656)
atggctccacaagaagacgccatgcagaaacagagcagcaacaagagtgacgtcatattccgatcaaagcttccggatatttacatcccgaaccacctccctctccacgactacatcttccaaaacatctccgagttcgcctccaagccttgcctgatcaacggtcccaccggccacgtgtacacttactccgaggtccatgtcgcttcccgtcgcatcgccgccggttttcaaaaactcggcgttaaccaaaacgacgtcgtgatgatcctcctctcgaattgccccgagttcgtcctctctttcctcgccgcctccttccgcggcgcaacggccaccgccgctaacccgtttttcactccggcggagatcgccaaacaggcgaaagcctcgaactcgaagctcatcgtcaccgagtctcgctacgtcgataaaatcaaagacctccaaaacgacggcgttataatcgtctgcaccgacgaggaaccttctccgatcccggaaggctgcctccgattcaccgagttgactcagtcaaccgaaatggaaacggtggagatttcttccgacgacgtggtggcgcttccttactcctccggcacgacgggtctacccaaaggagtgatgctgactcacaagggactagtcacgagcgtcgctcagcaagtcgacggcgataatccgaatctttacttccacagcgatgacgtcatactctgtgtcttgcccttgttccatatctacgctttgaactcgatcatgctgtgtgggcttagagttggtgcctccatcttgatcatgcccaagttcgagattaatctgctcttggagctcatacagcggtgtaaagtcacggttgctccgatggttccgccgattgttttggccatggcgaagtcgccggagacggagaagtatgacttgagctcgattagggttgtcaagtctggcgctgccccgcttggtaaggagcttgaagatgccgtcagtgccaagtttcctaacgccaaactcggtcagggatacggaatgacggaagcaggtccggtgctagcaatgtcgttagggttcgcgaaagagccgtttccagtgaagtcgggagcttgtggtacggtggttagaaacgccgaaatgaaaatcatcgatccagacaccggagactcactttccaaaaacaaacctggagagatttgcatccgtggtcaccagatcatgaaaggttacctcaacaacccggcggctacagcagagaccatagacaaagacggctggcttcacaccggagatatcgggttgatcgatgacgacgacgagcttttcattgtcgatcgtttgaaagagcttatcaagtacaaaggttttcaagtggctccggctgagctagaggctctcctcatcggtcatcaggatatcaccgacgtggccgttgtcgcaatgaaggaagaggctgctggtgaagttcccgttgcgtttgttgtgaaatccaaggattcagagttatcggaagatgatgtgaaacaattcgtggcgaaacaggttgtgttttacaagagaatcaacaaagtgttcttcgttgagtccattcctaaagctccgtcagggaagatattgaggaaagacctgagggcaaaactagcaaatgggttggtaaactaa

SEQ ID NO: 28701 - protein, 551 aa, Brassica napus
MAPQEDAMQKQSSNKSDVIFRSKLPDIYIPNHLPLHDYIFQNISEFASKPCLINGPTGHVYTYSEVHVASRRIAAGFQKLGVNQNDVVMILLSNCPEFVLSFLAASFRGATATAANPFFTPAEIAKQAKASNSKLIVTESRYVDKIKDLQNDGVIIVCTDEEPSPIPEGCLRFTELTQSTEMETVEISSDDVVALPYSSGTTGLPKGVMLTHKGLVTSVAQQVDGDNPNLYFHSDDVILCVLPLFHIYALNSIMLCGLRVGASILIMPKFEINLLLELIQRCKVTVAPMVPPIVLAMAKSPETEKYDLSSIRVVKSGAAPLGKELEDAVSAKFPNAKLGQGYGMTEAGPVLAMSLGFAKEPFPVKSGACGTVVRNAEMKIIDPDTGDSLSKNKPGEICIRGHQIMKGYLNNPAATAETIDKDGWLHTGDIGLIDDDDELFIVDRLKELIKYKGFQVAPAELEALLIGHQDITDVAVVAMKEEAAGEVPVAFVVKSKDSELSEDDVKQFVAKQVVFYKRINKVFFVESIPKAPSGKILRKDLRAKLANGLVN

SEQ ID NO: 28702 - DNA, 1641 bp, Glycine max
  CDS (1)..(1641)
atggcaccttctccacaagaaatcatcttccgatccccactccccgatattcccatccccacacatctcccattgtactcttactgcttccaaaacttgtcaaagttccatgaccgtccatgcctcatcgacggcgacaccggcgagaccctcacctacgccgacgtcgacctcgctgctcgccgcatcgcctccggcctccacaaaatcggcatccgccagggtgacgtcatcatgctcgtcctacgcaactgcccgcagttcgccctcgccttcctcggcgccacccaccgtggcgccgtcgtcaccacagccaaccccttctacacgccggcggagcttgcgaagcaagcgacggccacgaaaaccaggctcgtcataacgcaatccgcgtacgttgagaaaatcaagagtttcgcggacagcagcagcgatgtcatggtgatgtgcattgatgatgatttttcttatgaaaacgacggcgttttgcatttctcaacgctcagtaacgccgacgaaacggaagcccctgccgttaagattaaccctgacgagctcgttgcgcttccgttttcttctggcacgtctgggctccccaagggcgttatgttatcgcataaaaacttggtcaccacgatagcgcagttagttgacggcgaaaacccgcaccaatacactcacagcgaggatgtgctactctgtgtgttgcctatgtttcatatctatgcgctcaattccattttgctctgcgggattcgttccggtgcggccgtgcttattttgcagaagtttgagatcactactctgttggagctcatcgagaagtacaaggtgacggttgcgtcgtttgtgccgcccatcgttttggcgttggttaagagcggagagactcatcgctacgacctgtcgtctattcgcgctgtggtcaccggcgcggcacccttaggaggggaacttcaagaagccgttaaggctaggctaccacacgctacttttggacagggatatgggatgacagaagcaggaccacttgccattagcatggcatttgcaaaagtaccctctaagattaaaccaggtgcatgcggaaccgttgtgagaaacgccgagatgaaaatcgtggatacagaaacgggtgattcacttccaagaaacaaacacggtgaaatttgcataagaggcacaaaggtcatgaaaggatatctaaatgacccagaggctacagagagaactgtagacaaagaaggatggttacacacaggagatattggtttcattgatgatgatgatgaactcttcattgttgatcggttaaaggaattgatcaaatacaaaggattccaagtggctcctgctgagcttgaagcattgttgattgcccacccaaacatttctgatgctgccgttgtaggcatgaaagatgaagctgcaggggaaattccagttgcatttgttgtaaggtcaaatggttctgagatcgccgaggatgaaatcaagaaatacatttcacaacaggtggttttttacaagagaataggtagagttttcttcacggactctattcctaaagcaccctcaggcaaaattctgcgaaaggtattaactgcaagacttaacgaaggtttggtggtggccaattag

SEQ ID NO: 28703 - protein, 546 aa, Glycine max
MAPSPQEIIFRSPLPDIPIPTHLPLYSYCFQNLSKFHDRPCLIDGDTGETLTYADVDLAARRIASGLHKIGIRQGDVIMLVLRNCPQFALAFLGATHRGAVVTTANPFYTPAELAKQATATKTRLVITQSAYVEKIKSFADSSSDVMVMCIDDDFSYENDGVLHFSTLSNADETEAPAVKINPDELVALPFSSGTSGLPKGVMLSHKNLVTTIAQLVDGENPHQYTHSEDVLLCVLPMFHIYALNSILLCGIRSGAAVLILQKFEITTLLELIEKYKVTVASFVPPIVLALVKSGETHRYDLSSIRAVVTGAAPLGGELQEAVKARLPHATFGQGYGMTEAGPLAISMAFAKVPSKIKPGACGTVVRNAEMKIVDTETGDSLPRNKHGEICIRGTKVMKGYLNDPEATERTVDKEGWLHTGDIGFIDDDDELFIVDRLKELIKYKGFQVAPAELEALLIAHPNISDAAVVGMKDEAAGEIPVAFVVRSNGSEIAEDEIKKYISQQVVFYKRIGRVFFTDSIPKAPSGKILRKVLTARLNEGLVVAN

SEQ ID NO: 28704 - DNA, 1662 bp, Glycine max
  CDS (1)..(1662)
atggagggaagtatccggtgctctgccaactacgttcctctcactccaatcagcttcttggaccgcgccgccgtcgtttaccgcgacagactttctcttgtctccggtgacgttacctacacgtggacccagacacaccaacgctgcatcaaacttgcttcttccatttctcaacttggtgtcggtctttctcccctcgatgtggttgctgtattggcccctaatgttccagctatgtatgagctgcattttgctgttcccatgtcaggggctgttctctgcacgctaaatacacgtcatgattctgcaatggtttccttgttgctaaaacattctgaggccaaacttgtttttgttgattatcaattacttgatattgctaaaggagcacttcaaatcctgtcaaaaatcaccaccaagcttccccatttggtcttaattttggagtctggacatccatcacctccccatgctaaaggaaccttgacatacgaggatcttatagctaaagggagccttcaatttgaggtgaggaggccaaaggatgagtgggatccaatctcccttaattacacttctggaactacatcaaaccccaagggtgtgatctatagccacagaggtgcctatcttaattctctggctacggttcttcttaacgagatgaggtctatgccggtatatttatggtgtgttcccatgtttcactgcaatggttggtgcctcccttgggccattgctgctcagggtggcactaacgtctgccaaagaagtgtcaccgctgaagggatatttcacaatatttttaggcacaaggttactcacatggggggtgcaccgacagttttaaacatgataatcaattcaccacccaaagtccggaagccgcttccgggaaaggtccaagtgatgacaggtggtgcaccaccgcctccggatgtgattatcaggatggaagaactaggatttaatgtgactcattcatatggtttgacagaaacttttggtccggcatcaatttgcacttggaaaccagaatgggacaatctgcctcgagatgcacaagcaaaactcaaggcacgtcaaggagtggcccatgttgggatggaagacctagatgtgaaagatcctcacacaatgaagagtgtaccagctgatgcaaaaaccatgggtgaggtgatgttcaggggcaacactgtgatgaatggatatctgaaggacttgaaagcaacacaagaggcatttaaaggtggatggttttggactggtgatttgggagtaaagcatcctgatggatacatagagcttaaggatcgctcgaaggacatcatcatctctgggggagaaaatattagcacaattgagttggaaggagtcatttttagtcatccagcagtttttgaggcagctgttgttgggagacctgatgattattggggagagacaccttgtgcatttgtcaaactcaaggagggatgcagtgccacatcagaggagataatacaattttgtcagaatcgattgcctcgctttatggcccctcgaactgtggtgtttactgatctgccaaagacatcaactggcaagacacagaaatttgttctgagggagaaagcaaaggccatgggaagcttgactaagaagaacgctagccggttataa

SEQ ID NO: 28705 - protein, 553 aa, Glycine max
MEGSIRCSANYVPLTPISFLDRAAVVYRDRLSLVSGDVTYTWTQTHQRCIKLASSISQLGVGLSPLDVVAVLAPNVPAMYELHFAVPMSGAVLCTLNTRHDSAMVSLLLKHSEAKLVFVDYQLLDIAKGALQILSKITTKLPHLVLILESGHPSPPHAKGTLTYEDLIAKGSLQFEVRRPKDEWDPISLNYTSGTTSNPKGVIYSHRGAYLNSLATVLLNEMRSMPVYLWCVPMFHCNGWCLPWAIAAQGGTNVCQRSVTAEGIFHNIFRHKVTHMGGAPTVLNMIINSPPKVRKPLPGKVQVMTGGAPPPPDVIIRMEELGFNVTHSYGLTETFGPASICTWKPEWDNLPRDAQAKLKARQGVAHVGMEDLDVKDPHTMKSVPADAKTMGEVMFRGNTVMNGYLKDLKATQEAFKGGWFWTGDLGVKHPDGYIELKDRSKDIIISGGENISTIELEGVIFSHPAVFEAAVVGRPDDYWGETPCAFVKLKEGCSATSEEIIQFCQNRLPRFMAPRTVVFTDLPKTSTGKTQKFVLREKAKAMGSLTKKNASRL

SEQ ID NO: 28706 - DNA, 1647 bp, Glycine max
  CDS (1)..(1647)
atggaggagatagaccccagaagtggtttctgcagctccaattcaatcttctacagcaagcgtaagcccctcccactccctcccaacaacgccttagacgtcaccaccttcatctcctcccgcgcccaccgcgccaccacagccttcgtcgacgccgccaccgcccgccgcctcacctacacccagctatggcgttccgtggagggcgtggcagcctctctctccgtggacatggggatccgaaagggcaacgtggtcctcatcctctcccccaactccatccacttccccgttgtgtgcctggccgtcatgtccctcggcgccatcatcaccaccaccaaccccctcaacaccacccgcgaaatcgccaagcagatcgccgattccaagcctctcctcgccttcacgatctctgatttactccccaaaatcaccgcagctgcaccctctctaccaatcgttctcatggacaacgacggcgccaataataacaataacaataataatatcgtggccactcttgatgagatggcgaagaaggaaccggtggctcagcgcgtgaaagagcgcgtggagcaggacgacacggccacgctgctctactcctccggcaccacggggcccagcaagggcgtggtatcgtcccaccgcaacctcatagcaatggtccagatcgtgctgggtcggttccacatggaggagaacgaaaccttcatatgcacggtccccatgtttcacatatacggcctggtcgccttcgccacggggcttctggcttccggctccaccatcgtcgtgctctccaagttcgagatgcacgacatgctctcctcgatcgagaggttccgcgccacttacctcccgctcgtgccgcccattctggtggccatgctcaacaacgccgccgctatcaagggcaagtacgatatcacgtcgctgcattcggtgctctccggtggggctccgttgagcaaggaggtcatagagggctttgtggccaagtatcccaacgtcaccatccttcagggttatggtttgacggaatccaccggcgttggggcctccaccgactccttggaggagagtcgaaggtacggcacggcggggctcttgtctccggccacccaggctatgatcgtcgatcctgaatccggccaatcgcttccggttaaccgcaccggggagctctggctcaggggtcccaccatcatgaaaggttatttcagtaacgaagaagcaaccacatcaacccttgattcaaaaggatggttaagaacaggggatatttgttacattgacaatgatggattcatatttattgtggatcggttaaaggagctcatcaaatacaagggatatcaggttcctccagcagaactagaggccttgctactgactcatcctgctattttagatgccgctgttatcccgtatccagataaggaagctgggcagcatccaatggcatacgtggtgaggaaggctggaagtagcttatcagaaactcaagttatggattttgttgcaggacaggtggctccgtacaagcggattcgaaaagtggcatttatttcctccatacccaaaaatccatctggcaaaattcttcggaaggatctcatcaaactcgcaacgtctaaactctga

SEQ ID NO: 28707 - protein, 548 aa, Glycine max
MEEIDPRSGFCSSNSIFYSKRKPLPLPPNNALDVTTFISSRAHRATTAFVDAATARRLTYTQLWRSVEGVAASLSVDMGIRKGNVVLILSPNSIHFPVVCLAVMSLGAIITTTNPLNTTREIAKQIADSKPLLAFTISDLLPKITAAAPSLPIVLMDNDGANNNNNNNNIVATLDEMAKKEPVAQRVKERVEQDDTATLLYSSGTTGPSKGVVSSHRNLIAMVQIVLGRFHMEENETFICTVPMFHIYGLVAFATGLLASGSTIVVLSKFEMHDMLSSIERFRATYLPLVPPILVAMLNNAAAIKGKYDITSLHSVLSGGAPLSKEVIEGFVAKYPNVTILQGYGLTESTGVGASTDSLEESRRYGTAGLLSPATQAMIVDPESGQSLPVNRTGELWLRGPTIMKGYFSNEEATTSTLDSKGWLRTGDICYIDNDGFIFIVDRLKELIKYKGYQVPPAELEALLLTHPAILDAAVIPYPDKEAGQHPMAYVVRKAGSSLSETQVMDFVAGQVAPYKRIRKVAFISSIPKNPSGKILRKDLIKLATSKL

SEQ ID NO: 28708 - DNA, 1572 bp, Glycine max
  CDS (1)..(1572)
atgaaagacacaatggaaactcctacgacactcaccaccttgctccgccacgtcgccgccaaattcccctcccgccgtgccatctccgtcgctgccaaattcgacctcacccactcccgcctccaccgcctggtcgaatccgccgccgctcagttagtctccgccggcgtcaaacccggcgacgtcgtcgccctcaccttccccaacaccatcgagtttgtagtcatgttcctagccgtcattcgggctcgagccacagccgcgccgttaaactcggcttacacagcggaagagttcgagttttacttatccgactcggagtccaagctcctcctaacatcaccagaaggaaacaagcctgctcaagccgcggcttcaaagctcagcatcccccacgccacggcttcgattaccaaagccgagaacgaagaagcggagctgagtctctcattattaaaccaccccgagttgaattccgttaactcagttgagtcactcgttaacgaccctgatgacgtggcacttttccttcacacctctggcaccacgagccgtcccaagggagtgccgctgactcagtacaaccttctctcttcggtgaagaacatcgactcagtgtaccgactcactgagtccgactcgacggtgattgttcttcctctcttccacgtgcacgggttaatcgccggattgctgagctccctcggcgccggagctgcggtggcgcttccggcggcggggaggttctccgcctcggcgttttggaaggacatgattaaatacagcgccacatggtacaccgcggttcccaccatacaccagatcatacttgatcgccactccagcaaccccgaaccggtttacccgcggctccggttcatccgaagctgcagcgcctcgctcgcaccggttatactcggtaaactcgaggaggctttcggtgcaccggttttagaggcctatgcgatgacggaagcgtcgcatttgatggcttcgaaccctttgccacaagatggggcccacaagtccgggtcggttgggaaacccgtgggtcaggaaatgggcattttagacgaatcgggtcgggtccaagaggctggtatcagtggagaggtttgcattcggggatccaatgttacgaaaggatataaaaataacgtggcagcaaatacggcgtcgtttctgttcgattggtttcatactggtgatattggatactttgattctgatgggtatttgcatctcgtgggtcggatcaaggaactcatcaaccgaggaggtgaaaagatatcaccaatagaagtggatgctgttcttctttcacatccagaaattgctcaagcagttgcttttggagtgcctgatgccaagtatggagaggagatatattgtgctgtcatcccaagagaaggatcaaacgttgatgaggcagaggtgctaagatttagcaagaccaatcttgcatccttcaaagtaccaaaaaaggtcttcattactgattctttacccaaaactgccacaggcaagattttgcgccgtcttgtggcagaacactttgtctctcaaatttga

SEQ ID NO: 28709 - protein, 523 aa, Glycine max
MKDTMETPTTLTTLLRHVAAKFPSRRAISVAAKFDLTHSRLHRLVESAAAQLVSAGVKPGDVVALTFPNTIEFVVMFLAVIRARATAAPLNSAYTAEEFEFYLSDSESKLLLTSPEGNKPAQAAASKLSIPHATASITKAENEEAELSLSLLNHPELNSVNSVESLVNDPDDVALFLHTSGTTSRPKGVPLTQYNLLSSVKNIDSVYRLTESDSTVIVLPLFHVHGLIAGLLSSLGAGAAVALPAAGRFSASAFWKDMIKYSATWYTAVPTIHQIILDRHSSNPEPVYPRLRFIRSCSASLAPVILGKLEEAFGAPVLEAYAMTEASHLMASNPLPQDGAHKSGSVGKPVGQEMGILDESGRVQEAGISGEVCIRGSNVTKGYKNNVAANTASFLFDWFHTGDIGYFDSDGYLHLVGRIKELINRGGEKISPIEVDAVLLSHPEIAQAVAFGVPDAKYGEEIYCAVIPREGSNVDEAEVLRFSKTNLASFKVPKKVFITDSLPKTATGKILRRLVAEHFVSQI

SEQ ID NO: 28710 - DNA, 1707 bp, Glycine max
  CDS (1)..(1707)
atggtgggagcacggccacgggacatagatgacttgcccaagaacgccgccaactacacagcgcttacgccgttgtggtttctagagagagctgctacggtccaccccaccagaaactccctcatccacggatctcgtcgctacacgtggcagcagacttaccaccgttgccgtcgattcgcctccgctctttctaatcattccatcggtcttggaaacactgtagctgttattgcacccaacattccagctctttatgaagctcactttgggattccaatgtcaggggctgtgttgaaccctgttaatattaggctaaatgcatccacggtagcttttcttcttggtcattgcacagctgcagcagtaatagttgatcaagagttcttttctttagcagaagaagctttgaaaatatggtctgagaaggccaaaaccttcagccctccacttttaatagtcatcagtgatgaaaattgcgaccctaaggcacttaaatatgctctgggcaaaggagccgttgattatgaggattttctccagagtggagatccagaatatgcatggaaacccccagaggatgagtggcagagcatttcattgggttacacatccggtaccactgctagtccgaagggtgtggttttacatcaccgtggagcctatctcatgtctctgagtggagctcttatttggggaatgactgaaggagctgtgtatctttggacacttcccatgtttcattgcaatggttggtgttacacttggacacttgcagctctgtgtggtacaaacatatgccttcgccaggtaacagcgaaggcagtgtatggagccattgccaagtataaagtgactcatttttgtgcagcaccagtggttcttaacacactaattaatgccccagctgaggacaccattcttcctctaccccatgttgtgcatgtgaatacagctggggctgcacctcctccttctgttctttccggcatgtctgaacgtggatttcgtgtcacacacacttatggtctctcagaaacctatggcccctctgtctactgtgcctggaaaccagaatgggaatcacttccccctgaaaaccaagcccggctcaatgcaagacaaggtgttaggtacattggcttggaaggcctggctgttgtgaacacaaaaaccatggaacctgttcctgctgatggtaaaactgttggtgagattgtgatgcggggtaattctgtgatgaaaggctacttaaagaaccctaaggctaacgaggagacctttgcaaatggatggtttcattctggggatcttgctgtgaagcacccagatggatatatagaaattaaagacagatcaaaggacatcataatctctggtgctgaaaacatcagcagtgtagagatagagaatactctttactcacacccttcaatactggaggcagcagtggttgcaagggcagatgaaaaatggggcgagtctccctgcgcttttgtgacattaaagccaggagtggataaaagcaatgagcagcgtataattgaggatatactaaagttcagcagggccaagatgcctgcttattgggttccaaaatcagttgtgtttggagccttacctaagacagctactgggaagatacagaagcatatactgagggccaaggcaaaagagatgggacctgtaaagttgagcaagttataa

SEQ ID NO: 28711 - protein, 568 aa, Glycine max
MVGARPRDIDDLPKNAANYTALTPLWFLERAATVHPTRNSLIHGSRRYTWQQTYHRCRRFASALSNHSIGLGNTVAVIAPNIPALYEAHFGIPMSGAVLNPVNIRLNASTVAFLLGHCTAAAVIVDQEFFSLAEEALKIWSEKAKTFSPPLLIVISDENCDPKALKYALGKGAVDYEDFLQSGDPEYAWKPPEDEWQSISLGYTSGTTASPKGVVLHHRGAYLMSLSGALIWGMTEGAVYLWTLPMFHCNGWCYTWTLAALCGTNICLRQVTAKAVYGAIAKYKVTHFCAAPVVLNTLINAPAEDTILPLPHVVHVNTAGAAPPPSVLSGMSERGFRVTHTYGLSETYGPSVYCAWKPEWESLPPENQARLNARQGVRYIGLEGLAVVNTKTMEPVPADGKTVGEIVMRGNSVMKGYLKNPKANEETFANGWFHSGDLAVKHPDGYIEIKDRSKDIIISGAENISSVEIENTLYSHPSILEAAVVARADEKWGESPCAFVTLKPGVDKSNEQRIIEDILKFSRAKMPAYWVPKSVVFGALPKTATGKIQKHILRAKAKEMGPVKLSKL

SEQ ID NO: 28712 - DNA, 1572 bp, Glycine max
  CDS (1)..(1572)
atgaaagacacaatggaaactcctacgacactcaccaccttgctccgccacgtcgccgccaaattcccctcccgccgtgccatctccgtcgctgccaaattcgacctcacccactcccgcctccaccgcctggtcgaatccgccgccgctcagttagtctccgccggcgtcaaacccggcgacgtcgtcgccctcaccttccccaacaccatcgagtttgtagtcatgttcctagccgtcattcgggctcgagccacagccgcgccgttaaactcggcttacacagcggaagagttcgagttttacttatccgactcggagtccaagctcctcctaacatcaccagaaggaaacaagcctgctcaagccgcggcttcaaagctctgcatcccccacgccacggcttcgattaccaaagccgagaacgaagaagcggagctgagtctctcattattaaaccaccccgagttgaattccgttaactcagttgagtcactcgttaacgaccctgatgacgtggcacttttccttcacacctctggcaccacgagccgtcccaagggagtgccgctgactcagtacaaccttctctcttcggtgaagaacatcgactcagtgtaccgactcactgagtccgactcgacggtgattgttcttcctctcttccacgtgcacgggttaatcgccggattgctgagctccctcggcgccggagctgcggtggcgcttccggcggcggggaggttctccgcctcggcgttttggaaggacatgattaaatacagcgccacatggtacaccgcggttcccaccatacaccagatcatacttgatcgccactccagcaaccccgaaccggtttacccgcggctccggttcatccgaagctgcagcgcctcgctcgcaccggttatactcggtaaactcgaggaggctttcggtgcaccggttttagaggcctatgcgatgacggaagcgtcgcatttgatggcttcgaaccctttgccacaagatggggcccacaagtccgggtcggttgggaaacccgtgggtcaggaaatgggcattttagacgaatcgggtcgggtccaagaggctggtatcagtggagaggtttgcattcggggatccaatgttacgaaaggatataaaaataacgtggcagcaaatacggcgtcgtttctgttcgattggtttcatactggtgatattggatactttgattctgatgggtatttgcatctcgtgggtcggatcaaggaactcatcaaccgaggaggtgaaaagatatcaccaatagaagtggatgctgttcttctttcacatccagaaattgctcaagcagttgcttttggagtgcctgatgccaagtatggagaggagatatattgtgctgtcatcccaagagaaggatcaaacgttgatgaggcagaggtgctaagatttagcaagaccaatcttgcatccttcaaagtaccaaaaaaggtcttcattactgattctttacccaaaactgccacaggcaagattttgcgccgtcttgtggcagaacactttgtctctcaaatttga

SEQ ID NO: 28713 - protein, 523 aa, Glycine max
MKDTMETPTTLTTLLRHVAAKFPSRRAISVAAKFDLTHSRLHRLVESAAAQLVSAGVKPGDVVALTFPNTIEFVVMFLAVIRARATAAPLNSAYTAEEFEFYLSDSESKLLLTSPEGNKPAQAAASKLCIPHATASITKAENEEAELSLSLLNHPELNSVNSVESLVNDPDDVALFLHTSGTTSRPKGVPLTQYNLLSSVKNIDSVYRLTESDSTVIVLPLFHVHGLIAGLLSSLGAGAAVALPAAGRFSASAFWKDMIKYSATWYTAVPTIHQIILDRHSSNPEPVYPRLRFIRSCSASLAPVILGKLEEAFGAPVLEAYAMTEASHLMASNPLPQDGAHKSGSVGKPVGQEMGILDESGRVQEAGISGEVCIRGSNVTKGYKNNVAANTASFLFDWFHTGDIGYFDSDGYLHLVGRIKELINRGGEKISPIEVDAVLLSHPEIAQAVAFGVPDAKYGEEIYCAVIPREGSNVDEAEVLRFSKTNLASFKVPKKVFITDSLPKTATGKILRRLVAEHFVSQI

SEQ ID NO: 28714 - DNA, 1740 bp, Hordeum vulgare
  CDS (1)..(1740)
atgggctcagaggggccggggcatgggttcggatccggggcgccggggccggacatcgacgatctcccgcggaacgacgccaactacacggcgctgacgccgctctggttcctcgagcgggccgccctggcccagccggacagggcgtccgtcgtgcacggcccggtccggtacacctgggccgagacctaccgccggtgccgccgcctcgcctctgcactggcgcgccgatctgtcggccacggcagcactgttgctgtggtagctccaaatgttcccgcagtgtacgaagctcattttggtgttccaatgtctggagctgtcgtgaactgcataaacatccggttaaatgctgagacgatcgcattccttcttgatcattccgtggcagaagttgtgatggtggaccaagaattcttcaccctagccgaagaatccctgaagatagtatcagagaagaagaaacagaattttcggcctccagtcctaattgttatcgccgatccaacctgtgaacctaagtctctacaatacgctctaggacaaggggccattgagtatgaggatttcctgaaaaccggtgacccagaattcaactggaagccaccgaaggatgaatggcagagcattgccttaggttatacttctgggactacttcaagcccaaaaggtgtcgtgttgcaccaccgtggcgcctacctcatggcactcagtgttgctatggtgtggggaatgcctgaaggggctgtttacttgtggactttgcctatgttccattgtaatggttggtgttacacttgggcgttggctgccttctgcggaaccagcatatgtcttcgccaggtgagcacaaaggctatatacactggtattgcaaaacaaggagtgacacatttctgcgctgcgccggtggtcatgaacaacctcataaacgctcctgcaagcgagaccttcctgccactcccccgtgtggttaatgtcatggtggccggagccgccccgacgccttcgcttctcgcggccctgtctgtccgtggtttccgtgtcacacacacttacggcctgtctgagacctatggcccgtcgacggtgtgtgtgtggaagtccgagtgggacaacctgccgctcgaggagcgctcccgtctgcattgccggcaaggcatcaggtacactgcactggaaggcctcgacgtggttgatccgaaaacgatggtccccgtccccgccaatggcaagtcctacggggagatcgtcatgaggggcaacgctgtgatgaagggctacctgaagaaccccaaggccaacgccgaggcgttcgcgcatggctggtaccactccggcgacctcggggtgaagcaccccgacgggtacatcgaagtcaaggaccggatgaaggacatcatcatctccggcggggagaacatcagcaccctggaggtggagaaggtggtgtacatgcacccggcggtcctggaggcctcggtagttgccagggccgacgatcggtggggggagtcgccctgtgcgttcgttaccctcaaggaaggggccggtggctccgacgaggtggcgctggcaaacgatattatgaggttctgccgggaaaggatgccgggctactgggtcccgaagtcggtcgtcttcgggccgttgccgaagacggcaacgggaaagatcaagaaacacgagttgagggcgaaggccaaggagcttggccctgtgaagaagagcaggatgtga

SEQ ID NO: 28715 - protein, 579 aa, Hordeum vulgare
MGSEGPGHGFGSGAPGPDIDDLPRNDANYTALTPLWFLERAALAQPDRASVVHGPVRYTWAETYRRCRRLASALARRSVGHGSTVAVVAPNVPAVYEAHFGVPMSGAVVNCINIRLNAETIAFLLDHSVAEVVMVDQEFFTLAEESLKIVSEKKKQNFRPPVLIVIADPTCEPKSLQYALGQGAIEYEDFLKTGDPEFNWKPPKDEWQSIALGYTSGTTSSPKGVVLHHRGAYLMALSVAMVWGMPEGAVYLWTLPMFHCNGWCYTWALAAFCGTSICLRQVSTKAIYTGIAKQGVTHFCAAPVVMNNLINAPASETFLPLPRVVNVMVAGAAPTPSLLAALSVRGFRVTHTYGLSETYGPSTVCVWKSEWDNLPLEERSRLHCRQGIRYTALEGLDVVDPKTMVPVPANGKSYGEIVMRGNAVMKGYLKNPKANAEAFAHGWYHSGDLGVKHPDGYIEVKDRMKDIIISGGENISTLEVEKVVYMHPAVLEASVVARADDRWGESPCAFVTLKEGAGGSDEVALANDIMRFCRERMPGYWVPKSVVFGPLPKTATGKIKKHELRAKAKELGPVKKSRM

SEQ ID NO: 28716 - DNA, 1677 bp, Zea mays
  CDS (1)..(1677)
atgggttccgtcgcggaggactccaccgcggcagcggcagcagcggcgtcggtagtgttccgctccaagctacccgacatcgagatcccgcggaacctctcgctgcaggcctactgcttcgagcggctccccgaggtgtcctcccgcccctgcctcatcgacgggcagacgggcgccgtgcacacctacgccgaggtggaccgcctgtcgcgctccgcggcggcggcgctgcgcgggctcggggtgggcaggggcgacgtggtgatggcgctgctccgcaactgccccgagttcgccttggtcttcctcggcgcggcgcggctgggcgccgccaccaccacggccaacccgttctacaccccgcacgagatccaccgccaggcggccgcggcgggggccagggtggtcgtcaccgaggcctgcgccgtcgacaaggtgcgcgggttcgccgccgagcgcggcgtgccggtggtcgccgtcgacggcgccttcgacgggtgcctggagctccgggccctggtggacgccgccgagccgctcgccgccgacgaggaggtcggccccgacgacgtcgtcgcgctgccctactcctccggcaccaccgggatgcccaagggcgtcatgctcacgcatcgcagcctcgtcaccagcgtcgcgcagcaggtggacggcgagaacccgaacctgtacttcagcaaggatgacgtggtgctgtgcgtgctgccgctgttccacatctactcgctgaactcggtgctcctggcggggctgcgcgccggctgcgccatcgtgatcatgcgcaagttcgagatcggcgcgctggtggagctggtgcgcgcgcacggcgtgaccgtggcgcccttcgtgccgcccatcgtggtggagatcgccaagagcccccgcgtgggcgccgccgacctcgcctccatccgcatggtcatgtccggcgccgcgcccatggggaaggacctccaggacgcgttcatggccaagatccccaacgccgtgctcggccaggggtacgggatgaccgaggcggggcccgtgctggccatgtgcctggccttcgccaaggagccgttcgaggtcaagtccggctcctgtggcaccgtcgtcaggaacgcggagctgaagatcgtcgacccagacaccagcgcgtcgctgggacggaaccagccaggcgagatatgcatccgcggcgaacaaatcatgaaaggttatctgaatgatccagaggcgacaaagaacaccattgataaggacggatggctgcacaccggggacattggttatgtggacgatgacgacgagatcttcatcgttgacaggctgaaggagataatcaaatacaagggcttccaagtacctcctgcggagcttgaagcccttctcatcacacatcctgaaatcaaggatgccgctgttgtctcgatgaaagatgaagtcgccggcgaagtcccggtggcattcattatacgcagtgaaggctctgagatcagtgagaacgagatcaagcagtttgttgcaaaggaggtcgtgttctacaagaggatcaacagagttttcttcacggattctatcccgaagaatccctccggcaagattcttaggaaggacctgagagcgcggcttgccgcgggcatcccaagcagtgacaacacacagtccaaaagttga

SEQ ID NO: 28717 - protein, 558 aa, Zea mays
MGSVAEDSTAAAAAAASVVFRSKLPDIEIPRNLSLQAYCFERLPEVSSRPCLIDGQTGAVHTYAEVDRLSRSAAAALRGLGVGRGDVVMALLRNCPEFALVFLGAARLGAATTTANPFYTPHEIHRQAAAAGARVVVTEACAVDKVRGFAAERGVPVVAVDGAFDGCLELRALVDAAEPLAADEEVGPDDVVALPYSSGTTGMPKGVMLTHRSLVTSVAQQVDGENPNLYFSKDDVVLCVLPLFHIYSLNSVLLAGLRAGCAIVIMRKFEIGALVELVRAHGVTVAPFVPPIVVEIAKSPRVGAADLASIRMVMSGAAPMGKDLQDAFMAKIPNAVLGQGYGMTEAGPVLAMCLAFAKEPFEVKSGSCGTVVRNAELKIVDPDTSASLGRNQPGEICIRGEQIMKGYLNDPEATKNTIDKDGWLHTGDIGYVDDDDEIFIVDRLKEIIKYKGFQVPPAELEALLITHPEIKDAAVVSMKDEVAGEVPVAFIIRSEGSEISENEIKQFVAKEVVFYKRINRVFFTDSIPKNPSGKILRKDLRARLAAGIPSSDNTQSKS

SEQ ID NO: 28718 - DNA, 1734 bp, Zea mays
  CDS (1)..(1734)
atgatcacggtggcagcaccggaggcgcagccgcaggtggcggcagcggcggcggcggttgcggcgccggaggagaccgtgttccggtcgaagctgccggacatcgacatccccacccacctgccgctccacgactactgcttctcgagggcggcggaggcggcgggcgcgccgtgcctcatcgcggcggccacggggaggacctacacgtacgccgagacgcgcctcctgtgccgcaaggccgcggcgtgcctccacgggctcggcgtcgcccagggcgaccgcgtcatgctcctgctccagaactccgtcgagttcgtgctcgccttcttcggcgcgtccttcctcggcgccgtcaccacggccgccaacccgttctgcacgccgcaggagatccacaagcagttcagcgcctccggcgcgaaggtcgtcgtcacccactccgcctacgtcgccaagctccggcacgacgccttcccgaggatcggcacggcgagcggcggcggcggcgtggacggcaatgccctcctcaccgtcctcaccatcgacggcgacgcggccgacaccccggaaggctgcctggcgttctgggagctgctcacgtccggcgacggcgacgccctcccggaggtgtccatctccccggacgaccccgtggcgctgccgttctcgtcgggcaccacggggctgcccaagggcgtcgtgctgacccacggcggccaggtcacgaacgtggcgcagcaggtggacggcgcgaaccccaacttgtacatgcgggagggcgacgtcgcgctctgcgtgctgcctctgttccacatcttctccctcaactccgtgctgctctgcgccatgcgggccggcgcggcggtcatgctcatgcccaagttcgagatgggcgccatgctggagggcatccagcggtggcgcgtcacagtggcagccgtcgtgccgccgctggtgctcgccctggccaagaaccccgcgctcgagaagtacgacctcagctccatccggatcgtgctctccggcgctgcgccgcttggcaaggacctcgtcgacgcactccgcgcccgcgtgccacaggccgtcttcggacagggatacgggatgacggaggccgggcccgtgctgtccatgtgcccggcgttcgccaaggagccggcgcccgccaagccggggtcgtgcggcacagtggtgcgcaacgcggagctcaaggtggtggacccggacacgggcctctccctcggccgcaacctccccggcgagatctgcatccggggcccgcagatcatgaaagggtacctgaacgacccggaggccaccgcgaggacgatcgacgtccacggctggctccacaccggcgacatcggctacgtcgacgacgacgacgaggtcttcatcgtcgaccgcgtcaaggagctcatcaagttcaagggcttccaggtgccgccggccgagctcgaggctctgctcgtcgcccacccgtccatcgccgacgcggccgtcgtcccgcaaaaggacgaagccgccggcgaggtccccgtcgccttcgtggtccgcgccgccgacgccgacatcgcggaggacgccatcaaggagttcatctccaagcaggtggtattctacaagaggctacacaaggtgtacttcaccccctccatccccaagtcggcgtccgggaagatcctgaggagggagctgcgcgccaagctcgcggcagccgcgaccgcctga

SEQ ID NO: 28719 - protein, 577 aa, Zea mays
MITVAAPEAQPQVAAAAAAVAAPEETVFRSKLPDIDIPTHLPLHDYCFSRAAEAAGAPCLIAAATGRTYTYAETRLLCRKAAACLHGLGVAQGDRVMLLLQNSVEFVLAFFGASFLGAVTTAANPFCTPQEIHKQFSASGAKVVVTHSAYVAKLRHDAFPRIGTASGGGGVDGNALLTVLTIDGDAADTPEGCLAFWELLTSGDGDALPEVSISPDDPVALPFSSGTTGLPKGVVLTHGGQVTNVAQQVDGANPNLYMREGDVALCVLPLFHIFSLNSVLLCAMRAGAAVMLMPKFEMGAMLEGIQRWRVTVAAVVPPLVLALAKNPALEKYDLSSIRIVLSGAAPLGKDLVDALRARVPQAVFGQGYGMTEAGPVLSMCPAFAKEPAPAKPGSCGTVVRNAELKVVDPDTGLSLGRNLPGEICIRGPQIMKGYLNDPEATARTIDVHGWLHTGDIGYVDDDDEVFIVDRVKELIKFKGFQVPPAELEALLVAHPSIADAAVVPQKDEAAGEVPVAFVVRAADADIAEDAIKEFISKQVVFYKRLHKVYFTPSIPKSASGKILRRELRAKLAAAATA

SEQ ID NO: 28720 - DNA, 1683 bp, Zea mays
  CDS (1)..(1683)
atggacggatccatgtggtgcgctgccaactacgtgcctctgacgccgctcagcttcctggagcgcgccgcggtcgtgtacggcgaccgcgcggccgtcgtttgcggcgataggcggttctcgtggcgcgagacgagggagcggtgcctcgccggggcagccgctctcgctcgtctcggcgttggccgccgcgacgtggtcgcggtcatcgcctcgaacgtaccggcgatgtacgagctccatttcagcgtgccgatgaccggcgccgtcctgtgcacgctcaacacccgccacgacgcggccatggtgtccgtcctgctgaaacactcggaagccaaggtcttcctcgtggagtcgcagttccacgccgtggcccgcgacgcgctcaggctcctcgccgacgccaaagacaggcttcctctcgtcatcacggtttctgaccccagcagcagcagcagcaccggcggcggctgcggcagcaacgacggcagcgtcgcggtcgcggagtacgaagcgcttctgcggagcgcgccgcgcgacttcgaaatccggtggccggccgacgagcgcgacccgatatcgctgaactacacgtcgggcaccacgtcgaggcccaagggcgtcatctacagccaccgcggcgcgttcctcaacacgctggccacggtgctcgtcaacgagatggcgaccatgcccgtgtacctctggaccgtgcctatgttccactgcaacgggtggtgcatggtgtgggccaccgcggcgcagggcggcacgagcgtctgcatcggcagcgtgtcccccggggtggtcttcgaccacatcgtgcgccacggcgtcaccaacatgggcggagcgcccacggtgctcagcatgctcgcgaacgcgccggcggcggagcggaagctgctgccgaggagggtccgcatctccacgggcggcgcgccgccgccgccgcaggtgctggccaagatggacgagctcggcttcgacgtcgcgcacgggtacgggctcaccgagacgtacggcccggcgacgacgtgcgtgtggaaacccgagtgggacgcgctgccgcccgcggagcgcgcccggatgaaggcgctgcagggcgtcgctcacgccatggtccaggaggtcgccatcaaggacccggcgagcatggagacgttgccctccgacgggcgcgccgtgggcgaggtgatgctccgggggaacacggtcatgggcgggtactacaaggacgcggcggccacggaggaggccatgcgcggcgggtggctgcgcacgggcgacctcggcgtgcgccacccgaacgggtacatccagctcaaggaccggtccaaggacatcatcatctcgggcggcgagaacatcagctccatcgaggtggagtcggtgctgttcgggcaccccgcggtgctcgacgccgcggtggtcgcgcggcccgacgaccactggggcgaggcgccgtgcgcgttcgtcacgctcagggacggcgcgagagccaccgcggacgacatcatccgcttctgccgggctcggctgccgcactacatggcgcccaggacggtggtgttcagcgacctccccaagacttcgaccggcaagacgcagaagtatctgctccgggaaaaggcgagggccatgggaagcctgcgcaagccagatcgaagcaggcttagttga

SEQ ID NO: 28721 - protein, 560 aa, Zea mays
MDGSMWCAANYVPLTPLSFLERAAVVYGDRAAVVCGDRRFSWRETRERCLAGAAALARLGVGRRDVVAVIASNVPAMYELHFSVPMTGAVLCTLNTRHDAAMVSVLLKHSEAKVFLVESQFHAVARDALRLLADAKDRLPLVITVSDPSSSSSTGGGCGSNDGSVAVAEYEALLRSAPRDFEIRWPADERDPISLNYTSGTTSRPKGVIYSHRGAFLNTLATVLVNEMATMPVYLWTVPMFHCNGWCMVWATAAQGGTSVCIGSVSPGVVFDHIVRHGVTNMGGAPTVLSMLANAPAAERKLLPRRVRISTGGAPPPPQVLAKMDELGFDVAHGYGLTETYGPATTCVWKPEWDALPPAERARMKALQGVAHAMVQEVAIKDPASMETLPSDGRAVGEVMLRGNTVMGGYYKDAAATEEAMRGGWLRTGDLGVRHPNGYIQLKDRSKDIIISGGENISSIEVESVLFGHPAVLDAAVVARPDDHWGEAPCAFVTLRDGARATADDIIRFCRARLPHYMAPRTVVFSDLPKTSTGKTQKYLLREKARAMGSLRKPDRSRLS

SEQ ID NO: 28722 - DNA, 1653 bp, Zea mays
  CDS (1)..(1653)
atggcggcccggccggacgcgcgcagcggctactgcgccgcgacgcgcaccttccgtagcaagcgcgcggacgtcccgctccccgccgacgcggacctggacgtcgtcaggttcctcgcgtcccgccgccacgcgggcgtcgtcgcgctcgtcgacgctgccacgggccaccgggtcacgttccaggaactctggcgcgcggtggaaggggcggccaccgcgctcgccgcaccgccgctgtcgctccgcaagggccagatcgcgctcatcctctccccgaactccgtccacttccccgtcgccgccctcgcagccatgtccctcggcgccgtcctcaccaccgccaacccgctcaacacgcccgccgagatcgccaagcaggtcgccgacgcgcgccccgtcgtcgccttcaccacccgcgacctcctccccctcccgcgcgccggcgccggcgccggcatccgcgtcgtcctcctcgagcccgaccgcctcccctccgaccctagccccgtcgtcgccaccatcggggagatctccgccacgccgcccgaccccacgcgccgccgggaccgcgtcacgcaggacgacccggccacgctgctctactcctcgggcaccacggggcccagcaagggcgtcgtcgccacacaccggagcctcatctccatggtgcagatcatcatgtcgcgcttccgcctcgaggcctccgacaggaccgagaccttcctctgcacggtgcccatgttccacgtctacggcctcgtcgccttcgccacggggctgctcggctgcggcgccaccatcgtcgtgctctccaagtacgagctccccgagatgctgcgcgccatcaacgaatacggggtcacctacctcccactcgtgccgcccatcctcgtcgccatgctggcgcaccccaaccgcctgccgctcgggggcctgcgcaaggtgctctccggcggagcgccgctcagcaaggagctgatcgaggggtttaaggagaaatacccgcaggtggagatccttcaggggtacgggctgacggagagcacggctatcggcgcgtccacggactctgccgaggagagcagccggtacggcacggctgggctgctgtcgccaagcaccgaggctaagatcgtcgacccagagaccggcgaggcgctgccggtgaaccgcaccggcgagctctggatccgggggccatacgtcatgaaagggtatttcaagaacgcggaggcaacacaatcaacattgacacctgatggatggctcaagactggggatctctgctacatagatgaggatggttatctcttcgttgtggatcgtctgaaggagttgatcaaatacaaagggtaccaggtgcctccggcagagttggaagctcttttgctaacacatccagaaatcgaagatgtcgccgttataccgtttcccgaccgtgaggtcggccagttcccaatggcctacgtagtgaggaagaaagggagcaatttgtcagagcgcgaggtgatggagttcgttgcgaaacaggtagcgccttacaagaaggttaggaaggtggcgtttgtggcggagattcccaagaacgcgtccggcaagattctgaggaaggatctcatcaagctcgccacatccaaatccaaactatga

SEQ ID NO: 28723 - protein, 550 aa, Zea mays
MAARPDARSGYCAATRTFRSKRADVPLPADADLDVVRFLASRRHAGVVALVDAATGHRVTFQELWRAVEGAATALAAPPLSLRKGQIALILSPNSVHFPVAALAAMSLGAVLTTANPLNTPAEIAKQVADARPVVAFTTRDLLPLPRAGAGAGIRVVLLEPDRLPSDPSPVVATIGEISATPPDPTRRRDRVTQDDPATLLYSSGTTGPSKGVVATHRSLISMVQIIMSRFRLEASDRTETFLCTVPMFHVYGLVAFATGLLGCGATIVVLSKYELPEMLRAINEYGVTYLPLVPPILVAMLAHPNRLPLGGLRKVLSGGAPLSKELIEGFKEKYPQVEILQGYGLTESTAIGASTDSAEESSRYGTAGLLSPSTEAKIVDPETGEALPVNRTGELWIRGPYVMKGYFKNAEATQSTLTPDGWLKTGDLCYIDEDGYLFVVDRLKELIKYKGYQVPPAELEALLLTHPEIEDVAVIPFPDREVGQFPMAYVVRKKGSNLSEREVMEFVAKQVAPYKKVRKVAFVAEIPKNASGKILRKDLIKLATSKSKL

SEQ ID NO: 28724 - DNA, 1668 bp, Zea mays
  CDS (1)..(1668)
atggccgcgccgcgcccgtccggcgggatggacccgcgcagcggcttctgcgccgcgacgcggaccttccatagcctgcgcccgtccgccgcgctcccgccggactcgctcccggccaccgcggccgcctacgctttctccatcctctcctccccgctacccgatcgccccgccctcgtcgacgctgccaccagcatttccgtctcctacccctcgttcctcgccgccgtccgctccctcgcggggggcctctggtccgttctcggtctccgccccggggacgtcgtcctcgtagtctccccgtcccgcatcgacggccccgtcatagacttcgcgctcatgtccatcggcgctgtcgtctcgcctgccaacccggcgtccaccgccgaggagtacacgcacatgggcgcgctctccagaccggtcgtcgcgctcgcggctcccgaggtggccgctaagcttccgaggaacctcaggtgcgttgtcatcggctcgaatgagtacaagagcctctcctccgccggcggtgtagcgccgtccccgccggtggcggtgaagcagtccgacacggcggccgtactgtactcgtcgggcaccacgggtcgggtcaaggccgccgcggtctcgcaccgcaacctcatcgcggtgatcagcgcgcacaggaacaaccgggttatagcggagaaggaggctgccgaggccggcgaggagccgctcccgcctacggtgacgctgttccccctcccactcttccacgtattcgggttcatgatgctgctgaggtcggtggccatgggggagactgccgtcctcatggaccgattcgacttcatcgcagcgctgcgcgccatcgagcggtaccgcgtcacgctgctgcccgcggcgcccccggtgctggtggccatgatcaagtccgaggaggcgcgccgttgcgacctctcctccctcctcttcatcggcatcggcggcgcgcccctcggccgcgaggtcgccgagcgcttcgccgccatcttccccaacatagaactcattcagggctacggtctgacggagacatctggttcggtggcttcgacggtcgggccagatgagtgcaaagcgtacggttcggtcgggaagctggcatcgcacttggaggcgaagatcgtcgatccctccaccggcgaggcgcttgggccagggcagcgcggcgagctctgggtccgaggaccagtcgtcatgaaaggttatgtcggtgacgacgaggctactgcagcaacagtggattcagaaggctggttgaaaaccggtgacctatgctacttcaacgaggatgggttactctacattgttgatcggttgaaagagttgataaagtacaagggatatcaggtacctcctgccgaactggagcatatcctgaattctcatcctgatatcatggacgcagcagttattccttatccagacgaagacgccgggcaactcccaatggcttttatagtgaggaaaccagggtcaaaccttaccgagcaacaagtcatggatttcgtggctaaacaggtcgcaccctacaagaaagttcgtcgagtggcctttgtttctgcaatccccaaatcgcctgctgggaagatcttgcggcgggagcttgtagagcaggccgtgtccatgggtacctccaagctttga

SEQ ID NO: 28725 - protein, 555 aa, Zea mays
MAAPRPSGGMDPRSGFCAATRTFHSLRPSAALPPDSLPATAAAYAFSILSSPLPDRPALVDAATSISVSYPSFLAAVRSLAGGLWSVLGLRPGDVVLVVSPSRIDGPVIDFALMSIGAVVSPANPASTAEEYTHMGALSRPVVALAAPEVAAKLPRNLRCVVIGSNEYKSLSSAGGVAPSPPVAVKQSDTAAVLYSSGTTGRVKAAAVSHRNLIAVISAHRNNRVIAEKEAAEAGEEPLPPTVTLFPLPLFHVFGFMMLLRSVAMGETAVLMDRFDFIAALRAIERYRVTLLPAAPPVLVAMIKSEEARRCDLSSLLFIGIGGAPLGREVAERFAAIFPNIELIQGYGLTETSGSVASTVGPDECKAYGSVGKLASHLEAKIVDPSTGEALGPGQRGELWVRGPVVMKGYVGDDEATAATVDSEGWLKTGDLCYFNEDGLLYIVDRLKELIKYKGYQVPPAELEHILNSHPDIMDAAVIPYPDEDAGQLPMAFIVRKPGSNLTEQQVMDFVAKQVAPYKKVRRVAFVSAIPKSPAGKILRRELVEQAVSMGTSKL

SEQ ID NO: 28726 - DNA, 1671 bp, Zea mays
  CDS (1)..(1671)
atgggttccgtagacgcggcgatcgcggtgccggtgccggcggcggaggagaaggcggtggaggagaaggcgatggtgttccggtccaagctccccgacatcgagatcgacagcagcatggcgctgcacacctactgcttcgggaagatgggcgaggtggcggagcgggcgtgcctgatcgacgggctgacgggcgcgtcgtacacgtacgcggaggtggagtccctgtcccggcgcgccgcgtcggggctgcgcgccatgggggtgggcaagggcgacgtggtgatgagcctgctccgcaactgccccgagttcgccttcaccttcctgggcgccgcccgcctgggcgccgccaccaccacggccaacccgttctacaccccgcacgaggtgcaccgccaggcggaggcggccggcgcccggctcatcgtgaccgaggcctgcgccgttgaagaaggtgcgggagttcgcggcggagcgggggcattccccgtggtcaccgtcgacgggcgcttcgacggctgcgtggagttcgccgagctgatcgcggccgaggagctggaggctgacgccgacatccaccccgacgacgtcgtcgcgctgccctactcctccggcaccaccgggctgcccaagggcgtcatgctcacccaccgcagcctcatcaccagcgtcgcgcagcaggttgatggcgagaacccgaacctgtacttccgcaaggacgacgtggtgctgtgcctgctgccgctgttccacatctactcgctgaactcggtgctgctggccggcctgcgcgcgggctccaccatcgtgatcatgcgcaagttcgacctgggcgcgctggttgacctggtgcgcaggtacgtgatcaccatcgcgcccttcgtgccgcccatcgtggtggagatcgccaagagcccccgcgtgaccgccggcgacctcgcgtccatccgcatggtcatgtccggcgccgcgcccatgggcaaggagctccaggacgccttcatggccaagatccccaatgccgtgctcgggcaggggtacgggatgacggaggcaggccccgtgctggcgatgtgcctggccttcgccaaggagccgtacccggtcaagtccgggtcgtgcggcaccgtggtgcggaacgcggagctgaagatcgtcgaccccgacaccggcgccgccctcggccggaaccagcccggcgagatctgcatccgcggggagcagatcatgaaaggttacctgaacgaccccgagtcgacgaagaacaccatcgacaaggacggctggctgcacaccggagacatcggctacgtggacgacgacgacgagatcttcatcgtcgacaggctcaaggagatcatcaagtacaagggcttccaggtgccgccggcggagctggaggcgctcctcatcacgcacccggagatcaaggacgccgccgtcgtatcaatgaacgatgaccttgctggtgaaatcccggtcgccttcatcgtgcggaccgaaggttctcaagtcaccgaggatgagatcaagcaattcgtcgccaaggaggtggttttctacaagaagatccacaaggtcttcttcaccgaatccatccccaagaacccgtcgggcaagatcctgaggaaggacttgagagccaggctcgccgccggtgttcactga

SEQ ID NO: 28727 - protein, 556 aa, Zea mays
MGSVDAAIAVPVPAAEEKAVEEKAMVFRSKLPDIEIDSSMALHTYCFGKMGEVAERACLIDGLTGASYTYAEVESLSRRAASGLRAMGVGKGDVVMSLLRNCPEFAFTFLGAARLGAATTTANPFYTPHEVHRQAEAAGARLIVTEACAVEEGAGVRGGAGAFPVVTVDGRFDGCVEFAELIAAEELEADADIHPDDVVALPYSSGTTGLPKGVMLTHRSLITSVAQQVDGENPNLYFRKDDVVLCLLPLFHIYSLNSVLLAGLRAGSTIVIMRKFDLGALVDLVRRYVITIAPFVPPIVVEIAKSPRVTAGDLASIRMVMSGAAPMGKELQDAFMAKIPNAVLGQGYGMTEAGPVLAMCLAFAKEPYPVKSGSCGTVVRNAELKIVDPDTGAALGRNQPGEICIRGEQIMKGYLNDPESTKNTIDKDGWLHTGDIGYVDDDDEIFIVDRLKEIIKYKGFQVPPAELEALLITHPEIKDAAVVSMNDDLAGEIPVAFIVRTEGSQVTEDEIKQFVAKEVVFYKKIHKVFFTESIPKNPSGKILRKDLRARLAAGVH

SEQ ID NO: 28728 - DNA, 1749 bp, Zea mays
  CDS (1)..(1749)
atgggttccacttccacggggccggtgagcgggttcgcggcgccggagcgggacatcgacgatctgccgcggaacgacgccaactacacggcgctcacgccgctctggttcctcgagcgcgcggcgctggcgcatccgggcagggcctccgtcgtgcacggccccgtgcgctacacctgggctgacacctatcgccgctgccgccgcctcgcatccgccctcgcgcgcctatccgtcggccacggaagcacggttgctgtgatagctcctaatgtcccagccgtctatgaagctcacttcggtgtcccaatgtcaggagctgttgtgaactgcgtcaatattcggctaaacgccgagacaatagcattcctccttgaacactccgtggcagaagttgtgatggtggaccaagaattcttcaccctagccgaagaatcgctgaaaataattggcaagaagaagacatcggctttcaggcggcctccaatcttgatcgtcatcggcgacccgacctgtgatcccaagtctctacagcatgctctgggaaagggagctatagagtatgaagagtttctgaaaaccggtgacccggagttcagttggaagccaccgaaggacgaatggcagagcatcgccctaggctacacttctgggactacttccagcccaaagggcgtcgtgttgcatcaccgcggtgcttatctcatggcactcagcgttgccatcgtgtgggggatgcctgaaggggctgtctacctgtggactctgcccatgttccattgcaatggttggtgctacacttgggcgctggcagcgttctgcggaacaagcatatgtcttcgccaggtgagcacaaaagctatatacgaaggcatcaccaagcaaggagtgacgcacttctgtgccgcacctgtcgtccttaacaacctgatcaacgctccggcaagcgagaccttcctgccgctgccccgcgtcgtcaatgtcaacgtggccggagccgccccgacgccgtccctgctgggcgcgctgtccatccgtgggttccgcgtcacgcacacgtacggcctgtcagagacgtacggtccctcgacggtgtgcgcgtggaagcccgagtgggacgagctgccgctggaggagcggtcccggctgcactgccgacagggcgtcaggtacatcgcgatggagggcctggacgtcgtggaccccaagacgatggcgcccgtcccggccgacggcaagtcgtacggcgagatcgtgctgcggggcaacgccgtgatgaaggggtacctcaagaaccccggggcgaacgcggaggcgttcgcgggcgggtggtaccactcgggcgacctcggcgtgaagcaccccgacgggtacgtcgaggtgagggaccggatgaaggacgtgatcatctccggaggggagaacatcagcagcctggaggtcgagaaggtgctgtgcgcgcacccggcagtgttcgaggtatcggtggtcgccagggccgacgagcggtggggcgagtcgccgtgcgcgttcgtgacgctcaaggacggagcagcagccgacgggtcggacgaggcggcgctggccaacgacatcatgcgcttctgccgggagaggatgccggggtactgggtgcccaagtcggtcatcttcgggccgctgcccaagacggccacggggaagatcaagaagcacgagctgagggccagggccaaagagctcggccctgtgaagaagagcaggatgtga

SEQ ID NO: 28729 - protein, 582 aa, Zea mays
MGSTSTGPVSGFAAPERDIDDLPRNDANYTALTPLWFLERAALAHPGRASVVHGPVRYTWADTYRRCRRLASALARLSVGHGSTVAVIAPNVPAVYEAHFGVPMSGAVVNCVNIRLNAETIAFLLEHSVAEVVMVDQEFFTLAEESLKIIGKKKTSAFRRPPILIVIGDPTCDPKSLQHALGKGAIEYEEFLKTGDPEFSWKPPKDEWQSIALGYTSGTTSSPKGVVLHHRGAYLMALSVAIVWGMPEGAVYLWTLPMFHCNGWCYTWALAAFCGTSICLRQVSTKAIYEGITKQGVTHFCAAPVVLNNLINAPASETFLPLPRVVNVNVAGAAPTPSLLGALSIRGFRVTHTYGLSETYGPSTVCAWKPEWDELPLEERSRLHCRQGVRYIAMEGLDVVDPKTMAPVPADGKSYGEIVLRGNAVMKGYLKNPGANAEAFAGGWYHSGDLGVKHPDGYVEVRDRMKDVIISGGENISSLEVEKVLCAHPAVFEVSVVARADERWGESPCAFVTLKDGAAADGSDEAALANDIMRFCRERMPGYWVPKSVIFGPLPKTATGKIKKHELRARAKELGPVKKSRM

SEQ ID NO: 28730 - DNA, 1704 bp, Zea mays
  CDS (1)..(1704)
atggcggcggagcgggacatcgacgacctgccgcggaacgacgccaactacacggcgctcacgccgctctggttcctcgagcgcgccgcgctgacccacccggccagggcctccgtcgtgcacgggcccgtgcgctacacctgggccgacacctacagccgctgccgccgcctcgcctccgccctcgcgcgcagatccgtcggccacggaagcacggtagctgtaatagccccaaacatccccgcgatctatgaagctcattttggagtgcccatggctggggcagtggtcaactgtgtcaacattcgactaaatgctgccactgtagcatttctcttggagcactcctcagcagaagttgtcatggttgaccaagaatttttcaccctggcagaggattctttgaggattatcgcagataaaaagaaaggcacttttgaacagccacttctaatagttattggtgacgcaacttgcgatccaacaaccctccaagacgctttgagaaaaggagccatcgattatgaggcattcttggaaagtggagatcctgaatttgcttggagaccaccacaggatgaatggaagagtatcgcgctaggttatacttctgggacaacttctaacccaaagggtgtggtattgcatcacaggggggcttacctaatgtcactgagtggtgctttgatatggggaatgaacgaaggcgctgtttacttgtggactttgccaatgttccattgcaacggttggtgctatacatggacacttgctgctctctgcgggacaagcatatgtcttcgtcaggtttcagcgaaggccatcttctcagctatagccaacgagggcgtgactcacttctgtggggcaccggtcgtcctgaacaccatcatcaacgcccctccagccgacacgattctccccctacctcgtgtcgtcaacgtcatgaccgctggcgctgctccgccaccctctgtcctggcggcaatgtcgaagcttgggttccgcatcactcacacctacggcctgtcggagacctatggaccatccacggtgtgcgcctggaagccggaatgggacaggctgccagccgacgagcgcgcccggctccacgcgcgtcagggcgtccgttacgtgggcctggagggcctggacgtggtggacccgaagacgatgacgccggtcccggccgacggcaccacgatgggggagatcgtgatgcgcgggaacggcgtcatgaaggggtacctgaagaacccggaggcgaacgcggaggcgttcgagaacgggtggttccactcgggcgacctgggcgtgcggcacggcgacgggtacgtcgaggtgagggaccgcgccaaggacatcatcatctccggcggggagaacatcagcagcctggaggtggagaaggcggtgtacctgcacccggcggtgctggaggcgtcggtcgtggcccgcgccgacgagcggtggggggagtcgccgtgcgcgttcgtgacgctcaaggacgccgtggaccgctccgacgaggcggcgctggcgcgggacatcatgcggttctgccgcgagaagctgcccggttactgggtgcccaagtccgtggtgttcgggccgctgcccaagacagcgaccggcaagatcaagaagcatgagctcagggccaaggccaaggaactgggcccggtcgggaagagcaggatgtga

SEQ ID NO: 28731 - protein, 567 aa, Zea mays
MAAERDIDDLPRNDANYTALTPLWFLERAALTHPARASVVHGPVRYTWADTYSRCRRLASALARRSVGHGSTVAVIAPNIPAIYEAHFGVPMAGAVVNCVNIRLNAATVAFLLEHSSAEVVMVDQEFFTLAEDSLRIIADKKKGTFEQPLLIVIGDATCDPTTLQDALRKGAIDYEAFLESGDPEFAWRPPQDEWKSIALGYTSGTTSNPKGVVLHHRGAYLMSLSGALIWGMNEGAVYLWTLPMFHCNGWCYTWTLAALCGTSICLRQVSAKAIFSAIANEGVTHFCGAPVVLNTIINAPPADTILPLPRVVNVMTAGAAPPPSVLAAMSKLGFRITHTYGLSETYGPSTVCAWKPEWDRLPADERARLHARQGVRYVGLEGLDVVDPKTMTPVPADGTTMGEIVMRGNGVMKGYLKNPEANAEAFENGWFHSGDLGVRHGDGYVEVRDRAKDIIISGGENISSLEVEKAVYLHPAVLEASVVARADERWGESPCAFVTLKDAVDRSDEAALARDIMRFCREKLPGYWVPKSVVFGPLPKTATGKIKKHELRAKAKELGPVGKSRM

SEQ ID NO: 28732 - DNA, 1668 bp, Zea mays
  CDS (1)..(1668)
atggcccgcaccgcggcgccggccgcgggctacggagaggacggagtgtaccgctccccgcgcccggccgtgcgcatcgagtccgacacaggcctctccctcaacgacctcctcttccgccgcgccgacgtgtgcccctccgctctcgcgctggtcgactccgccaccggccaatccctcaccttcgccgcctttcgctccgccgtcctcaccacggccgtcgccctctcctcgcgcgcgggcgtccggcgcggcgacgtcgtcctcttcttcgcccccaactgcttcctctaccccgtctgcttcttcgccgtcaccgccctcggcgccgtcgctaccacggccaaccccctctacacccctcgggaggtcgctaaacaggccaccgactcgcgggccaagctcgcaatcacggtctctgaactccttcccaaaatcgtggacctcggcttccccaccatcctgctcgacggcggcggcgacggcgacgcggccagtgccgccgcctccaagcctcagggagccagcgtgacgctttactcagacctcgtttccggggcgcgggagacggagtaccgccgcccgccgacgaagcagagcgacacgaccgcgctgatgtactcgtccggcacgacgggggcgagcaagggcgtaatcctgacacaccgcaacttcatctcggcggcggccatgatgacagcggaccaggacgcgctcggagaggggcccaacgtcttcctctgcttcctgcccatgttccacatcttcggcttgtccgtcatcacgttcgcgcagatgcagcgtggcaattccgtcgtcgtgatgtcgcggtttgacatggactctgtgatggccgcggtgcagcggcaccgtgtcactcacctcttctgcgtgccgccggtcatgatagcgctcgccaagctcgggagcgttgggaaatatgacctcagctcgctcaggttcatcggctctggcgcagcaccgctcggcaaggacgtgatggagggagtggccaagaattttccagaagctgtgattgcccagggttacggaatgactgaaacttgtgggatcatatctttagagtacccagaaaaaggacaaattcgtcaatttggttcaactggagcacttgtctcaggagttgaagcaaaaattgttgatgtagaaacattgatatgtctgccaccaaatcaactaggagaaatttgtgttcgaggaccgaacataatgcaagggtatttcaacaatgtgcaagctactgaatttacaatcaagcaagggtggttgcatactggtgatattggatactttgatgagggaggtcagcttttcgtagttgatagacttaaagaactgattaagtacaaaggttttcagattgcacctgccgagcttgaagggctacttctgtctcatccagaaattctggatgctgttgttatcccgttccccgatgctgaagctggtgaagttcctattgcttacgtcgtaaggtcctctgagagttctttgactgaagttgatgtccagaaatttattgaaaagcaggtcgcatactacaaaaaattgaggagggtgacctttgtggacagcgtaccaaaatctgcttcagggaagatcttgagaagagaactcatctctaaagtcagatcatccaagctatag

SEQ ID NO: 28733 - protein, 555 aa, Zea mays
MARTAAPAAGYGEDGVYRSPRPAVRIESDTGLSLNDLLFRRADVCPSALALVDSATGQSLTFAAFRSAVLTTAVALSSRAGVRRGDVVLFFAPNCFLYPVCFFAVTALGAVATTANPLYTPREVAKQATDSRAKLAITVSELLPKIVDLGFPTILLDGGGDGDAASAAASKPQGASVTLYSDLVSGARETEYRRPPTKQSDTTALMYSSGTTGASKGVILTHRNFISAAAMMTADQDALGEGPNVFLCFLPMFHIFGLSVITFAQMQRGNSVVVMSRFDMDSVMAAVQRHRVTHLFCVPPVMIALAKLGSVGKYDLSSLRFIGSGAAPLGKDVMEGVAKNFPEAVIAQGYGMTETCGIISLEYPEKGQIRQFGSTGALVSGVEAKIVDVETLICLPPNQLGEICVRGPNIMQGYFNNVQATEFTIKQGWLHTGDIGYFDEGGQLFVVDRLKELIKYKGFQIAPAELEGLLLSHPEILDAVVIPFPDAEAGEVPIAYVVRSSESSLTEVDVQKFIEKQVAYYKKLRRVTFVDSVPKSASGKILRRELISKVRSSKL

SEQ ID NO: 28734 - DNA, 20 bp, Artificial sequence
  primer
atgtcgatcttcgaacaggg

SEQ ID NO: 28735 - DNA, 21 bp, Artificial sequence
  primer
ttagagcgccctggccctgtc

SEQ ID NO: 28736 - protein, 697 aa, Artificial sequence
  consensus sequence
  Variant (2)..(9): Xaa in position 2 to 9 is any amino acid
  Variant (10)..(39): Xaa in position 10 to 39 is any or no amino acid
  Variant (41)..(43): Xaa in position 41 to 43 is any amino acid
  Variant (44)..(45): Xaa in position 44 to 45 is any or no amino acid
  Variant (47)..(52): Xaa in position 47 to 52 is any amino acid
  Variant (53)..(60): Xaa in position 53 to 60 is any or no amino acid
  Variant (62)..(62): Xaa in position 62 is any amino acid
  Variant (64)..(66): Xaa in position 64 to 66 is any amino acid
  Variant (67)..(68): Xaa in position 67 to 68 is any or no amino acid
  Variant (70)..(133): Xaa in position 70 to 133 is any amino acid
  Variant (134)..(202): Xaa in position 134 to 202 is any or no amino acid
  Variant (207)..(208): Xaa in position 207 to 208 is any amino acid
  Variant (213)..(214): Xaa in position 213 to 214 is any amino acid
  Variant (215)..(215): Xaa in position 215 is any or no amino acid
  Variant (217)..(230): Xaa in position 217 to 230 is any amino acid
  Variant (231)..(262): Xaa in position 231 to 262 is any or no amino acid
  Variant (264)..(264): Xaa in position 264 is any amino acid
  Variant (267)..(276): Xaa in position 267 to 276 is any amino acid
  Variant (277)..(280): Xaa in position 277 to 280 is any or no amino acid
  Variant (282)..(304): Xaa in position 282 to 304 is any amino acid
  Variant (305)..(321): Xaa in position 305 to 321 is any or no amino acid
  Variant (323)..(356): Xaa in position 323 to 356 is any amino acid
  Variant (357)..(394): Xaa in position 357 to 394 is any or no amino acid
  Variant (397)..(397): Xaa in position 397 is any amino acid
  Variant (400)..(432): Xaa in position 400 to 432 is any amino acid
  Variant (433)..(481): Xaa in position 433 to 481 is any or no amino acid
  Variant (484)..(487): Xaa in position 484 to 487 is any amino acid
  Variant (489)..(492): Xaa in position 489 to 492 is any amino acid
  Variant (493)..(493): Xaa in position 493 is any or no amino acid
  Variant (495)..(495): Xaa in position 495 is any amino acid
  Variant (496)..(500): Xaa in position 496 to 500 is any or no amino acid
  Variant (502)..(513): Xaa in position 502 to 513 is any amino acid
  Variant (514)..(533): Xaa in position 514 to 533 is any or no amino acid
  Variant (535)..(537): Xaa in position 535 to 537 is any amino acid
  Variant (540)..(547): Xaa in position 540 to 547 is any amino acid
  Variant (548)..(568): Xaa in position 548 to 568 is any or no amino acid
  Variant (570)..(570): Xaa in position 570 is any amino acid
  Variant (572)..(573): Xaa in position 572 to 573 is any amino acid
  Variant (575)..(575): Xaa in position 575 is any amino acid
  Variant (576)..(577): Xaa in position 576 to 577 is any or no amino acid
  Variant (579)..(583): Xaa in position 579 to 583 is any amino acid
  Variant (584)..(584): Xaa in position 584 is any or no amino acid
  Variant (586)..(586): Xaa in position 586 is any amino acid
  Variant (588)..(589): Xaa in position 588 to 589 is any amino acid
  Variant (591)..(592): Xaa in position 591 to 592 is any amino acid
  Variant (595)..(599): Xaa in position 595 to 599 is any amino acid
  Variant (602)..(607): Xaa in position 602 to 607 is any amino acid
  Variant (608)..(618): Xaa in position 608 to 618 is any or no amino acid
  Variant (621)..(623): Xaa in position 621 to 623 is any amino acid
  Variant (625)..(655): Xaa in position 625 to 655 is any amino acid
  Variant (656)..(687): Xaa in position 656 to 687 is any or no amino acid
  Variant (690)..(694): Xaa in position 690 to 694 is any amino acid
  Variant (695)..(696): Xaa in position 695 to 696 is any or no amino acid
AXXXXXXXXXXXXXXXXXXXXXXXXXXXXXXXXXXXXXXVXXXXXNXXXXXXXXXXXXXXGXAXXXXXNXXXXXXXXXXXXXXXXXXXXXXXXXXXXXXXXXXXXXXXXXXXXXXXXXXXXXXXXXXXXXXXXXXXXXXXXXXXXXXXXXXXXXXXXXXXXXXXXXXXXXXXXXXXXXXXXXXXXXXXXXXXXXXXXXXXXXSGTTXXPKGVXXXHXXXXXXXXXXXXXXXXXXXXXXXXXXXXXXXXXXXXXXXXXXXXXXPXFHXXXXXXXXXXXXXXGXXXXXXXXXXXXXXXXXXXXXXXXXXXXXXXXXXXXXXXXPXXXXXXXXXXXXXXXXXXXXXXXXXXXXXXXXXXXXXXXXXXXXXXXXXXXXXXXXXXXXXXXXXXXXXXXXYGXTEXXXXXXXXXXXXXXXXXXXXXXXXXXXXXXXXXXXXXXXXXXXXXXXXXXXXXXXXXXXXXXXXXXXXXXXXXXXXXXXXXXGEXXXXGXXXXXGXXXXXXYXXXXXXXXXXXXXXXXXXXXXXXXXXXXXXXXWXXXGDXXXXXXXXXXXXXXXXXXXXXXXXXXXXXRXKXXIXXXGXXXXXXEXEXXLXXHPXXXXXAVXXXXXXXXXXXXXXXXXGEXXXAXXXXXXXXXXXXXXXXXXXXXXXXXXXXXXXXXXXXXXXXXXXXXXXXXXXXXXXXXXXXXXXGKXXXXXXXL

SEQ ID NO: 28737 - protein, 10 aa, Artificial sequence
  protein pattern
  Variant (5)..(5): Xaa in position 5 is Ala, Gly or Ser
  Variant (6)..(6): Xaa in position 6 is any amino acid
  Variant (7)..(7): Xaa in position 7 is Pro or Ser
  Variant (9)..(9): Xaa in position 9 is Ala or Gly
  Variant (10)..(10): Xaa in position 10 is Ala, Cys, Thr or Val
SGTTXXXKXX

SEQ ID NO: 28738 - DNA, 777 bp, Azotobacter vinelandii
  CDS (1)..(777): transl_table=11
atgagctacgagaacctgctgctggaaatgcacggcaaggtcgccctgatcaccctcaaccgcccgcaggccctgaacgccctgtcgccggcgctgaccgccgaactgagcgccctgctcgatgcgctggagaccgacgacggggtcgccgcggtggtcctcaccggcagcgagaaggccttcgccgccggcgccgacatcaaggcgatgaaggactggggctatatggacgtctacaagtccgacttcatcaccgccacctgggagcgcctggccagcttccgcaagccgagcatcgccgcggtggccggctacgccctgggcggcggctgcgagctggcgatgatgtgcgacttcatcatcgccgccgacagcgccaggttcggccagccggaaatcaccatcggcaccattcccggcgccggcggcacccagcgcctgacccgcttcatcggcaagtccaaggccatggacatggtcctcaccgggcgcctgatggacgcccaggaggccgagcgctgcggtctggtcagccgcctggtgccggccgaccggctgatcgaggaagccctcgccgccgcgaccaagatcgcccagatgtccgcgcccatcgccatgatggccaaggaatcggtcaaccgcgccttcgagacgcctctcgccgagggcatccgcttcgagcgccggctgttccatgccaccttcgccaccgaggatcgccgggagggcatggccgccttcgtcgagaagcgcaagcccgacttcaaggatcgctga

SEQ ID NO: 28739 - protein, 258 aa, Azotobacter vinelandii
MSYENLLLEMHGKVALITLNRPQALNALSPALTAELSALLDALETDDGVAAVVLTGSEKAFAAGADIKAMKDWGYMDVYKSDFITATWERLASFRKPSIAAVAGYALGGGCELAMMCDFIIAADSARFGQPEITIGTIPGAGGTQRLTRFIGKSKAMDMVLTGRLMDAQEAERCGLVSRLVPADRLIEEALAAATKIAQMSAPIAMMAKESVNRAFETPLAEGIRFERRLFHATFATEDRREGMAAFVEKRKPDFKDR

SEQ ID NO: 28740 - DNA, 1166 bp, Brassica napus
  CDS (72)..(977)
gaattcccgggtcgacttcgctgtcgacgatttcgtacaaaatcaaaactttggagtaagagacggtgaagatgagctttgtcaagtatctccgccgtgatagtttgctccagttagccggaaaacgatcccttagccgaagttgcatgcttcagacctgccggactctcatcattgaaaccgccccgcctgaatctgtcaagcttaaccgtctctctggttccgattctgggattgtcgaggtcaatctagacaggtctgtggccaaaaattccattaataaagagatgctgaaaggtctccagaccacatttgagaccatacatcatgatagttccgctagagttgtgatgatcacaagtctggttccaggagttttctgtgcaggtgcagatctcaaggaacgtagaactatgagtccatctgaggttcacacatatgtcaactccttgcgctacatgttctccttcatagaggcattgagtatcccaactattgctgcaatagaaggtgtggcactaggaggtggactcgaaatggctttatcctgtgatcttcgaatctgtggcgaaaatgcagtatttggtttgcctgaaacaggactcgctgtaatccctggtgctggtgggacacagagactctcaaggctggttggaagatcagtttcaaaggaacttatattcacaggtcgaaagattgatgcaagagaagctgcaaagaaagggctagttaacttctgtgttgcggcgggtgaggctcataagaaagcaatggaagtggctcagcagataaataataaaggtccaatggcgataaagatggcgaagaaagcgattgatgaaggaatagagacgaatatggcttcaggattagagctagaggagatgtgttatcagaagcttctaaacactgaagatcgtctggaaggattagctgcgtttgctgagaaacgtaagcctcgttacactggcaagtgaagctcttttagtttcaataaccggggggagataaccattgtattggatgttaagaaccgggatggtttaggattataataatgtgtatgacacagaaaccaagtaaaaataaacatttgaatatcactcgttctatttgtgcattcattggcttaataaaattaaattcggatacaaaaaaaaaaaaaa

SEQ ID NO: 28741 - protein, 301 aa, Brassica napus
MSFVKYLRRDSLLQLAGKRSLSRSCMLQTCRTLIIETAPPESVKLNRLSGSDSGIVEVNLDRSVAKNSINKEMLKGLQTTFETIHHDSSARVVMITSLVPGVFCAGADLKERRTMSPSEVHTYVNSLRYMFSFIEALSIPTIAAIEGVALGGGLEMALSCDLRICGENAVFGLPETGLAVIPGAGGTQRLSRLVGRSVSKELIFTGRKIDAREAAKKGLVNFCVAAGEAHKKAMEVAQQINNKGPMAIKMAKKAIDEGIETNMASGLELEEMCYQKLLNTEDRLEGLAAFAEKRKPRYTGK

SEQ ID NO: 28742 - DNA, 1070 bp, Triticum aestivum
  CDS (67)..(981)
gctgactctgcctctgctctttcctccgcccagcaccagtctcccactctcgcccgactctccaccatgcgcagcctacggggcctcctcgccgtctccggccacctcgccgcccgccacgcgccgccgagcggcgcctcctcgtctccccacagcgtcctcttcgcccgtgccctccagatcctctcccagccggagcccgtccgcctccacaagctctcggcgcccgactccgggatcgtggagctgaggctggagcggccggaggccaggaacgccatcgggaaggagatgctcaaggggctgcggagcgccatggacaaggtgaaggccgactcgacggccaacgttgtactggtagcgagctccgtgcccaaggtcttctgcgcgggcgctgacctcaaggaaaggaggttaatgggcccttctgaagtccgggaatttgttaataccttgagagctacattctcatcctttgaggcactccctattcctacaatagctgttgttgaaggagctgcctttggcggtgggctagagttggctctttcatgtgatcttcgtatatgtggggagagtgcaacattcagcttgccagaaaccggccttgctattattcctggagctggagggacacagcgtcttccaaggattgttggaagggccagagcaaaggaattgatattcactggccgtagatttgatgcgacagaagctgtaaatatgggggtagtgaactactgcgttcctggtggcgaggcttatcaaaaggctcttgaacttgcccgggagataaatcagaaaggtccgttagcgataaggatggccaagaaggccatcaacgaaggggtggaggtagacctgtcctctgcgttggctgtcgaagaagagtgctacgagcaagttctgcacactcaggatcgccttgaaggtctagctgcatttgcagagaaaagaagacctttgtacacaggaaagtgaggccgtactgaagtcagccctgttagcctcttatgtcttatctgctgataccctgaagaatgtgtccttgttccaaaaaaaaaaaaaaa

SEQ ID NO: 28743 - protein, 304 aa, Triticum aestivum
MRSLRGLLAVSGHLAARHAPPSGASSSPHSVLFARALQILSQPEPVRLHKLSAPDSGIVELRLERPEARNAIGKEMLKGLRSAMDKVKADSTANVVLVASSVPKVFCAGADLKERRLMGPSEVREFVNTLRATFSSFEALPIPTIAVVEGAAFGGGLELALSCDLRICGESATFSLPETGLAIIPGAGGTQRLPRIVGRARAKELIFTGRRFDATEAVNMGVVNYCVPGGEAYQKALELAREINQKGPLAIRMAKKAINEGVEVDLSSALAVEEECYEQVLHTQDRLEGLAAFAEKRRPLYTGK

SEQ ID NO: 28744 - DNA, 777 bp, Chloroflexus aurantiacus
  CDS (1)..(777): transl_table=11
atgagtgaagagtctctggttctcagcacaattgaaggccccatcgccatcctcaccctcaatcgcccccaggccctcaatgcgctcagtccggccttgattgatgacctcattcgccatttagaagcctgcgatgccgatgacacaatccgcgtgatcattatcaccggcgccggacgggcatttgctgccggcgctgatatcaaagcgatggccaatgccacgcctattgatatgctcaccagtggcatgattgcgcgctgggcacgcatcgccgcggtgcgcaaaccggtgattgctgccgtgaatgggtatgcgctcggtggtggttgtgaattggcaatgatgtgcgacatcatcatcgccagtgaaaacgcgcagttcggacaaccggaaatcaatctgggcatcattcccggtgctggtggcacccaacggctgacccgcgcccttggcccgtatcgcgcaatggaattgatcctgaccggcgcgaccatcagtgctcaggaagctctcgcccacggcctggtgtgccgggtctgcccgcctgaaagcctgctcgatgaagcccgtcggatcgcgcaaaccattgccaccaaatcaccactggctgtacagttggcgaaagaggcagtccgtatggccgccgaaaccactgtgcgcgaggggttggctatcgagctgcgtaacttctatctgctgtttgccagtgctgaccaaaaagaggggatgcaggcatttatcgagaaacgcgctcccaacttcagtggtcgttga

SEQ ID NO: 28745 - protein, 258 aa, Chloroflexus aurantiacus
MSEESLVLSTIEGPIAILTLNRPQALNALSPALIDDLIRHLEACDADDTIRVIIITGAGRAFAAGADIKAMANATPIDMLTSGMIARWARIAAVRKPVIAAVNGYALGGGCELAMMCDIIIASENAQFGQPEINLGIIPGAGGTQRLTRALGPYRAMELILTGATISAQEALAHGLVCRVCPPESLLDEARRIAQTIATKSPLAVQLAKEAVRMAAETTVREGLAIELRNFYLLFASADQKEGMQAFIEKRAPNFSGR

SEQ ID NO: 28746 - DNA, 768 bp, Klebsiella pneumoniae subsp. pneumoniae MGH 78578
  CDS (1)..(768): transl_table=11
atgagtgacctgctgatccaccgtcatggccgggtgcttcagttgacgctgaaccgcccgcaggcccgcaacgcgctgaacaatgccttattaacccagattgccgaggcgctggaggccgcggcagttgatgacagcgtcggcgtctgcgttattcgcggtaacgcgcgttttttcgccgccggggctgaccttaatgaaatggcggaaaaagatctgcctgccaccctggatgatattcgcccacggttatgggggcgaattgatgcctttactaaaccgctcatcgcctcggtcaacggctacgccctcggcgccggctgcgagctggccctgctgtgcgacctgattgtcgccggggacaacgcccgctttggcctgccggaaattaccctcggcataatgccgggcgcgggcggcacccagcggctgatccgcagcgttggcaaggcgctggccagccggatggtgctgagcggcgagagtattgacgcccgccaggcgcagcaggccgggctggtcagtgatatccatccggcggcgttaaccgatgagtatgccctgaaactggcaaccaccattgcccgccattcgccgctggcgctacgggcggcaaaacagtcgctgcgcctgtcgcaggaagtcagcctgcaggctggtctgcaacaggagcgccagctgtttagcctgctgagcgccaccgaggaccgccgcgaaggcatcgacgccttcttacaaaaacgtaccccggaatttaaaggacgctaa

SEQ ID NO: 28747 - protein, 255 aa, Klebsiella pneumoniae subsp. pneumoniae MGH 78578
MSDLLIHRHGRVLQLTLNRPQARNALNNALLTQIAEALEAAAVDDSVGVCVIRGNARFFAAGADLNEMAEKDLPATLDDIRPRLWGRIDAFTKPLIASVNGYALGAGCELALLCDLIVAGDNARFGLPEITLGIMPGAGGTQRLIRSVGKALASRMVLSGESIDARQAQQAGLVSDIHPAALTDEYALKLATTIARHSPLALRAAKQSLRLSQEVSLQAGLQQERQLFSLLSATEDRREGIDAFLQKRTPEFKGR

SEQ ID NO: 28748 - DNA, 777 bp, Xanthobacter autotrophicus Py2
  CDS (1)..(777): transl_table=11
atgacctatgaaaccatcctcgtcgcgatcgacggaccggtcggcatcatcaccctcaaccgcccggacgtcctcaacgcgctgaaccaccaaatcacctcggagctgtctcatgccgcggccgccctcgacgctgccggctcgatcggcgccatcgttgtgaccggctcggacaaggccttcgccgcaggcgccgacatcaaggagatcaaggacaagacctttgccgaagtctatgaagcgcagctcatcaccgccacatgggagggcttggcacgggtgcgcaagccgaccgtcgcggcggtgtcggggcatgcgatcgggggcggttgcgagctggcgctgatgtgcgacatcatcgtggcgtcgcagaccgcccgcttcgccctgccggaaaccacgattggcatcatccccggcgccggcggcacccagcgcctcacgcgcatcgttggcaaggcgaccgccatggacatgatcctcaccggccgggccttgtccgcggtggaggcgcaggccatggggctcgtcagccgggtggcggcagaagggcaacatctggcggaggccgtcgccatcgccgcacgcatcgcctcgtcctcccgccccgtcgtggcgctggcgaaggaagcggtgaacaaggcctacgagacccatctccaggagggcctgtatgtcgagcgccgactgctctacgccaccttcgccctagaggaccggcgcgaggggatgaacgcctttgcggaaaagcgaaagccggttttccgaaatcggtga

SEQ ID NO: 28749 - protein, 258 aa, Xanthobacter autotrophicus Py2
MTYETILVAIDGPVGIITLNRPDVLNALNHQITSELSHAAAALDAAGSIGAIVVTGSDKAFAAGADIKEIKDKTFAEVYEAQLITATWEGLARVRKPTVAAVSGHAIGGGCELALMCDIIVASQTARFALPETTIGIIPGAGGTQRLTRIVGKATAMDMILTGRALSAVEAQAMGLVSRVAAEGQHLAEAVAIAARIASSSRPVVALAKEAVNKAYETHLQEGLYVERRLLYATFALEDRREGMNAFAEKRKPVFRNR

SEQ ID NO: 28750 - DNA, 771 bp, Xanthobacter autotrophicus Py2
  CDS (1)..(771): transl_table=11
atggcatacgagacgatcctggtggagcagcacgaccgcgtggggctcatccgcctgaaccgcccccaggcgctcaatgcgctcaacggccagctgatcggcgagctgaacgcggcgctggatgcgttcgagcaggatcggggcatcggctgcgttgttctcaccggctcggagaaggcgttcgccgccggggccgacatcaaggagatgcaagtcttctcctatccggcgacctatctcgacgatttcatcacctcctgggagcggctgtcgcgcacccgcaagccggtgatcgcggcggtggcgggcttcgccctgggtggcggctgcgagctggccatgatgtgcgacttcatcctggccgccgataccgcgaagttcggccagcccgagatcaagctgggggtgatgcccggtgccggcggcactcagcgcctcacccgattcgtgggcaagtcgaaggccatggaaatgtgcctcaccggccgcttgatggatgccgtcgaagccgagcgcgctggcctcgtctcgcgcgtggtgccggcagccgagcttctggacgaggcgctgaaggtggcgaaggtcatcgccggcatgtccgcgcacgtggccatgcagaccaaggaaagcgtgaaccgctcctacgagaccacgcttgccgaaggcatccgcttcgagcggcgggtgttccaggcccagttcggcgtcgccgaccagaaggaaggcatggccgccttcatcgagaagcgccccgcgaagttcgagcactga

SEQ ID NO: 28751 - protein, 256 aa, Xanthobacter autotrophicus Py2
MAYETILVEQHDRVGLIRLNRPQALNALNGQLIGELNAALDAFEQDRGIGCVVLTGSEKAFAAGADIKEMQVFSYPATYLDDFITSWERLSRTRKPVIAAVAGFALGGGCELAMMCDFILAADTAKFGQPEIKLGVMPGAGGTQRLTRFVGKSKAMEMCLTGRLMDAVEAERAGLVSRVVPAAELLDEALKVAKVIAGMSAHVAMQTKESVNRSYETTLAEGIRFERRVFQAQFGVADQKEGMAAFIEKRPAKFEH

SEQ ID NO: 28752 - DNA, 810 bp, Oryza sativa (japonica cultivar-group)
  CDS (1)..(810)
atgcggcgcctcctcgccgcctccggccgctgcgctccggcgacccgcacccaccatgggctcttcgcgcgcgccatccagatcttggcgccgccggatcccgtcagtctccacaagctctcggcacccgactgcgaaatcgtagagctgaggctggagcgtccggaggtcaagaacgccatcaactgggaagccatgaggctgctgcggggtgtggtcgagaaggttgaggctgacgacaccgtgaaggtcgtcctggtcacgagctccgtgcctggagttttctgcgcaggcgccgatctcaaggcactatctattccaacaattgctgtcattgaaggagctgctttgggtggtgggctagaactggcactttcatgcgacctgcgtatatgtggagaaaatgcaactcttggactgccagagacaggacttgctatcattcctggagctgggggcacacagcgtcttcctaggattgttggaaggtccagagcgaaggagatgatattcaccggccgtagatgtaatgcaactgaagctgtaatgatgggactcgcaaactactgcgttccagcaggggaggctcatgaaaaagcccttgaacttgcccgcgagatagcccagaaagggcctctggggataagaatggccaagaaggccattgatcaagggatgcaggcagcagacatgccgtccgcgttggccgtcgaaggggagtgctacgagcagctgctgcacacggaggatcgccttgagggcctagccgcattcgccgagaggaggaaacctgtatactcaggaaagtag

SEQ ID NO: 28753 - protein, 269 aa, Oryza sativa (japonica cultivar-group)
MRRLLAASGRCAPATRTHHGLFARAIQILAPPDPVSLHKLSAPDCEIVELRLERPEVKNAINWEAMRLLRGVVEKVEADDTVKVVLVTSSVPGVFCAGADLKALSIPTIAVIEGAALGGGLELALSCDLRICGENATLGLPETGLAIIPGAGGTQRLPRIVGRSRAKEMIFTGRRCNATEAVMMGLANYCVPAGEAHEKALELAREIAQKGPLGIRMAKKAIDQGMQAADMPSALAVEGECYEQLLHTEDRLEGLAAFAERRKPVYSGK

SEQ ID NO: 28754 - DNA, 771 bp, Archaeoglobus fulgidus DSM 4304
  CDS (1)..(771): transl_table=11
atgggagagagagtcaagcttgagcttgatggtgaaattgctgttgcaaccctcaacagaccagagaagctaaacgctcttgacaccaaaacgaggatggagctggctgaggttattgagggcatcgaggaagtggcaagagttttaatcattaccggcagcggcaaggcctttgctgccggcgctgacatcaacgagcttcttcagagggatgcaattaaggcttttgaggcaacaaagctcggaacggatctcttttcgagaattgaggagcttgagattccggtgattgccgcagttaacggatacaccctcggtgggggttgtgagctggcgatggcgtgcgacataagaattgccagtgaaaaggcaaagttcgggcagccagagataaacctcgccataattcccggagcgggagggacgcagaggctgccgaggctcgtggggctggggatggcgaaaaagcttgttcttacgggggagataatcgatgctcagactgctttaagaatagggctggttgaggaggttgtggagcacgaaaggctgatggagagggcaaaggaggttgccgctaaaataatcgagaaatcgcctctcgctgtaaaggtggcgaagaaagctttgaacgcatcaatcaacatgcccctgaaggaggggctgaggtatgaggcaagcctcttcgccctgctcttctccagcgaggatgctaaggaggggatgagggcgtttctggagaagaggaagcctgagtttaggggaaggtga

SEQ ID NO: 28755 - protein, 256 aa, Archaeoglobus fulgidus DSM 4304
MGERVKLELDGEIAVATLNRPEKLNALDTKTRMELAEVIEGIEEVARVLIITGSGKAFAAGADINELLQRDAIKAFEATKLGTDLFSRIEELEIPVIAAVNGYTLGGGCELAMACDIRIASEKAKFGQPEINLAIIPGAGGTQRLPRLVGLGMAKKLVLTGEIIDAQTALRIGLVEEVVEHERLMERAKEVAAKIIEKSPLAVKVAKKALNASINMPLKEGLRYEASLFALLFSSEDAKEGMRAFLEKRKPEFRGR

SEQ ID NO: 28756 - DNA, 777 bp, Mesorhizobium loti MAFF303099
  CDS (1)..(777): transl_table=11
atgatggaccgcctcgttcaggcagtggaaccggcgcccggcatccgactgctgacgctcaaccggccggacaagctgaacgcgttgtccaaggcgttgctggccgaattgagccacctgctttctggctacgacgccgacacggaggtcggctgcgtggtgctgacgggtgccggtcgcgcctttgcggcaggcgccgacatctctgacatgctggaacgcggggtcgcctcctacgccgacccggaacggctggcatgctggcgcgccattgagggcttcaccaagccgattatcgccgccgtgaatggatatgcgctgggcggcgggctggagcttgcgcttctgtgcgacatcgtcattgcctcgcaagcagctcaattcgcgactcctgaaatcaagatcggcgcgtttcccggcgatggcggcacgcagcgtctgccacgtctcgtcggcaaatcctttgccatgcagatggtcctgaccggtgacatggtcgatgcgaccctcgccgagcgcaaaggactggtcagcgaagtcgtggaggcggacaggctcctgccacgggcgctggagatcgccgctgcgatcgccgccaagtcggttgccatcacgccctatgcgaagaaggccgttctggcggcattcgaaaccgaactgcaaagcgggctcgagattgagcaccggctgaccgtcgaggcattcggcaaggaggaccggattgaagggctgcgagcctttgccgagaaacgggcgccggccttcaggggcaaatag

SEQ ID NO: 28757 - protein, 258 aa, Mesorhizobium loti MAFF303099
MMDRLVQAVEPAPGIRLLTLNRPDKLNALSKALLAELSHLLSGYDADTEVGCVVLTGAGRAFAAGADISDMLERGVASYADPERLACWRAIEGFTKPIIAAVNGYALGGGLELALLCDIVIASQAAQFATPEIKIGAFPGDGGTQRLPRLVGKSFAMQMVLTGDMVDATLAERKGLVSEVVEADRLLPRALEIAAAIAAKSVAITPYAKKAVLAAFETELQSGLEIEHRLTVEAFGKEDRIEGLRAFAEKRAPAFRGK

SEQ ID NO: 28758 - DNA, 774 bp, Mesorhizobium loti MAFF303099
  CDS (1)..(774): transl_table=11
atggcctatgaaacgatcatcaccgagacacgcggcaaggtcgggctggtcacgctgaaccggccaaaggcgctcaatgcgctgaaccttcagcttctcgccgaactggtcgcggccgtgaaggacttcgacgccgatgccggcatcggcgcggtggtcattaccggttcggacaaggcctttgccgccggcgccgacatcaaggagatgcaagcaatctcctttgcggacgcctatttgcaggacctgttcgtcggctgggaagacctgacgcgggtgcggaaacccgttatcgccgcggtggccggctatgcgctcggcggcgggtgcgagctggcgatgatgtgcgactttatcattgccgctgacacggccaaattcggccagcccgaaatcacgctcggcgtcattcccggcatgggcggatcgcaacgcctgaccaggtttgtcggcaagtctaaggcgatggacatgtgcctgaccggacggatgatggatgcagcggaagccgagcgctcgggcctggtgtcgcgggtcgtgcccgccgccgagcttgtcgaggaggcggtcaaggcggcggccaagatcgccgatttctcgctgccctcggtgatgatggcgaaggaagccgtcaaccgttcctatgagacgacgctgaccgagggattgcggttcgaacgtcgtctgttccactcgcttttcgcgctcgaagaccagaaggaaggcatggcggccttcgccgaaaagcggaagccgaatttcgccaatcggtag

SEQ ID NO: 28759 - protein, 257 aa, Mesorhizobium loti MAFF303099
MAYETIITETRGKVGLVTLNRPKALNALNLQLLAELVAAVKDFDADAGIGAVVITGSDKAFAAGADIKEMQAISFADAYLQDLFVGWEDLTRVRKPVIAAVAGYALGGGCELAMMCDFIIAADTAKFGQPEITLGVIPGMGGSQRLTRFVGKSKAMDMCLTGRMMDAAEAERSGLVSRVVPAAELVEEAVKAAAKIADFSLPSVMMAKEAVNRSYETTLTEGLRFERRLFHSLFALEDQKEGMAAFAEKRKPNFANR

SEQ ID NO: 28760 - DNA, 756 bp, Thermoplasma volcanium GSS1
  CDS (1)..(756): transl_table=11
atgagttctccgaattatagaaatatatcattggaagatcacgaaggcatcaggatagtcactatacgcagggaaaactcccttaacccgctaaatttagatacgttagaagaaattgaagatgccgttcgagaatcaggcaaggtcgtcgtgcttaaaggaagcgagaaggcgttttctgcgggtgcagacataaacaattttcttgacatgtctgatagagatgcatttcatttttctgacagaggccagcaggtaatggacagcatatccgattatgagaggcccgttatagcggcagttcatgggtatgcactcggcggcggatttgaacttgcacttgcgtgcgattttaggatatcagatgtaaagacaaaatatggatttccggaggtaaatttaggcataatgccaggttttggtggaacccagaggatcatagacattgcaggaaagtcatatggaatgtatctagttatgacgggtaagactatagatgagcaggaggcactgaaacatggcatagtagattctgttagtgaaaagtacctagatttagccatcgaactggctaaagaactttcggaaaagccggctacctcaatccgatatataaaagaggttatgaacaggagagacaaagaaggatacatgatggaacgtgaaagatttgctctcacgttcaaaacagaggatcacttagagggaattagggctttcaaggaaaagaggaaagcagttttcaaaggaaaataa

SEQ ID NO: 28761 - protein, 251 aa, Thermoplasma volcanium GSS1
MSSPNYRNISLEDHEGIRIVTIRRENSLNPLNLDTLEEIEDAVRESGKVVVLKGSEKAFSAGADINNFLDMSDRDAFHFSDRGQQVMDSISDYERPVIAAVHGYALGGGFELALACDFRISDVKTKYGFPEVNLGIMPGFGGTQRIIDIAGKSYGMYLVMTGKTIDEQEALKHGIVDSVSEKYLDLAIELAKELSEKPATSIRYIKEVMNRRDKEGYMMERERFALTFKTEDHLEGIRAFKEKRKAVFKGK

SEQ ID NO: 28762 - DNA, 1014 bp, Arabidopsis thaliana
  CDS (1)..(1014)
atggcggattccaatgagcttggctcggcgagccgacgactctccgtcgtcaccaatcatctcatccctatcggattcagtccagctcgtgctgactcagtggaactctgtagtgcttcgtcgatggatgatagattccataaggttcacggtgaagttccgacccacgaagtcgtttggaaaaaaactgatttctttggtgaaggagataacaaggagtttgttgatattatttatgagaaagcccttgatgaaggcattgcaaagattactataaaccggccagagagaagaaatgcgttccggcctcagactgtgaaggagcttatgcgtgcgtttaatgatgctagagatgatagctctgtaggagtcatcatactcaccggcaagggaacaaaagcattttgcagtggtggtgatcaggctttgagaacacaagacgggtatgctgatcccaatgacgttggccgccttaatgttcttgatcttcaggttcaaatccgcagattgccaaagccagttattgcaatggtagctggttatgctgttggaggaggacacattttgcacatggtctgcgatctaacaattgcagctgataatgcgatttttggtcaaacgggtcctaaggttggaagttttgatgctggttatggaagttccatcatgtctcgtctggttggtcctaaaaaggcacgagaaatgtggtttatgacgaggttctacacagcttctgaagcagagaaaatgggacttatcaatacagttgtaccgctagaggatttggagaaagaaactgtgaaatggtgcagagaaatcttacggaacagtccaactgcaatccgagtacttaaggcagcacttaatgcagttgatgatggccatgccggccttcagggactcggtggtgatgcgacactcttattctatggaaccgaagaagctactgaagggagaactgcttatatgcaccgccgaccaccggacttctctaaatttcaccggcgaccttaa

SEQ ID NO: 28763 - protein, 337 aa, Arabidopsis thaliana
MADSNELGSASRRLSVVTNHLIPIGFSPARADSVELCSASSMDDRFHKVHGEVPTHEVVWKKTDFFGEGDNKEFVDIIYEKALDEGIAKITINRPERRNAFRPQTVKELMRAFNDARDDSSVGVIILTGKGTKAFCSGGDQALRTQDGYADPNDVGRLNVLDLQVQIRRLPKPVIAMVAGYAVGGGHILHMVCDLTIAADNAIFGQTGPKVGSFDAGYGSSIMSRLVGPKKAREMWFMTRFYTASEAEKMGLINTVVPLEDLEKETVKWCREILRNSPTAIRVLKAALNAVDDGHAGLQGLGGDATLLFYGTEEATEGRTAYMHRRPPDFSKFHRRP

SEQ ID NO: 28764 - DNA, 798 bp, Arabidopsis thaliana
  CDS (1)..(798)
atggatcaaacagtatcggaaaatctcattcaggtgaagaaagaatcaggcgggatcgccgtcatcacaatcaaccgtccgaaatctctcaattcactcacgagagcgatgatggttgatctcgccaaggcattcaaggatatggactccgacgaatcggtccaggtcgtgattttcaccggatcaggtcgatctttctgctctggcgttgatttgactgcggcggagtctgttttcaaaggagacgtgaaggatccggaaaccgacccggttgtgcagatggagcggttacgtaaaccgatcatcggagctattaacggttttgccatcaccgccgggtttgaactcgccttggcctgtgatattttggtcgcttctagaggagctaagttcatggatactcacgccaggtttgggatatttccttcatggggtttgtctcagaagctgtcgaggatcatcggagcaaacaaagctcgagaagtttctttaacatcgatgccactgacagcagacgtggctgggaagttagggtttgtaaaccatgtggttgaagaaggagaagcgttaaagaaagctagagaaatcgcagaggctataatcaagaatgaacaaggcatggttctgaggattaaatccgttatcaatgatggacttaagcttgatcttgggcatgctctcacactagaaaaggagcgagctcacgcgtattacagtgggatgacgaaggaacagtttagaaagatgcaggagtttatagccggacgtggatccaagaaaccttcttctaagttgtag

SEQ ID NO: 28765 - protein, 265 aa, Arabidopsis thaliana
MDQTVSENLIQVKKESGGIAVITINRPKSLNSLTRAMMVDLAKAFKDMDSDESVQVVIFTGSGRSFCSGVDLTAAESVFKGDVKDPETDPVVQMERLRKPIIGAINGFAITAGFELALACDILVASRGAKFMDTHARFGIFPSWGLSQKLSRIIGANKAREVSLTSMPLTADVAGKLGFVNHVVEEGEALKKAREIAEAIIKNEQGMVLRIKSVINDGLKLDLGHALTLEKERAHAYYSGMTKEQFRKMQEFIAGRGSKKPSSKL

SEQ ID NO: 28766 - DNA, 771 bp, Halobacterium sp. NRC-1
  CDS (1)..(771): transl_table=11
atgagcgacaccgttgcgcttgcggtcgacgacggcgtggcaacgatcacgatcagccgcccggacagcctgaacgcgttgaacgtggcgacgctgcacgcgctgcgtgacaccctcgacaccgccgagtcggagggcgcgcgcgccgtcgtgctcaccagcgccggcgacgacgcgttcatcgcgggcgcggacatctcatacatggtggagatggacaccgcggaggcgcaggcgtacgccgaactcgggcacagcgtcgccgacgccatcgagtcgttcccggcaccggtcgtcgccgcgatcgacgggtacgcgttcggcggcggcatggagctggcgttggcctgcgatctgcgggttgcgagcgaggacgcgatcctcgggcagaccgagatcgacatcggcatcatccccggctgggggggcacccagcgcctgccccggatcgtcggcgacgagaccgcgcgccgcatgatctacttcggtgaccggctgagcgccgcggacgccagcgagcacggcctcgtcggcgaggtcgtgccggcggcggagatcgacgaccacgtggcgtcgctggcgcgcgatctcgccgcccaacccgcggcggcgatgcgcgccgccaaggacgccatcaacaccagccacgaaacgacgctgtcggcgggcctggagttcgaggcgcggacctgggcgggcctgttcgggagccacgaccaacaggagggcatgcaggcgttcctcgaagaccgcgatcccgacttcgagtag

SEQ ID NO: 28767 - protein, 256 aa, Halobacterium sp. NRC-1
MSDTVALAVDDGVATITISRPDSLNALNVATLHALRDTLDTAESEGARAVVLTSAGDDAFIAGADISYMVEMDTAEAQAYAELGHSVADAIESFPAPVVAAIDGYAFGGGMELALACDLRVASEDAILGQTEIDIGIIPGWGGTQRLPRIVGDETARRMIYFGDRLSAADASEHGLVGEVVPAAEIDDHVASLARDLAAQPAAAMRAAKDAINTSHETTLSAGLEFEARTWAGLFGSHDQQEGMQAFLEDRDPDFE

SEQ ID NO: 28768 - DNA, 894 bp, Escherichia coli O157:H7 EDL933
  CDS (1)..(894): transl_table=11
atgaaacggcagggaactaccctgccagctaataatcacgctctaaaacaatatgcattttttgcagggatgttgtcgtccctgaaaaagcaaaaatggagaaaaggaatgagtgaatcattacatctgacccgcaatggatcaattctggaaattactcttgatcgcccaaaagcgaatgctattgatgcaaaaaccagctttgaaatgggcgaagtatttctaaatttccgtgacgatccgcaattacgtgtcgccattattaccggtgccggagagaaattcttttccgcgggctgggatttaaaagcggcagcagaaggcgaagcaccggatgctgactttggcccgggtggttttgcgggattaaccgaaattttcaatctcgacaaaccggttatcgcagctgtgaacggctacgcctttggcggcggtttcgaactggcgctggcggcagattttattgtttgtgccgataacgccagcttcgccctgccggaagccaaactgggcatcgttcctgacagcggcggtgtgctgcgtctgccgaagatcctgccgcctgccatcgtcaatgaaatggtgatgaccggcagacgaatgggcgcagaagaggcgctgcgttgggggatagtcaaccgcgtggttagccaggcggaactgatggataacgcccgcgaactggctcagcagctggttaacagcgccccgctggcgattgcggcgctgaaagagatctaccgcaccaccagcgaaatgccggtagaagaatcgtatagctatattcgcagcggcgtgttgaaacactatccatcggttctgcattcggaagatgccattgaagggccgctggcgtttgccgagaagcgcgatccggtgtggaaaggacgttaa

SEQ ID NO: 28769 - protein, 297 aa, Escherichia coli O157:H7 EDL933
MKRQGTTLPANNHALKQYAFFAGMLSSLKKQKWRKGMSESLHLTRNGSILEITLDRPKANAIDAKTSFEMGEVFLNFRDDPQLRVAIITGAGEKFFSAGWDLKAAAEGEAPDADFGPGGFAGLTEIFNLDKPVIAAVNGYAFGGGFELALAADFIVCADNASFALPEAKLGIVPDSGGVLRLPKILPPAIVNEMVMTGRRMGAEEALRWGIVNRVVSQAELMDNARELAQQLVNSAPLAIAALKEIYRTTSEMPVEESYSYIRSGVLKHYPSVLHSEDAIEGPLAFAEKRDPVWKGR

SEQ ID NO: 28770 - DNA, 858 bp, Escherichia coli O157:H7 EDL933
  CDS (1)..(858): transl_table=11
  misc_feature (49)..(49): n is a, g, c or t
  misc_feature (184)..(184): r is g or a
atgatttatcctgatgaagcaatgctttacgcaccggttgaatggcacnactgctccgaaggctttgaggacattcgttatgaaaaatccaccgacggtatcgcaaaaatcaccattaatcgtccgcaggtgcgcaatgccttccgtcctctgacggtaaaagagatgatccaggcactggcaratgcgcgttatgacgataacgtcggcgtgatcattctgactggcgcaggcgataaagcgttctgctccggtggtgaccagaaagtgcgtggtgattacggcggctataaagatgattccggcgtacatcacctgaacgtgctggacttccagcgtcagatccgtacctgtccgaaaccggttgtcgcgatggtggctggctattccatcggcggtggtcacgttctgcacatgatgtgcgacctgactatcgcggcagataatgccatcttcggtcagactggcccgaaagtcggttccttcgacggcggctggggcgcttcctacatggctcgtatcgtcgggcagaaaaaagcgcgtgaaatctggttcctgtgccgtcagtacgacgcaaaacaggcgctggatatgggccttgtcaacaccgtggtaccgctggcggatctggaaaaagaaaccgttcgctggtgccgtgaaatgctgcaaaacagtccgatggcgctgcgctgcctgaaagctgcactgaacgccgactgtgacggtcaggcaggtctgcaggagctggcgggcaacgccaccatgctgttctacatgacggaagaaggtcaggaaggtcgcaacgccttcaaccagaaacgtcagcctgacttcagcaaattcaaacggaatccgtaa

SEQ ID NO: 28771 - protein, 285 aa, Escherichia coli O157:H7 EDL933
  misc_feature (17)..(17): The Xaa at location 17 stands for Asn, Asp, His, or Tyr.
MIYPDEAMLYAPVEWHXCSEGFEDIRYEKSTDGIAKITINRPQVRNAFRPLTVKEMIQALABARYDDNVGVIILTGAGDKAFCSGGDQKVRGDYGGYKDDSGVHHLNVLDFQRQIRTCPKPVVAMVAGYSIGGGHVLHMMCDLTIAADNAIFGQTGPKVGSFDGGWGASYMARIVGQKKAREIWFLCRQYDAKQALDMGLVNTVVPLADLEKETVRWCREMLQNSPMALRCLKAALNADCDGQAGLQELAGNATMLFYMTEEGQEGRNAFNQKRQPDFSKFKRNP

SEQ ID NO: 28772 - DNA, 828 bp, Escherichia coli O157:H7 EDL933
  CDS (1)..(828): transl_table=11
gtgaatttatccagacgcaatattttgattaaaggaatttttatgtcttatcagtatgttaacgttgtcactatcaacaaagtggcggtcattgagtttaactatggccgaaaacttaatgccttaagtaaagtctttattgatgatcttatgcaggcgttaagcgatctcaaccggccggaaattcgctgtatcattttgcgcgcgccgagtggatccaaagtcttctccgcaggtcacgatattcacgaactgccgtctggcggtcgcgatccgctctcctatgatgatccattgcgtcaaatcacccgcatgatccaaaaattcccgaaaccgattatttcgatggtggaaggtagtgtttggggtggcgcatttgaaatgatcatgagttccgatctgattatcgccgccagtacctcaaccttctcaatgacgcctgtaaacctcggcgtcccgtataacctggtcggcattcacaacctgacccgcgacgcgggcttccacattgtcaaagagctgatttttaccgcttcgcccatcaccgcccagcgcgcgctggctgtcggcatcctcaaccatgttgtggaagtggaagaactggaagatttcaccttacaaatggcgcaccacatctctgagaaagcgccgttagccattgccgttatcaaagaagagctgcgtgtactgggcgaagcacacaccatgaactccgatgaatttgaacgtattcaggggatgcgccgcgcggtttatgacagcgaagattaccaggaagggatgaacgctttcctcgaaaaacgtaaacctaatttcgttggtcattaa

SEQ ID NO: 28773 - protein, 275 aa, Escherichia coli O157:H7 EDL933
MNLSRRNILIKGIFMSYQYVNVVTINKVAVIEFNYGRKLNALSKVFIDDLMQALSDLNRPEIRCIILRAPSGSKVFSAGHDIHELPSGGRDPLSYDDPLRQITRMIQKFPKPIISMVEGSVWGGAFEMIMSSDLIIAASTSTFSMTPVNLGVPYNLVGIHNLTRDAGFHIVKELIFTASPITAQRALAVGILNHVVEVEELEDFTLQMAHHISEKAPLAIAVIKEELRVLGEAHTMNSDEFERIQGMRRAVYDSEDYQEGMNAFLEKRKPNFVGH

SEQ ID NO: 28774 - DNA, 801 bp, Sulfolobus solfataricus P2
  CDS (1)..(801): transl_table=11
atgcaggtgaattacatatatatgtatagtacaatacaaatagaagttatagataatataggaattataaaacttaacagaccagataagttaaatgcaatcaacttccaaatggttgatgaattagttgatgtcttgaacaagttagataatgatgacaagattaaagtcgtaataataactgggaatggaaaagcgttttcggcaggggcagacgttaaagagatgctagaaacgccccttgaggaaataatgaaaaagggtcatatgcctttatgggaaaagttgagaacgtttaaaaaaccagttatagctgcgttaaacggtatcacagccggaggagggctagaattagcaatggcatgtgatattataattgcctcagaatccgcaaaactgggtcaaccagaaataaatttaggtattatgccaggagcaggaggtactcagagattaactagagtattaggaaagtataaggcaatggaactagtgcttactgggaaattaatagactctaaagaagctgaaagatatggactagtaaataaggtagtaccagataactcactaattgatgaggcaattagactagcgagggaaatagctgaaaagccaataatatctataattttagctaaagaggcagttgctagagcctgggatactttactacagcaaggattagacttcgaaagaaggaatttctatttggctttaaatacaaaagaggctaaagaaggtatgagagcgtttttagagaagagaaaacctaggtgggagaatgataaaagtagataa

SEQ ID NO: 28775 - protein, 266 aa, Sulfolobus solfataricus P2
MQVNYIYMYSTIQIEVIDNIGIIKLNRPDKLNAINFQMVDELVDVLNKLDNDDKIKVVIITGNGKAFSAGADVKEMLETPLEEIMKKGHMPLWEKLRTFKKPVIAALNGITAGGGLELAMACDIIIASESAKLGQPEINLGIMPGAGGTQRLTRVLGKYKAMELVLTGKLIDSKEAERYGLVNKVVPDNSLIDEAIRLAREIAEKPIISIILAKEAVARAWDTLLQQGLDFERRNFYLALNTKEAKEGMRAFLEKRKPRWENDKSR

SEQ ID NO: 28776 - DNA, 867 bp, Agrobacterium tumefaciens str. C58
  CDS (1)..(867): transl_table=11
ttgaaagggtggtgcaggccggtcgttcgacattctattgcgccgcctgccagaaatagcggtgctgcaaattacggagaaggggagattgccgtggactatgaaatgatactggtcgagaagcgcgatgaggtgggcgtcatcacgctcaaccgccccaaggtgctcaacgccctcaattcggtgcttctgaaagagctgcggcacattctgtcttctttctcagccgatgattccatcggcgccatcatcatcaccggctcggaaaaggcatttgcggccggcgccgacatcaaggaaatgcaggggctggatttcgtcgatgcctatgtgggcgatttcctgggtggctgggatgaggttgcggccacacgcaagcctgttattgccgctgtttccggttttgcgctcggcggcggctgcgagctggcgatgatgtgcgatttcattatcgcttcggacacggcgaagttcggccagccggaaatcaccctcggcgtcattcccggcatgggcggatcgcagcggctgacgcgggcggtgggcaaggcgaaggccatggacctcgttctgaccggccgcatgatggatgcggcggaagccgagcgcgccggcctcgtatcgcgtatcgtgccggctgcagatctcatggaggtggcggtggaagctgcgacccgcattgcctcgctgtcgcgtgcttccgtgctcatggccaaggaaagcgtcaaccgctccttcgaggtgccgctcgccgaggggctgagatatgaacggcgtgccttccagtcgctctttgcgacggaggatcagaaggagggcatggcggccttcgttgaaaagcgcaaacccgctttccggaatcgctaa

SEQ ID NO: 28777 - protein, 288 aa, Agrobacterium tumefaciens str. C58
MKGWCRPVVRHSIAPPARNSGAANYGEGEIAVDYEMILVEKRDEVGVITLNRPKVLNALNSVLLKELRHILSSFSADDSIGAIIITGSEKAFAAGADIKEMQGLDFVDAYVGDFLGGWDEVAATRKPVIAAVSGFALGGGCELAMMCDFIIASDTAKFGQPEITLGVIPGMGGSQRLTRAVGKAKAMDLVLTGRMMDAAEAERAGLVSRIVPAADLMEVAVEAATRIASLSRASVLMAKESVNRSFEVPLAEGLRYERRAFQSLFATEDQKEGMAAFVEKRKPAFRNR

SEQ ID NO: 28778 - DNA, 843 bp, Agrobacterium tumefaciens str. C58
  CDS (1)..(843): transl_table=11
ttggcaggccgaatgcggcgcgcgccggaaaagcgctgcttgctgcaaaacaggagggagacctgcatggcggatgaactgctgcacgaggcgcgccaagatgttctatggctgacgctcaaccggccggaggtacacaacgccctcaatgccgcgatgacggaggcactcacggatgcgatccgcgctgcatccggcgatggcagcctgcgtgccgtggtgataacggcagccggagaccgcagcttctgttcgggagccgatctgaaggaaagtgccggcggcatgttcctctcgcccaacgggacgaaccccattgccaacgtgatgcgcgcgatagagagctgcgacaagcccgtcattgcccgcatcaatggccgggttctggccggcgggctcggccttgtcgccacctgcgatcttgcctatgccgccgatcatgccgaattcggcctgccggaagtgcgggtcgggcttttcccgaccatggtggcggcgaagttgctggcaaaaatgcctttgggcgggcttcaggaaatggcctatctcggccagccgatcaccgctgcggaggcaaaaggtctcggcctcgtcaatcgcacggcgccgctggctgaactcgatggccttatcgaagaggttctcgcaaagctgcgacagaacgcgccgggcgccatcgccgcgggaaaggcggccctgctggcgatgcgcgacatgccatcggatgaacggcttgcctttgcggaagacgccatagcagccatcagcggcagcgacgaagcgcgcgaagggcggcaggcttttgcagaaaagcgccctcccaaatggatcggcagatcctga

SEQ ID NO: 28779 - protein, 280 aa, Agrobacterium tumefaciens str. C58
MAGRMRRAPEKRCLLQNRRETCMADELLHEARQDVLWLTLNRPEVHNALNAAMTEALTDAIRAASGDGSLRAVVITAAGDRSFCSGADLKESAGGMFLSPNGTNPIANVMRAIESCDKPVIARINGRVLAGGLGLVATCDLAYAADHAEFGLPEVRVGLFPTMVAAKLLAKMPLGGLQEMAYLGQPITAAEAKGLGLVNRTAPLAELDGLIEEVLAKLRQNAPGAIAAGKAALLAMRDMPSDERLAFAEDAIAAISGSDEAREGRQAFAEKRPPKWIGRS

SEQ ID NO: 28780 - DNA, 777 bp, Sulfolobus tokodaii str. 7
  CDS (1)..(777): transl_table=11
gtgagtaaagtgcctaataccgtaatatatgagattatggataatattgcaatagttagactgaacagaccagataagttaaacgctttaaatatggaaatggtatgggattttgttaatgtatttaatgagctagagaataataagaatgttaaagtagtcataattactggaaatggtagagctttttgtgctggtgctgatgttaatgaaatggctaatatgaaagttgaggatgtagtgagagttggtcatgctcctatgtgggaaagattaaggacattcagaaaaccagttattgctgcacttaacggattaactgtaggtggaggtttagagttagcaatggcatgtgatattataattgctgctgaaagtgctatgttgggtcaacctgagataaatcttggtataattcccggtgctggtggtactcagagattaactaggactgtagggaaatacaagggtatggaaatggtactaactggaagattaatatcagcatgggaagcttacagaaggggtctggtcattaaggttgttcctgatgaggctttacttgatgaggcaattaggttagcaaaagagattgctactaaatctctatttgcagtagaattaggcaaggaggctgtaaataaggctttagataccactttacagcaagggttggatattgagagaaggaacttttatgttgctttaatcagcgaagatggtaaagaaggtatgaaggcatttatagagaagagaaaacctaattggaaaacataa

SEQ ID NO: 28781 - protein, 258 aa, Sulfolobus tokodaii str. 7
MSKVPNTVIYEIMDNIAIVRLNRPDKLNALNMEMVWDFVNVFNELENNKNVKVVIITGNGRAFCAGADVNEMANMKVEDVVRVGHAPMWERLRTFRKPVIAALNGLTVGGGLELAMACDIIIAAESAMLGQPEINLGIIPGAGGTQRLTRTVGKYKGMEMVLTGRLISAWEAYRRGLVIKVVPDEALLDEAIRLAKEIATKSLFAVELGKEAVNKALDTTLQQGLDIERRNFYVALISEDGKEGMKAFIEKRKPNWKT

SEQ ID NO: 28782 - DNA, 756 bp, Thermoplasma acidophilum DSM 1728
  CDS (1)..(756): transl_table=11
ttgacagaagagaaatatagggagatagttgtgaaggacgaggatggtgttagggtgatagagataaggagagaaaacccactaaacccgttgacaatcgatttgcttcaagagatcgatcatgcagtgaggggatctggaaaggtaatagtcctcaggggaagcgatcgagctttctctgcaggtgcagacataaacaatttcctgacaatggatgaccgtgcagcctttcgtttctcagatcttggccagaatgtcatgaacagtattgcaacctatgaaaaacccgtgatagccgctatccatgggtatgcactgggtggtggcttcgagcttgcattagcttgtgatttcaggatatcagatgtcaacacaaagtacggattcccagaggtggggcttggcataatgcctggattcggcggtacgcagagaataatggaacttgccggcccgtcttacggaaagtacctcgccatgactgggaagatcatagatgagaaggaggcccttgcccatggcatagttaacatggtttctgagaattacatcgatgaggcgatgaagcttgcaagggaactcgccgagaagcctgcggtatcaatcagatacataaaagaagtcatgaccagcatcggtagagaaggctatgaactcgaaaaggaaaagtttgcgctgacattcagaacaaaggatgcaaaggagggactaacggccttcaaggagaagagaaaaccgaaattcaccggagagtga

SEQ ID NO: 28783 - protein, 251 aa, Thermoplasma acidophilum DSM 1728
MTEEKYREIVVKDEDGVRVIEIRRENPLNPLTIDLLQEIDHAVRGSGKVIVLRGSDRAFSAGADINNFLTMDDRAAFRFSDLGQNVMNSIATYEKPVIAAIHGYALGGGFELALACDFRISDVNTKYGFPEVGLGIMPGFGGTQRIMELAGPSYGKYLAMTGKIIDEKEALAHGIVNMVSENYIDEAMKLARELAEKPAVSIRYIKEVMTSIGREGYELEKEKFALTFRTKDAKEGLTAFKEKRKPKFTGE

SEQ ID NO: 28784 - DNA, 894 bp, Escherichia coli K12
  CDS (1)..(894): transl_table=11
atgaaacagcagggaactaccctgccagctaataatcacactctaaaacaatatgcattttttgcagggatgttgtcgtccctgaaaaagcaaaaatggagaaaaggaatgagtgaatcattacatctgacccgcaatggatcaattctggaaattacccttgatcgtccaaaagcgaatgctattgatgcaaaaaccagctttgaaatgggcgaagtatttctaaatttccgtgacgatccgcaattacgtgtcgccattattaccggtgccggagagaagttcttttccgcgggctgggatttaaaagcggcagcagaaggcgaagcaccggatgctgactttggtccgggtggttttgcgggattaaccgaaattttcaatctcgacaaaccggttatcgcagctgtgaacggctatgcctttggcggcggctttgaactggcgctggcggcagattttattgtttgtgccgataacgccagcttcgccctgccggaagccaaactgggcatcgttcctgacagcggcggtgtgctgcgtctgccgaagatcctgccgcctgccatcgtcaatgaaatggtgatgaccggcagacgaatgggcgcagaagaggcgctgcgttgggggatagtcaaccgcgtggttagccaggcggaactgatggataacgcccgcgaactggctcagcagctggttaacagcgccccgctggcgattgcggcgctgaaagagatctaccgcaccaccagcgaaatgccggtagaagaagcgtatcgctatattcgcagcggcgtgttgaaacactatccatcggttctgcattcggaagatgccattgaagggccgctggcgtttgccgagaagcgcgatccggtgtggaaaggacgttaa

SEQ ID NO: 28785 - protein, 297 aa, Escherichia coli K12
MKQQGTTLPANNHTLKQYAFFAGMLSSLKKQKWRKGMSESLHLTRNGSILEITLDRPKANAIDAKTSFEMGEVFLNFRDDPQLRVAIITGAGEKFFSAGWDLKAAAEGEAPDADFGPGGFAGLTEIFNLDKPVIAAVNGYAFGGGFELALAADFIVCADNASFALPEAKLGIVPDSGGVLRLPKILPPAIVNEMVMTGRRMGAEEALRWGIVNRVVSQAELMDNARELAQQLVNSAPLAIAALKEIYRTTSEMPVEEAYRYIRSGVLKHYPSVLHSEDAIEGPLAFAEKRDPVWKGR

SEQ ID NO: 28786 - DNA, 789 bp, Caulobacter crescentus CB15
  CDS (1)..(789): transl_table=11
atggcccagttccagaccctgatcgtcgaggcgccggaaagcgcgccgggcgtcaccctgatccgcctgaaccggcccgaggcgctcaacgcgctcaacaccgccctgctgggcgaacttgcccaggccctggcggcggcgcaggccgacgacagcgtgggctgcatcgtgctgaccggttcggccaaggccttcgccgccggcgccgacatcaaagagatgtcggacaagacctatgcgcagatgttcaaggccgactttttcacggcgggcgcccgggcgatcgaacagtgccgcaagccgatcatcgccgccgtcgcgggctacgccctgggcggcggctgcgagctggcgatgatgtgcgacttcatcctggccgccgacaccgccaagttcggccagcccgagatcaatctgggcgtggcgcccggcatcggcggcacccagcgcctgacccgctttgtcggcaagtccaaggccatggacatgatcctgaccggccggatgatgggcgcggaggaagccgagcgctccggtctggtgtcgcggatcttccccgccgacagcctggtcgacgagaccctggcgatcgccgccaagatcgccggccaatcgccgctggccgtggcgatgaacaaggaactggtcgaagccgcctatgagacgaccctgacgaccggcgtcgcgctggagcgccggctgttccattcgctgtttgcgttcgaggatcagaaggaaggcatgacagccttcgtcgagaagcgtaaacccctgttcaagggcgcgtga

SEQ ID NO: 28787 - protein, 262 aa, Caulobacter crescentus CB15
MAQFQTLIVEAPESAPGVTLIRLNRPEALNALNTALLGELAQALAAAQADDSVGCIVLTGSAKAFAAGADIKEMSDKTYAQMFKADFFTAGARAIEQCRKPIIAAVAGYALGGGCELAMMCDFILAADTAKFGQPEINLGVAPGIGGTQRLTRFVGKSKAMDMILTGRMMGAEEAERSGLVSRIFPADSLVDETLAIAAKIAGQSPLAVAMNKELVEAAYETTLTTGVALERRLFHSLFAFEDQKEGMTAFVEKRKPLFKGA

SEQ ID NO: 28788 - DNA, 828 bp, Synechocystis sp. PCC 6803
  CDS (1)..(828): transl_table=11
atggattggcacattgcaaaacattacgacgacattctctattacaaagcgggggggatcgccaaaattgtcatcaatcgtccccataaacgcaacgccttccgtccccagaccgtttttgaactttatgacgcattttgtaacgccagggaagataaccgcatcggggttgtactactaaccggagccgggccccacagcgatggcaaatatgccttttgttccggtggggatcaatctgtccggggagaagggggttatatcgacgaccaaggaactccccgcctcaatgtgctcgatttacagcggttaatccgctccatgcccaaagttgtcattgccctagtggctggctatgccattggtggtggccacgttttacatttggtgtgtgacctgaccattgccgcagataacgccattttcggccaaaccgggccaaaagtggggagttttgatggaggctttggctccagttacttagctcgcattgtgggacaaaaaaaagccagggaaatttggtatctttgccgccaatactctgcccaggaagcagaacgcatgggcatggtgaacaccgttgttcccgtcgatcgcctggaggaagaaggtatccaatgggcgaaggaaatcttgagcaaaagtcccctggctatccgctgtcttaaagctgctttcaatgccgactgtgacggccaggctggattacaggaactagcgggcaacgccaccttgctttattacatgacagaagagggcagtgaaggcaaacaagccttcctggaaaaacgccccccggattttagccaatatccctggctcccctaa

SEQ ID NO: 28789 - protein, 275 aa, Synechocystis sp. PCC 6803
MDWHIAKHYDDILYYKAGGIAKIVINRPHKRNAFRPQTVFELYDAFCNAREDNRIGVVLLTGAGPHSDGKYAFCSGGDQSVRGEGGYIDDQGTPRLNVLDLQRLIRSMPKVVIALVAGYAIGGGHVLHLVCDLTIAADNAIFGQTGPKVGSFDGGFGSSYLARIVGQKKAREIWYLCRQYSAQEAERMGMVNTVVPVDRLEEEGIQWAKEILSKSPLAIRCLKAAFNADCDGQAGLQELAGNATLLYYMTEEGSEGKQAFLEKRPPDFSQYPWLP

SEQ ID NO: 28790 - DNA, 858 bp, Salmonella typhimurium LT2
  CDS (1)..(858): transl_table=11
atgatctatcctgatgaaacaatgctttacgcaccggtagaatggcacgactgctcggagggttacaccgacattcgttatgaaaaatccaccgacggtattgcaaaaatcaccattaatcgtccgcaggtgcgcaatgcatttcgtccgttgaccgtcaaagagatgattcaggcgctggcggatgcccgttacgacgacaacgtgggtgtgattattctgaccggcgaaggcgataaagcgttttgcgcgggcggcgaccagaaggtgcgcggcgattacggcggttatcaggatgactccggcgtgcatcacctgaacgtgctggatttccagcgccagattcgcacctgtccaaaaccggttgtcgcgatggtcgcgggatattccatcggcggtggtcatgtgctgcacatgatgtgtgacctgaccatcgcggcggaaaacgccatcttcggccagactggtccgaaagttggctcctttgacggcggctggggcgcttcgtatatggcgcgtatcgttggtcagaagaaagcgcgtgaaatctggttcctgtgccgccagtacgatgcgcaacaggcgctggacatggggctggttaacaccgtcgttccgctggcggatctggaaaaagagaccgtgcgctggtgccgcgaaatgttgcaaaacagtccgatggcgctgcgttgcctgaaagcggcgctgaatgccgattgtgacggtcaggccgggctgcaggagctggcgggcaacgctaccatgctgttctacatgacggaagaagggcaggaaggccgtaacgcctttaaccagaagcgtcagcctgacttcagcaaattcaaacggaacccataa

SEQ ID NO: 28791 - protein, 285 aa, Salmonella typhimurium LT2
MIYPDETMLYAPVEWHDCSEGYTDIRYEKSTDGIAKITINRPQVRNAFRPLTVKEMIQALADARYDDNVGVIILTGEGDKAFCAGGDQKVRGDYGGYQDDSGVHHLNVLDFQRQIRTCPKPVVAMVAGYSIGGGHVLHMMCDLTIAAENAIFGQTGPKVGSFDGGWGASYMARIVGQKKAREIWFLCRQYDAQQALDMGLVNTVVPLADLEKETVRWCREMLQNSPMALRCLKAALNADCDGQAGLQELAGNATMLFYMTEEGQEGRNAFNQKRQPDFSKFKRNP

SEQ ID NO: 28792 - DNA, 777 bp, Ralstonia solanacearum GMI1000
  CDS (1)..(777): transl_table=11
atgtcctaccaacacattctggtcgaaacgcgcggtcgtgtcggccttgtcacgctcaaccgccccaaggcgctcaacgcgctcaacgatgcgctgatggacgaactcggcgccgcgctgctcgccttcgatgccgacgagggcatcggcgccatgatcatcaccggtagcgacaaggcgtttgcagctggtgcggacatcggcgccatggccgactacgacttcgccaccgtctataagaatgaatacatcacgcgcaactgggaaaccatccggcgcatccgcaagccggtgatcgccgccgtggcgggctacgcgctgggcggcggctgcgagttggcgatgatgtgcgacatcatcctggcggcggacaccgccaggttcggccagccggagatcaaactcggcaccatgccgggcgcgggcggcacccagcgcctgccacgcgccgtctccaaggccaaggccatggacctctgcctgaccgcgcgcatgatgggcgccgatgaagctgagcgcgccggcttggtttcacgcgttatccccgccgacaagctcctggatgaagccttggcggccgccgagaccatcgccggcttctccctgccgaccgccatgatgatcaaggagtcgatcaatgcggcatacgaaaccacgctgagcgagggcgtgcgcctggagcgccgcctgttccacgccacatttgccacggaagaccagaaagagggcatgcacgctttcctggggaagcggcaacctgctttcaaacaccgctaa

SEQ ID NO: 28793 - protein, 258 aa, Ralstonia solanacearum GMI1000
MSYQHILVETRGRVGLVTLNRPKALNALNDALMDELGAALLAFDADEGIGAMIITGSDKAFAAGADIGAMADYDFATVYKNEYITRNWETIRRIRKPVIAAVAGYALGGGCELAMMCDIILAADTARFGQPEIKLGTMPGAGGTQRLPRAVSKAKAMDLCLTARMMGADEAERAGLVSRVIPADKLLDEALAAAETIAGFSLPTAMMIKESINAAYETTLSEGVRLERRLFHATFATEDQKEGMHAFLGKRQPAFKHR

SEQ ID NO: 28794 - DNA, 762 bp, Agrobacterium tumefaciens str. C58
  CDS (1)..(762): transl_table=11
atgatactggtcgagaagcgcgatgaggtgggcgtcatcacgctcaaccgccccaaggtgctcaacgccctcaattcggtgcttctgaaagagctgcggcacattctgtcttctttctcagccgatgattccatcggcgccatcatcatcaccggctcggaaaaggcatttgcggccggcgccgacatcaaggaaatgcaggggctggatttcgtcgatgcctatgtgggcgatttcctgggtggctgggatgaggttgcggccacacgcaagcctgttattgccgctgtttccggttttgcgctcggcggcggctgcgagctggcgatgatgtgcgatttcattatcgcttcggacacggcgaagttcggccagccggaaatcaccctcggcgtcattcccggcatgggcggatcgcagcggctgacgcgggcggtgggcaaggcgaaggccatggacctcgttctgaccggccgcatgatggatgcggcggaagccgagcgcgccggcctcgtatcgcgtatcgtgccggctgcagatctcatggaggtggcggtggaagctgcgacccgcattgcctcgctgtcgcgtgcttccgtgctcatggccaaggaaagcgtcaaccgctccttcgaggtgccgctcgccgaggggctgagatatgaacggcgtgccttccagtcgctctttgcgacggaggatcagaaggagggcatggcggccttcgttgaaaagcgcaaacccgctttccggaatcgctaa

SEQ ID NO: 28795 - protein, 253 aa, Agrobacterium tumefaciens str. C58
MILVEKRDEVGVITLNRPKVLNALNSVLLKELRHILSSFSADDSIGAIIITGSEKAFAAGADIKEMQGLDFVDAYVGDFLGGWDEVAATRKPVIAAVSGFALGGGCELAMMCDFIIASDTAKFGQPEITLGVIPGMGGSQRLTRAVGKAKAMDLVLTGRMMDAAEAERAGLVSRIVPAADLMEVAVEAATRIASLSRASVLMAKESVNRSFEVPLAEGLRYERRAFQSLFATEDQKEGMAAFVEKRKPAFRNR

SEQ ID NO: 28796 - DNA, 798 bp, Agrobacterium tumefaciens str. C58
  CDS (1)..(798): transl_table=11
atgagcgaaaaaatgacagaagaatttgtctcttacgaattgcggggtgacatcgcccttgttggcctcaacaggccacaaaagcgcaacgccatcagtgaccgtttcgttgaggctattgccgccgccgccgcgcgggcggaaaacgaagcccgtgccgccgtcattttcggtcatggcgatcatttctgcgccggtctcgatcttggcgaacatatccacaagacgccgatcgaaggcgtgcgcggctcccgccgctggcacgccgtgttctcgcagatcgagcatggcaccataccgtgggtttccgccctgcatggcgcggtcgtcggcggtgggttggagctggccgcctcgacccatctgcgggttgccgacgaaagcgccttctttgcgttgcccgagggccaacgcggcattttcgttgggggaggcggatccgtccgcatcgcgcggctgctgggggtcgcccgcatgagcgacatgatgctgactggacgggtcgcttcgtccgccgaagccgaacgctggaaccttgtgcaatatgctgtgccgcgcggcgaagcgcttgcgaaggcgcaggagctcgccaccattgcagcgtccaatgcacctttgtccaactatgccgttatcaacgcgcttccccgcattcaggatatggccaaggaggacgggctgttcgtcgagtccttcatttcctccttcacggcggccagccccgaagccgaagaacgcctgcgcgcctttcttgaaaaacgcgctacgcggctgaaagcaccggacacgacggcctga

SEQ ID NO: 28797 - protein, 265 aa, Agrobacterium tumefaciens str. C58
MSEKMTEEFVSYELRGDIALVGLNRPQKRNAISDRFVEAIAAAAARAENEARAAVIFGHGDHFCAGLDLGEHIHKTPIEGVRGSRRWHAVFSQIEHGTIPWVSALHGAVVGGGLELAASTHLRVADESAFFALPEGQRGIFVGGGGSVRIARLLGVARMSDMMLTGRVASSAEAERWNLVQYAVPRGEALAKAQELATIAASNAPLSNYAVINALPRIQDMAKEDGLFVESFISSFTAASPEAEERLRAFLEKRATRLKAPDTTA

SEQ ID NO: 28798 - DNA, 777 bp, Agrobacterium tumefaciens str. C58
  CDS (1)..(777): transl_table=11
atggcggatgaactgctgcacgaggcgcgccaagatgttctatggctgacgctcaaccggccggaggtacacaacgccctcaatgccgcgatgacggaggcactcacggatgcgatccgcgctgcatccggcgatggcagcctgcgtgccgtggtgataacggcagccggagaccgcagcttctgttcgggagccgatctgaaggaaagtgccggcggcatgttcctctcgcccaacgggacgaaccccattgccaacgtgatgcgcgcgatagagagctgcgacaagcccgtcattgcccgcatcaatggccgggttctggccggcgggctcggccttgtcgccacctgcgatcttgcctatgccgccgatcatgccgaattcggcctgccggaagtgcgggtcgggcttttcccgaccatggtggcggcgaagttgctggcaaaaatgcctttgggcgggcttcaggaaatggcctatctcggccagccgatcaccgctgcggaggcaaaaggtctcggcctcgtcaatcgcacggcgccgctggctgaactcgatggccttatcgaagaggttctcgcaaagctgcgacagaacgcgccgggcgccatcgccgcgggaaaggcggccctgctggcgatgcgcgacatgccatcggatgaacggcttgcctttgcggaagacgccatagcagccatcagcggcagcgacgaagcgcgcgaagggcggcaggcttttgcagaaaagcgccctcccaaatggatcggcagatcctga

SEQ ID NO: 28799 - protein, 258 aa, Agrobacterium tumefaciens str. C58
MADELLHEARQDVLWLTLNRPEVHNALNAAMTEALTDAIRAASGDGSLRAVVITAAGDRSFCSGADLKESAGGMFLSPNGTNPIANVMRAIESCDKPVIARINGRVLAGGLGLVATCDLAYAADHAEFGLPEVRVGLFPTMVAAKLLAKMPLGGLQEMAYLGQPITAAEAKGLGLVNRTAPLAELDGLIEEVLAKLRQNAPGAIAAGKAALLAMRDMPSDERLAFAEDAIAAISGSDEAREGRQAFAEKRPPKWIGRS

SEQ ID NO: 28800 - DNA, 882 bp, Brucella melitensis 16M
  CDS (1)..(882): transl_table=11
atgccggtccaatttgcgccacggaattttaaggcggggcagccttgccggcacattatcccggatgagccgggctgtcacgcgctgatgaaggaggaacgggtttacatggcctatgaaacaatcatcgttgagacgcgtgacagcgttggtctcatccgtctcaaccgtccgcaggcgctcaacgcgctcaatcgcgccgtgcttgaggagctgaccgatgcgcttgccgccttcgacgcggatggcaaggtcggcgccgtggtgctgaccggctcggaaaaggctttcgccgccggggccgacatcaaggaaatgcagttgatcaatttcgtcgatgcctatttgcaggacatgttcgccgactggcagaaggtggatcgtatccgcaagccgattatcgcggctgtttcgggctatgcgctgggcggcggctgcgaactcgccatgatgtgcgatttcatcatcgcgggcagcaatgcgaaattcggccagccggaaatcacgctgggcgccattcctggcatgggcggctcgcagcgcctgacgcgctatgtcggcaagtccaaggctatggatatgtgcctgacgggccgcatgatggatgcagccgaagcggagcgttgcggccttgtttcccgcgttgtcgcaccggaggctcttctggaagaggcactgaaagcagccgaacgcatcgcatccttctcgcgcgtctcggtctatatggccaaggaagcggtcaaccgcgcctatgaaacgacgctggacgagggcctgcgtttcgagcgccgcctgttccattcgcttttcgcgaccgaagaccagaaggaaggcatgtccgctttcgttgataaacgtaccccttccttcaagaaccgctga

SEQ ID NO: 28801 - protein, 293 aa, Brucella melitensis 16M
MPVQFAPRNFKAGQPCRHIIPDEPGCHALMKEERVYMAYETIIVETRDSVGLIRLNRPQALNALNRAVLEELTDALAAFDADGKVGAVVLTGSEKAFAAGADIKEMQLINFVDAYLQDMFADWQKVDRIRKPIIAAVSGYALGGGCELAMMCDFIIAGSNAKFGQPEITLGAIPGMGGSQRLTRYVGKSKAMDMCLTGRMMDAAEAERCGLVSRVVAPEALLEEALKAAERIASFSRVSVYMAKEAVNRAYETTLDEGLRFERRLFHSLFATEDQKEGMSAFVDKRTPSFKNR

SEQ ID NO: 28802 - DNA, 783 bp, Clostridium perfringens str. 13
  CDS (1)..(783): transl_table=11
atggaattaaataatgtaatctttgaaaaagagggaaacattggggttttaacaattaacagacctaaggcattaaatgcactaaactcagaaactttaaaagacttagatactgctatagatcatatagaaaaacaagatgatatatatgttgttattttaacaggtgctggagataaagcatttgttgcaggtgctgatatagcagaaatgaaagatctaaatgaagaagagggtaaagaatttggacttttaggtaataaagtgtttagaagattagaaaatttagacaagcctgtaatcgctgctataaacggtttcgctttaggtggtggatgtgaaatttctatggcttgtgatataagaatagcaactacaaaggctaagtttgctcaacctgaggttggattaggaataactccaggatttggtggaactcaaagattaccaagaatagttggacctggtaaggctaaagaacttatttacacaggagacatgataaaagctgatgaagctttaagaattggtttagtaaataaggttgttgaaccagagaatttaatggaagaagcaatgtcattagctaagaaaatatctaataatgcaccaatagctgttaagttatgtaaagatgcaatcaatagaggaattcaagttgatatagattcagctgtagttatagaagctgaagattttggaaaatgttttgctacagaagatcaaacagaaggtatgagtgcttttgtagagagaagagaaaagaactttaaaaacaagtaa

SEQ ID NO: 28803 - protein, 260 aa, Clostridium perfringens str. 13
MELNNVIFEKEGNIGVLTINRPKALNALNSETLKDLDTAIDHIEKQDDIYVVILTGAGDKAFVAGADIAEMKDLNEEEGKEFGLLGNKVFRRLENLDKPVIAAINGFALGGGCEISMACDIRIATTKAKFAQPEVGLGITPGFGGTQRLPRIVGPGKAKELIYTGDMIKADEALRIGLVNKVVEPENLMEEAMSLAKKISNNAPIAVKLCKDAINRGIQVDIDSAVVIEAEDFGKCFATEDQTEGMSAFVERREKNFKNK

SEQ ID NO: 28804 - DNA, 939 bp, Drosophila melanogaster
  CDS (1)..(939)
atgtcgctctcccgcctgaacactctgatgaaactaacgcccaagcccacggccatcggatcccttaagatgcagagaaacctttccgccctcccggaatccggacccaccggctctttcaagacgctggccgtcagttcgcccaagccgttcgtctttcatgtggagctccatcggcccagcaagttcaacgccataagcaagcagatgtggctggagatcaaggagtgcttcgacggactggccactaatcccgactgccgggctatcgttttgtccgcctccggaaagcacttcaccgccggcatcgacctcaacgacatgataaacgtgggccaaacgctggccgagaccgatgactacgcccgcaagggcgtctccatggagcgaatgatcaaggtgtaccaggactcaatcagcagcctggagcactgccccaagccggtcatcacggcggtgcacaaggcgtgcatcggcgccggcgtggacctgattaccgccgccgacattcgctactgcaccgaggacgcctttttccaggtcaaggaggtggacatcggcatggccgccgacgtgggcaccctgcagcgtctgcccaaggcagtgggcagtcagtccctcgcccgcgagctgtgcttcactgggcgcaaattcgaggccgccgaggcccactcctcgggcctggtgagtcgcctcttcccagacaaggattccctgctgaccggagccctggccgtggccgagctcatcgctagcaagagtcccgtcgccgtaaagacaaccaaggagagcctcgtgtactccctggagcacaccaatcaagagggcttggatcacattctcctgctgaacaagctcaacctgctgtcggaggacttcgcccaggctgtggccgcccagttgacgaaggacgataagccagtgttcgccaagctgtga

SEQ ID NO: 28805 - protein, 312 aa, Drosophila melanogaster
MSLSRLNTLMKLTPKPTAIGSLKMQRNLSALPESGPTGSFKTLAVSSPKPFVFHVELHRPSKFNAISKQMWLEIKECFDGLATNPDCRAIVLSASGKHFTAGIDLNDMINVGQTLAETDDYARKGVSMERMIKVYQDSISSLEHCPKPVITAVHKACIGAGVDLITAADIRYCTEDAFFQVKEVDIGMAADVGTLQRLPKAVGSQSLARELCFTGRKFEAAEAHSSGLVSRLFPDKDSLLTGALAVAELIASKSPVAVKTTKESLVYSLEHTNQEGLDHILLLNKLNLLSEDFAQAVAAQLTKDDKPVFAKL

SEQ ID NO: 28806 - DNA, 900 bp, Drosophila melanogaster
  CDS (1)..(900)
atgtcaatgttaataaaaagagcgtctggtttagctcgacagttagcccggccacttgttgcatcacgtaatttggcgtcggcagcgccctatggcgatggaactgaagttctcgtggagcgtttggatggagctcggcagggtatctcagttattggcctaaaccgaccagcagcaaagaattcctttagccggggaatggtggagaccttcaacgatgtcctggaagatataaagaaggataatggatcgagggtggttgtattgaggagtctgagccctggaatcttctgtgccggagcggatttgaaagagcgaaaaggcatgactcccgaggaagccaccgaatttgtaaaagagctcaggggactgcttattgccattgagcagctgcccatgccggtaatcgccgctgtggatggagctgctctcggcggaggtctggaaatggctctggcctgtgacatccggactgctgctagcgacacgaagatgggtctggtggagacaaggttagccatcataccaggagctggtggcacccaaagactgccccgcattctgtcccctgctctggccaaagaactcattttcacggcacgagtgtttaacggagcagaggcgaaagatctgggtctggttaaccatgtagtgaaacagaacgaaacccaggatgccgcctatcagcaggcacttaaattggcagaggaaattctcccgaatgggccagtgggcgtgcgaatggccaaactggccattgacaagggcatgcaggtggacctggccaccggctactccatcgaagagatctgctactcgcaggtgatacccactaaggatcgtttggagggactcgctgcctttgccgagaagcggaagcccgtctacaagggggagtaa

SEQ ID NO: 28807 - protein, 299 aa, Drosophila melanogaster
MSMLIKRASGLARQLARPLVASRNLASAAPYGDGTEVLVERLDGARQGISVIGLNRPAAKNSFSRGMVETFNDVLEDIKKDNGSRVVVLRSLSPGIFCAGADLKERKGMTPEEATEFVKELRGLLIAIEQLPMPVIAAVDGAALGGGLEMALACDIRTAASDTKMGLVETRLAIIPGAGGTQRLPRILSPALAKELIFTARVFNGAEAKDLGLVNHVVKQNETQDAAYQQALKLAEEILPNGPVGVRMAKLAIDKGMQVDLATGYSIEEICYSQVIPTKDRLEGLAAFAEKRKPVYKGE

SEQ ID NO: 28808 - DNA, 888 bp, Drosophila melanogaster
  CDS (1)..(888)
atggccaacattgctaagatcttcgctagccgcgcccagtgcgtcctgcaggcagccgcccgtcagccacaggtggccacccgtttcagcagctcctccaccaacaacaactgggagtacatcaagaccgaagtggccggcgagggcaagaacgtaggcgtgatcaccctgaaccgccccaaggccctgaatgccctctgcaatggcctgatgaaggagctgtccaccgcattgcagcaattcagcaaggataagaccatctccgccatcgttttgacgggcagcgagaaggccttcgccgctggcgctgatattaaggagatggtgggcaacacctactcgcagtgcatccagggcaacttcttgaacgactggacagaggtggcccgcacccagaagcccatcattgctgccgtgaatggttacgccttgggcggtggctgtgagctggccatgatgtgcgacatcatatatgccggtgacaaggccaagtttggtcagcctgaaattgccctgggcaccattcccggtgccggtggcacccagcgtctgacccgcgtcgttggcaagtccaaggccatggaaatgtgcctcaccggcaatatgatcggcgcccaggaggctgagaagctgggtctggccagcaaggtggtgcccgccgaccagttattgggcgaggccgtcaagctgggcgagaagatcggcacccactccaatctgatcgtgcagctgtgcaaggaggcggttaacacggcttacgagaccactctccaagagggcctgaagttcgagcgtcgcaccttccatgccacgttctccacggccgatcgcaaggagggcatgaccgctttcgccgagaagcgccctgccaagtttaccaacgagtaa

SEQ ID NO: 28809 - protein, 295 aa, Drosophila melanogaster
MANIAKIFASRAQCVLQAAARQPQVATRFSSSSTNNNWEYIKTEVAGEGKNVGVITLNRPKALNALCNGLMKELSTALQQFSKDKTISAIVLTGSEKAFAAGADIKEMVGNTYSQCIQGNFLNDWTEVARTQKPIIAAVNGYALGGGCELAMMCDIIYAGDKAKFGQPEIALGTIPGAGGTQRLTRVVGKSKAMEMCLTGNMIGAQEAEKLGLASKVVPADQLLGEAVKLGEKIGTHSNLIVQLCKEAVNTAYETTLQEGLKFERRTFHATFSTADRKEGMTAFAEKRPAKFTNE

SEQ ID NO: 28810 - DNA, 783 bp, Thermoanaerobacter tengcongensis MB4
  CDS (1)..(783): transl_table=11
gtggaatataaaaacatagaagtgaaaattgaaaaggggattgccacaatcacaattaacaggccaaaggctttaaatgcattaaacacagagactcttgaagaattagaaaatgttttagaagttttgcaaaatgacgatggggtaaaagttatagttataactggtgcaggagaaaaggcatttgtggcaggagcagatatttctgaaatgaaggacatgagcgtatttgaggcgaaaaagtttgctgagttaggtcagaaggtatttagaaagattgaacttgtgaagaagccagtcattgctgctgtgaatggatacgctcttggaggaggatgtgaacttgctttggcttgcgatataaggattgcaagtcgtaatgcaaaatttggtcagccagaagtaggacttggaattataccgggatttggtggtacgcagaggctacctcgaattgtaggtgtttcaaaagcgaaagaactcatatacactggagatatgatagatgcagaggaggctttgagaataggccttatttcaaaagtagtagaacaagataaacttttagaggaagcttatggtattgcaaaaaagataatgtcaaaagggcttgtggcagtatcactggctaaagaagctataaacaaaagcctcgaagttgatatcgattcaggcatggaatatgaggccaatgcttttgccatgtgttttggtacacaggatcaaaaagagggcatggcagcttttttagagaagagagctcctaaatttgaaggaagatga

SEQ ID NO: 28811 - protein, 260 aa, Thermoanaerobacter tengcongensis MB4
MEYKNIEVKIEKGIATITINRPKALNALNTETLEELENVLEVLQNDDGVKVIVITGAGEKAFVAGADISEMKDMSVFEAKKFAELGQKVFRKIELVKKPVIAAVNGYALGGGCELALACDIRIASRNAKFGQPEVGLGIIPGFGGTQRLPRIVGVSKAKELIYTGDMIDAEEALRIGLISKVVEQDKLLEEAYGIAKKIMSKGLVAVSLAKEAINKSLEVDIDSGMEYEANAFAMCFGTQDQKEGMAAFLEKRAPKFEGR

SEQ ID NO: 28812 - DNA, 807 bp, Streptomyces coelicolor A3(2)
  CDS (1)..(807): transl_table=11
atgagcgacactggccacctcccgccgcccgacctcggcaccgacctcgtcctgctggacgtcaccgaccgggtcgccatcctcaccctgaaccggcccgccaagctcaacgccgtcacccccggcatgtcccgggccctggtgcgggccatcgagtggtgcgacacgaccgacgaggtccgggcactcgtcgtcacgggggcgggcgaacgctccttcagcgtcggctcggacatcggcgcactcgaccagtacgccaccccgtgggacttccgcaaccgcgtcgactactgcgacgccatccgcgccgcccgcaccccgaccgtcgccgcggtcgggggatacgccctgggcggagggctggagaccgccctgtcctgcgacatccggctcgccgcggacaccgcgtccttcggcgcaccggagatcacgctcggctggatcgggggcggcggcatgaccgccttcctcagccgcgcggccggcccgggcaacgcggcactgatgctgctcaccggcgaacgcatcgacgccgaacgggcgttggcctggcatctggtgagcgaggtcgtgccccgcgccggtctgctcgaccgggcccgcgccctcgccgccgtgatcgcctcccgcgccccggtggcggccgagacggcgaagatcaacctgcgggccgccggaaacctgcccgaggaccaggcgctcgcctacgagcgcgacctgcagaccatctgcttcgccaccgaggacgcggcggagggcaggcgcgcgttcgccgagaagcgctcccccgtcttccacaagcgctga

SEQ ID NO: 28813 - protein, 268 aa, Streptomyces coelicolor A3(2)
MSDTGHLPPPDLGTDLVLLDVTDRVAILTLNRPAKLNAVTPGMSRALVRAIEWCDTTDEVRALVVTGAGERSFSVGSDIGALDQYATPWDFRNRVDYCDAIRAARTPTVAAVGGYALGGGLETALSCDIRLAADTASFGAPEITLGWIGGGGMTAFLSRAAGPGNAALMLLTGERIDAERALAWHLVSEVVPRAGLLDRARALAAVIASRAPVAAETAKINLRAAGNLPEDQALAYERDLQTICFATEDAAEGRRAFAEKRSPVFHKR

SEQ ID NO: 28814 - DNA, 744 bp, Streptomyces coelicolor A3(2)
  CDS (1)..(744): transl_table=11
atgaccccgcccgcccacgtcgaccgcacacgcgcgcggggcgtcgagaccctcaccctcgactccccgcacaaccgcaacgcgctgtccgccgccctcgtcgacggcctggccgccgccctcaccgcggcgggcgacgaccccggcgtccgtgccgtcgtgctcacccacaccggcaacaccttcagcgccggcgccgacctgcgcgacccgcccgacccggacgccctggtcggtctcttccggcggatcatcgagctgccgaaaccggtgatcgcccgcgtcgccgggcacgtccgcgcgggcgggctcggcctggtcgccgcctgcgacatcgcggcggcgtccaccgagtcgaccttcgccttcaccgaggtccgcatcggcgtggcgcccgccgtcatctccctgaccctgctgccccgcgccgacccccgcgccctcgcccgccactacctcaccggcgagcgcttcgacgccgccgaggccgcccgcgccggcctggtcaccgcggcgggcgacgacgtggacgccgtactcgaacccgtcctcgacggtgtgcgccgtgccgccccgcagggcctggccgagacgaaacggctgctcacggctagggtgctggaggccttcgaccgggacgcggccgacctgaccgcgctctcggcccggctgttcgcctccccgcaggcccgcgaggggatgacggccttcctcgaacgacgggatccggaatgggtggtgtga

SEQ ID NO: 28815 - protein, 247 aa, Streptomyces coelicolor A3(2)
MTPPAHVDRTRARGVETLTLDSPHNRNALSAALVDGLAAALTAAGDDPGVRAVVLTHTGNTFSAGADLRDPPDPDALVGLFRRIIELPKPVIARVAGHVRAGGLGLVAACDIAAASTESTFAFTEVRIGVAPAVISLTLLPRADPRALARHYLTGERFDAAEAARAGLVTAAGDDVDAVLEPVLDGVRRAAPQGLAETKRLLTARVLEAFDRDAADLTALSARLFASPQAREGMTAFLERRDPEWVV

SEQ ID NO: 28816 - DNA, 801 bp, Streptomyces coelicolor A3(2)
  CDS (1)..(801): transl_table=11
atgagcgaggagcggttcggagagttcgtcctggtgcggcggcgcggggaggggcatgtcgcggaactcgcgctcgaccggccgaaggccatgaacgccgtgtcgaccgcgatggcccgttccgtgggcgcggcctgcgcggcgctgggcgaggaccggagcgtgcgggtggtggtgctgacctcgacgcacgagcgggcgttctgcgtgggtgcggacctgaaggagcgcaactccttcaccgacgccgatctgctgcggcagcggccggtgacgcgcggggcgtacaccgcggtgctggagctgccggtgccgacggtcgcggccgtgcatgggttcgcgctgggtggcgggttcgagctggcgctgtcgtgcgacgtgatcgtggccgaccccacggccgtggtggggctgccggaggtgtcggtgggggtgatcccgggcggcggcggtacgcagctgctgccgcgccgggtgggtgcggcgcgagcggccgagctggtgttcacggcacggcgggtggcggccgaggaggcacgcgagctggggctcgtggaccagctggtgccggaggggcgggaccgggaggaggcgctggagctggccgcccggatggccgcgaactcgcccgtgggcctgcgcgcggccaagcgcgcgctgcgcctggggcacggactggacctgcgcgcgggactcgaggtcgaggacgcggcgtggcgttcggtggcgttctcgggggaccgcgccgagggagtggcggcgttcaacgagaagcgggcgccgcggtggccgggcgagtga

SEQ ID NO: 28817 - protein, 266 aa, Streptomyces coelicolor A3(2)
MSEERFGEFVLVRRRGEGHVAELALDRPKAMNAVSTAMARSVGAACAALGEDRSVRVVVLTSTHERAFCVGADLKERNSFTDADLLRQRPVTRGAYTAVLELPVPTVAAVHGFALGGGFELALSCDVIVADPTAVVGLPEVSVGVIPGGGGTQLLPRRVGAARAAELVFTARRVAAEEARELGLVDQLVPEGRDREEALELAARMAANSPVGLRAAKRALRLGHGLDLRAGLEVEDAAWRSVAFSGDRAEGVAAFNEKRAPRWPGE

SEQ ID NO: 28818 - DNA, 804 bp, Streptomyces coelicolor A3(2)
  CDS (1)..(804): transl_table=11
atggccgacaccgtgctctacgaagtgagcgacgggctcgcgacgatcacgctgaaccgccccgaggcgatgaacgcgctgaacatcgagaccaaggtcgcgctccgggacgcggtgcgctccgcggcggcggacgacgccgtacgggcggtgctgctgaccgcggccggggaccgggcgttctgtgtcggccaggacctcaaggagcacatcgggctgctggccgccgaccgggagacgggctcggggcagacgatgagcacggtgcgcgagcactacaacccgatcgtccgggcgctggccggcgcggagaagccggtggtcgccgccgtgaacggcgtggcggccggcgcggggctcggtttcgcgctcgccgcggactaccggatcgtcgcggacacggcggcgttcaacacgtccttcgcgggcgtggcgctcaccgcggactccggcatctcctggacgctgccgcgcgtcgtcggccccggccgcgccgccgacctgctgctcttcccgcgcagcatccgcgcgcaggaggcgtacgagctgggcatcgccacccgtgtcgtccccgccgccgacctgcgcgccgaggccgagaagacggcgcgggcgctggccgaggggccgacggtggcgtacgcggcgctgaaggaggcgatggcgtacgggctgacgcactcgctgtccgagacgctggacaaggaggacgagcttcagtcccgggcgggcgcctccgaggaccacgcgatcgcggtgcgcgcgttcgtcgagaaggggaagccgaagtatctgggccggtag

SEQ ID NO: 28819 - protein, 267 aa, Streptomyces coelicolor A3(2)
MADTVLYEVSDGLATITLNRPEAMNALNIETKVALRDAVRSAAADDAVRAVLLTAAGDRAFCVGQDLKEHIGLLAADRETGSGQTMSTVREHYNPIVRALAGAEKPVVAAVNGVAAGAGLGFALAADYRIVADTAAFNTSFAGVALTADSGISWTLPRVVGPGRAADLLLFPRSIRAQEAYELGIATRVVPAADLRAEAEKTARALAEGPTVAYAALKEAMAYGLTHSLSETLDKEDELQSRAGASEDHAIAVRAFVEKGKPKYLGR

SEQ ID NO: 28820 - DNA, 768 bp, Streptomyces coelicolor A3(2)
  CDS (1)..(768): transl_table=11
atgaccgtacatctcgaagtcgccgagggcgtcggcacgctgcgcctggaccgtccgcccatgaacgcactggacgtcgccacccaggaccggctgaaggagctggccgaggagatcacccggcgcgaggacgtgcgcgccgtggtgatccacggcggtgagaaggtgttcgcggcgggcgcggacatcaaggagatgcaggtgatggaccacgcggcgatgatcgcgcggtcttgcgccctgcaggactccttcaccgcggtggcccgcatccccaagccggtggtcgcggcggtgaccggctacgcgctgggcggcggctgcgaactcgccctgtgcgccgacttccgcatcgcgggggagaacgccaagctgggccagcccgagatcctgctcggcctgatccccggcgcgggcggcacccagcggctgtcccggctgatcggcccctccaaggccaaggacctgatcttcacgggccgtcaggtgaaggccgacgaggcgctggcgctcggcctggtggaccgggtggtcccggccgccgaggtgtacgagcaggcgcacgcctgggccgcgcggctcgccaagggccccgccatcgcactgcgcgcggcgaaggaggcgatcgacacgggtctggagacggacatcgagaccggcctcgccgtcgagcgcaactggttcgcgggcctgttcgccaccgaggaccgcgagcgcgggatgcgcagcttcgtggaagagggccccggcaaggccacgttcctctga

SEQ ID NO: 28821 - protein, 255 aa, Streptomyces coelicolor A3(2)
MTVHLEVAEGVGTLRLDRPPMNALDVATQDRLKELAEEITRREDVRAVVIHGGEKVFAAGADIKEMQVMDHAAMIARSCALQDSFTAVARIPKPVVAAVTGYALGGGCELALCADFRIAGENAKLGQPEILLGLIPGAGGTQRLSRLIGPSKAKDLIFTGRQVKADEALALGLVDRVVPAAEVYEQAHAWAARLAKGPAIALRAAKEAIDTGLETDIETGLAVERNWFAGLFATEDRERGMRSFVEEGPGKATFL

SEQ ID NO: 28822 - DNA, 828 bp, Streptomyces coelicolor A3(2)
  CDS (1)..(828): transl_table=11
atgagtcctttcaccggctccgccgcccccacccccgagtggcggcacctgcgcgtcgagatcaccgacggcgtcgccaccgtcaccctcgcccgccccgacaagctcaacgccctcaccttcgaggcctacgccgacctgcgcgacctgctcgccgagctgtcccgccggcgggcggtacgggcgctggtgctggccggagagggccgcgggttctgctccggcggcgacgtggacgagatcatcggcgcgaccctgtccatggacaccgcccggctgctggacttcaaccggatgaccggccaggtggtgcgggcggtacgggagtgcccgttcccggtgatcgccgccctgcacggggtcgccgccggagcgggcgcggtcctcgccctggccgccgacttccgcgtcgccgacccgtccacccgcttcgccttcctcttcacccgcgtcggcctctccggcggcgacatgggtgccgcctacctgctgccccgcgtggtcggcctcggccacgccacccggctgctgatgctcggcgacacggtccgcgcacccgaggccgagcggatcggcctgatcagcgagctgaccgaagagggccgcgccgacgaggccgcccgcaccctggcccgccgtctcgccgacggcccggccctggcgcacgcccagaccaaggccctcctcacggccgagctggacatgccgctggcggccgcggtggaactggacgcgtcgacccaggccctgctgatgacgggcgaggactacgcggaattccacgccgccttcacggaaaaacgccccccgaagtggcaagggaggtag

SEQ ID NO: 28823 - protein, 275 aa, Streptomyces coelicolor A3(2)
MSPFTGSAAPTPEWRHLRVEITDGVATVTLARPDKLNALTFEAYADLRDLLAELSRRRAVRALVLAGEGRGFCSGGDVDEIIGATLSMDTARLLDFNRMTGQVVRAVRECPFPVIAALHGVAAGAGAVLALAADFRVADPSTRFAFLFTRVGLSGGDMGAAYLLPRVVGLGHATRLLMLGDTVRAPEAERIGLISELTEEGRADEAARTLARRLADGPALAHAQTKALLTAELDMPLAAAVELDASTQALLMTGEDYAEFHAAFTEKRPPKWQGR

SEQ ID NO: 28824 - DNA, 774 bp, Streptomyces coelicolor A3(2)
  CDS (1)..(774): transl_table=11
gtggatagcatccggtccatggagccgcagctgctgcaccgggtcgccgactcggtcgccaccgtcgtcgtgcaccacccggccaagcgcaacgccatgacgaccgcgatgtggcgggcgctgcccggcctgctcgacggcctggccgccgatcccggggtgcgggcgctggtgctcaccggcgagggcgcgacgttctgcgccggggccgacatctcgaccctgcgcgagtcggcggaggaggcgcagggtctggcggtgcgggccgaggaggccctcgccgcgtttcccagaccgacgctcgcggcgatcaggggacactgcgtgggcggcggggcgcagttggcggcggcgtgcgacctgcggttcgccgaggagacggcgctgttcggcgtgaccccggccaagctgggggtcgtgtatccggcctccgcgacccggcggctggtggccctgaccgggcccgccaccgcgaagtacctgctgttcggcggcgagttgatcgatgccgcgcgggcactgcgcaccggcctggtggacgaggtgctgccggagggcgggctcggcaagcgggtggcggagttcacccgggtgctggtgtcgcgttccctgctgacgcaggccgcggcgaaggagttcgccgccggacgcacggaccgggacgcccactgggccgcccaggcgcggggcagcggcgacaccgcggagggggtcgccgccttcctggagcgcaggcagccgcgattcggctggaacgggcctagttcaggatga

SEQ ID NO: 28825 - protein, 257 aa, Streptomyces coelicolor A3(2)
MDSIRSMEPQLLHRVADSVATVVVHHPAKRNAMTTAMWRALPGLLDGLAADPGVRALVLTGEGATFCAGADISTLRESAEEAQGLAVRAEEALAAFPRPTLAAIRGHCVGGGAQLAAACDLRFAEETALFGVTPAKLGVVYPASATRRLVALTGPATAKYLLFGGELIDAARALRTGLVDEVLPEGGLGKRVAEFTRVLVSRSLLTQAAAKEFAAGRTDRDAHWAAQARGSGDTAEGVAAFLERRQPRFGWNGPSSG

SEQ ID NO: 28826 - DNA, 783 bp, Xanthomonas campestris pv. campestris str. ATCC 33913
  CDS (1)..(783): transl_table=11
atgtccaatcacgtcattctgatcgcagaccacgccaatgtccggaccattacggtcaatcgcccggacaaactgaacgccttgaaccagcagaccatgcaggcgctggatgcggcatttgcagaggcggcagcggccgaagacgtgcgcgtggtcgtgctgaccggcgccggccccaaggctttcgtggccggcgcggacatcgccgagatgagcgagctctccgcaatgcagggccgcgagttttcgctgctggggcagcggctgatgcgcaggatcgaacgcatgccaaagccggtgatcgccatggtcagcgggttcgcgttgggcggcgggctggaactggcgatggcctgccacctgcgcattgccgccgccactgcacggatcgggcaaccggaaatcaatctgggcctgatcccgggcttcggcggcacgcagcgcctgctccgcctcaccggccgcgccgccgcattggagctgtgcctgctcggcacgccgatcgatgccgcgcgcgccctgcaactgggcctggtcaatcgcgtggtcgaaccagaggccttgcaggcagaaaccaccgcactggccgagcgcctggccggctccgcaccgctcgcactgcgcggcatcctggatgcggtggtggtgggcggcgaatgcggcatggaagaaggcctgcagctggaaaccgcgcaattttccctgctgtttgcgaccgacgacatgcgcgaaggcacacgtgcgtttctcgacaagcgccccgcgcagttccgcaatcgctga

SEQ ID NO: 28827 - protein, 260 aa, Xanthomonas campestris pv. campestris str. ATCC 33913
MSNHVILIADHANVRTITVNRPDKLNALNQQTMQALDAAFAEAAAAEDVRVVVLTGAGPKAFVAGADIAEMSELSAMQGREFSLLGQRLMRRIERMPKPVIAMVSGFALGGGLELAMACHLRIAAATARIGQPEINLGLIPGFGGTQRLLRLTGRAAALELCLLGTPIDAARALQLGLVNRVVEPEALQAETTALAERLAGSAPLALRGILDAVVVGGECGMEEGLQLETAQFSLLFATDDMREGTRAFLDKRPAQFRNR

SEQ ID NO: 28828 - DNA, 783 bp, Xanthomonas axonopodis pv. citri str. 306
  CDS (1)..(783): transl_table=11
atgtccaatcacgtcattctgatcgccgatcacgccagcgtccggacgattacggtcaaccggccggacaaactgaacgctttgaaccaggcgaccatgcaggcgctggatcaggcgttccaagacgcagccgctgcggacgatgtacgcgccgtgattctcaccggcgccggccccaaggccttcgtggcgggtgcggatatcgcggaaatgagtgatctgtcggcaatccagggccgcgcattctcgctgctgggccagcggctgatgcgccggatcgaacgcatgcccaagccggtgatcgcgatgatcaatggcttcgcgctggggggcggcctggagctggcgatggcgtgccacctgcgcatcgccgcagcaacagcgcgcctggggcaaccggaaatcaatctcggcctgatccctggctttggcggcacgcagcgcctgctgcgtctgaccggccgcgccgcagcgctggaactgtgcctgctcggcctgccgatcgacgcagcccgcgcactgcaactgggcctggtcaatcgcgtggtcgaagcggatgccttgcacgaagagacgctggcgctcgcgcaacgcctggcaaacgcggcgccgctggcgctgcgcggcattctcgatgcggtgatgttcggcggcgaatgcgccatcgaagaaggcctgcagctggaagccgcgcaatttgcgttgttattcgccactgacgatatgcgcgaaggcactcgcgcgtttctcgacaaacgccctgcacagttccgcaatcgttga

SEQ ID NO: 28829 - protein, 260 aa, Xanthomonas axonopodis pv. citri str. 306
MSNHVILIADHASVRTITVNRPDKLNALNQATMQALDQAFQDAAAADDVRAVILTGAGPKAFVAGADIAEMSDLSAIQGRAFSLLGQRLMRRIERMPKPVIAMINGFALGGGLELAMACHLRIAAATARLGQPEINLGLIPGFGGTQRLLRLTGRAAALELCLLGLPIDAARALQLGLVNRVVEADALHEETLALAQRLANAAPLALRGILDAVMFGGECAIEEGLQLEAAQFALLFATDDMREGTRAFLDKRPAQFRNR

SEQ ID NO: 28830 - DNA, 774 bp, Pseudomonas putida KT2440
  CDS (1)..(774): transl_table=11
atggcattcgaaaccatcctgttggacatccacggcaaggttggcctgatcaccctcaaccggccgcaggcgctcaatgcgctgaacgcgcagattgtcggcgagatcaaccaggctctggaccagctcgagcgcgacccgaacatcggctgcgtggtgctgacaggctcggccaaagcctttgccgctggcgccgacatcaaggaaatggccgagctgcaatacccgcagatctacgtcgacgacctgttcagcgacgctgaccgcatcgccaatcgccgtaagccgatcattgctgctgtgtctggatttgccttgggcggcggctgtgagctggcgatgatgtgcgactttatcctcgctgcggacaatgccaaatttggtcaaccggaaatcaacctgggcgtgctgccgggcatgggcggcacccagcgcctgacgcgtgcggtgggcaaggccaaggccatggagctttgcctgaccggccgcctgatgggcgcggaagaagccgagcgtgcaggcctggtggcgcggatcgtgccgcaggcagagctggtggaagaggcgctgaaggtggcggcgaccattgccagcaagtcgattccggtgagcatgatggtcaaggagagcgtcaaccgggcatttgaagtcaccctcagcgagggggttcgctttgagcgtcgggtcttccatgcggctttctccaccgaagaccagaaagaaggcatggccgcattcatcgccaagcgtgaggcacagttcaaggaccgttga

SEQ ID NO: 28831 - protein, 257 aa, Pseudomonas putida KT2440
MAFETILLDIHGKVGLITLNRPQALNALNAQIVGEINQALDQLERDPNIGCVVLTGSAKAFAAGADIKEMAELQYPQIYVDDLFSDADRIANRRKPIIAAVSGFALGGGCELAMMCDFILAADNAKFGQPEINLGVLPGMGGTQRLTRAVGKAKAMELCLTGRLMGAEEAERAGLVARIVPQAELVEEALKVAATIASKSIPVSMMVKESVNRAFEVTLSEGVRFERRVFHAAFSTEDQKEGMAAFIAKREAQFKDR

SEQ ID NO: 28832 - DNA, 792 bp, Pseudomonas putida KT2440
  CDS (1)..(792): transl_table=11
atgactttccagcacatcctgttttccatcgaggacggcgttgccttcctttcattgaaccgccccgagcagctgaacagcttcaatacggccatgcacctggaggtgcgcgaagcgctcagacaagtgcgccagagcagtgacgcgcgggtgctgctgctgacggctgaaggccgcggcttctgcgccggccaggacctgtccgaccgcaacgttgccccaggcgccgagatgccagacctgggccagtcgatcgacaagttctacaacccgctggtgcgcaccctgcgcgacctgcctttgccggtgatatgtgcggtcaacggcgtggcggccggtgccggtgccaacattcccttggcctgcgacctggtgctggccgcccgctcggccagtttcatccaggccttctgcaagatcggcctggtgccggactccggcggtacttggctgctgccgcgcttggtcggcatggcccgggccaaggcgctggccatgctgggcgagcgccttggcgccgaacaggccgagcaatgggggctgatctaccgcgtggtggatgatgcagcgctgcgtgatgaagccctcaccctcgcccgccacctcgccgcccagcccacctacggcctgacactgatcaagcgcagcctcaatgccagtttcgacaatggttttgaggcgcagctggagctggagcgcgacctgcagcgcctggcagggcgcagcgaggactaccgcgaaggcgtgaacgccttcatgaacaaacgcacgccagccttcaaggggcgctga

SEQ ID NO: 28833 - protein, 263 aa, Pseudomonas putida KT2440
MTFQHILFSIEDGVAFLSLNRPEQLNSFNTAMHLEVREALRQVRQSSDARVLLLTAEGRGFCAGQDLSDRNVAPGAEMPDLGQSIDKFYNPLVRTLRDLPLPVICAVNGVAAGAGANIPLACDLVLAARSASFIQAFCKIGLVPDSGGTWLLPRLVGMARAKALAMLGERLGAEQAEQWGLIYRVVDDAALRDEALTLARHLAAQPTYGLTLIKRSLNASFDNGFEAQLELERDLQRLAGRSEDYREGVNAFMNKRTPAFKGR

SEQ ID NO: 28834 - DNA, 774 bp, Pseudomonas putida KT2440
  CDS (1)..(774): transl_table=11
atgccgcgatatatcgatgtgcaggcgcccgaacatggcgttcagctcattaccctgcaacggcccgaggccttgaatgccctgtgcaccgagctactggcagaactggccgctgcgctgcaggctgccgggaacgacgagcatgtccgtgccacagtgattaccggcagcgccaaggcattcgccgcaggcgccgacatccgcgagatggccgatcgcgacctggtcggcatcctcaatgacccgcgcgtagcgcattggcaaagcatcgccgcattcgccaaaccgctgattgctgcagtcaacggctatgccctgggtggcggttgcgaactggcaatgtgcgccgacatcgtcatcgccagtaccgacgcccgtttcggccagccggaaatcaaccttggcatcatccccggtgctggcggcacccagcgcctgttacgtgccgtcggtaagccgttggccatgcagatggtgctgacgggggaagccatcactgccctccgcgcccagcaggccggcctggtcagcgaaatcacccagcccgaactcaccgtagaacgcgccatgcaggttgcccgcagcatcgccgccaaagcgccgctggctgtgcgcctggccaaggaggcgttactgaaggccggtgataccgacctggccagcggcctgcgcttcgagcgccatgccttcaccctgctggcgggcaccgccgaccgcgatgaaggcatccgcgccttccaggaaaagcgccaggcccgcttccaagggcgctga

SEQ ID NO: 28835 - protein, 257 aa, Pseudomonas putida KT2440
MPRYIDVQAPEHGVQLITLQRPEALNALCTELLAELAAALQAAGNDEHVRATVITGSAKAFAAGADIREMADRDLVGILNDPRVAHWQSIAAFAKPLIAAVNGYALGGGCELAMCADIVIASTDARFGQPEINLGIIPGAGGTQRLLRAVGKPLAMQMVLTGEAITALRAQQAGLVSEITQPELTVERAMQVARSIAAKAPLAVRLAKEALLKAGDTDLASGLRFERHAFTLLAGTADRDEGIRAFQEKRQARFQGR

SEQ ID NO: 28836 - DNA, 831 bp, Pseudomonas putida KT2440
  CDS (1)..(831): transl_table=11
atgagcaaatacgaaggccgctggaccaccgtgaaggtcgaactggaagcgggcatcgcctgggtgaccctcaatcgcccggaaaaacgcaatgccatgagccccaccctgaaccgggaaatggtcgacgtgctggaaacccttgagcaggacgctgacgctggcgtgctggtattgaccggtgccggcgagtcctggaccgccggcatggacctgaaggagtacttccgcgaggtggacgccggcccggaaatcctccaggaaaagattcgtcgcgaagcctcgcaatggcaatggaagttgctgcgtctgtatgccaaaccgaccatcgccatggtcaacggctggtgcttcggcggcggcttcagcccactggtggcatgcgacctggcgatctgcgccaacgaagcgaccttcggcctgtcggaaatcaactggggcatcccgcctggtaacctggtcagcaaggccatggccgataccgttggccatcgtcagtcgctgtactacatcatgaccggcaagaccttcgatggtcgcaaggctgccgagatgggcctggtgaacgacagtgtgccgctggccgagctgcgtgaaaccacccgcgagttggcgctgaacctgctggaaaagaacccggtggtgctgcgtgccgcgaagaatggcttcaagcgttgccgcgagctgacctgggaacagaacgaggactacctctacgccaagctcgaccagtcgcgcctgctggacactaccggcggccgcgagcagggcatgaagcagttcctcgacgacaagagcatcaagccaggcctgcaggcctacaagcgctga

SEQ ID NO: 28837 - protein, 276 aa, Pseudomonas putida KT2440
MSKYEGRWTTVKVELEAGIAWVTLNRPEKRNAMSPTLNREMVDVLETLEQDADAGVLVLTGAGESWTAGMDLKEYFREVDAGPEILQEKIRREASQWQWKLLRLYAKPTIAMVNGWCFGGGFSPLVACDLAICANEATFGLSEINWGIPPGNLVSKAMADTVGHRQSLYYIMTGKTFDGRKAAEMGLVNDSVPLAELRETTRELALNLLEKNPVVLRAAKNGFKRCRELTWEQNEDYLYAKLDQSRLLDTTGGREQGMKQFLDDKSIKPGLQAYKR

SEQ ID NO: 28838 - DNA, 795 bp, Pseudomonas putida KT2440
  CDS (1)..(795): transl_table=11
atgaccaccccgtcgtcgtcactgttgagcaaggtcgaagccggcgttgcctggatcaccctcaaccgccccgagcagcgcaacgcgctggacattcccaccctcaagcaactgcacgccttgctcgacagccatgccgacgaccccgccgtacgcgtggtggtgctgaccggtagcggccgcagcttctgcgctggcgccgacctggccgaatgggctgccgccgaagctgccggcaccctggaaagctatggctggaccgaaactgcccatgccctgatgctgcgcctgcacagcctcgacaaacccaccatcgccgccatcaacggcaccgccgtgggcggtggcatggacctcagcctgtgctgcgacctgcgcatcgccgccgcctcggcgcgcttcaaggccggctacaccagcatgggctacagccccgatgccggcgccagctggcacctgccacggctgatcggcagcgagcaggccaagcgcctgctgttcctcgacgagttgtggggcgccgatcgcgccctggccgccgggttggtcagcgaagtctgcgccgacgagcagttgcctgccgttgccgccgaactggccgggcgcctggccaatggcccgaccttcgcctatgcgcagaccaagcggctgatacgcgacggcgcccggcgcaccctggccgagcagctggaggccgagcgccacgccggcctgttgtgtggccgcagccaggatggcgccgaggccctgcaagcctcggtggaacgtcgcaccccccgttttaccggccagtaa

SEQ ID NO: 28839 - protein, 264 aa, Pseudomonas putida KT2440
MTTPSSSLLSKVEAGVAWITLNRPEQRNALDIPTLKQLHALLDSHADDPAVRVVVLTGSGRSFCAGADLAEWAAAEAAGTLESYGWTETAHALMLRLHSLDKPTIAAINGTAVGGGMDLSLCCDLRIAAASARFKAGYTSMGYSPDAGASWHLPRLIGSEQAKRLLFLDELWGADRALAAGLVSEVCADEQLPAVAAELAGRLANGPTFAYAQTKRLIRDGARRTLAEQLEAERHAGLLCGRSQDGAEALQASVERRTPRFTGQ

SEQ ID NO: 28840 - DNA, 843 bp, Pseudomonas putida KT2440
  CDS (1)..(843): transl_table=11
atgaacctttcaacctcaggagtgctgcccgtgaccgagtacagtgcattcaaggtcgaactgaccgacagcgtcgcccatgttcagatcaatcgcccagagaaggtcaacgcgatgaatgcggccttctgggaggaaatcgtcgacatcttccagtggatcgatgacaccgatgccgtgcgcgtggtggtgatcagtggcgctggcaagcatttttccgccggtatcgacctgatgatgctggcctcgctggctgggcagatgggcaaggacgtgggccgcaatgcacgcttcctgcgcaagaccatccagcggctgcaggcttcgttcaccgctgtagacgcgtgccgcaaacccgtactggcggccgtgcagggctactgcatcggcggcgccatcgacctcatctcggcgtgcgacatgcgctactgcagcagagacgcgcagttctcgatcaaggaaatcgacatgggcatggctgccgatgtcggcacattgcaacgtttgccacgcatcattggcgacggcatcatgcgtgagctggcgtttaccgggcgcaatgtcgaggccgacgaggcgctgcgtatcggcctggtcaaccgagtctatgatgatcaggctgcactgatggacggcgtctttgccatcgcccgcgagattgccgcaaaatcgccgatcgccgtggccggcaccaaggaaatgctcagctacatgcgtgaccatcgcatcgacgatggcctggactacattgccacctggaacgccgcaatgctgcagtccgaagacctgcgtgtggctgtggcggcgcacatgagcaaacagaaaccgacgttcgccgactga

SEQ ID NO: 28841 - protein, 280 aa, Pseudomonas putida KT2440
MNLSTSGVLPVTEYSAFKVELTDSVAHVQINRPEKVNAMNAAFWEEIVDIFQWIDDTDAVRVVVISGAGKHFSAGIDLMMLASLAGQMGKDVGRNARFLRKTIQRLQASFTAVDACRKPVLAAVQGYCIGGAIDLISACDMRYCSRDAQFSIKEIDMGMAADVGTLQRLPRIIGDGIMRELAFTGRNVEADEALRIGLVNRVYDDQAALMDGVFAIAREIAAKSPIAVAGTKEMLSYMRDHRIDDGLDYIATWNAAMLQSEDLRVAVAAHMSKQKPTFAD

SEQ ID NO: 28842 - DNA, 780 bp, Bradyrhizobium japonicum USDA 110
  CDS (1)..(780): transl_table=11
atgagcacgttcgaacacatcatcgtcgaaagccaaggcgcggtcggcatcatcaagctgaaccggccgaagatgctcaatgcgctctccttcggcgtcttccgcgagattgcggccgccgtcgacgatctcgagggcgatgatgccatcggctgcatcgtcgtgaccggcagcgagaaggcctttgccgccggcgccgacatcaaggagatgcagccgaagggcttcatcgacatgttctccgaggatttcgccgcgatcggcggcgaccgcgttgcgcgctgccgcaagccgaccatcgccgctgttgcgggctacgcgctcggcggcggctgcgagctcgccatgatgtgcgacttcatcatcgccgccgacaccgccaagttcggccagcccgaaatcacgctcggcaccattcccggcatcggcggcacccagcgcctgacccgcgcgatcggcaagtccaaggcgatggacctctgcctcaccggccgcatgatggatgcggcggaagccgagcgaagcggcctcgtcagccgcatcgtgcccgccgacaagctcatggacgaggtgatggcggccgccgaaaagatcgcgtcgatgtcacggcccgccgtcgccatggccaaggaagcggtgaaccgcgccttcgagaccacgctcgccgagggcatgagcgtcgagcgcaacctgttccactcgaccttcgcgctggaagaccgctccgagggcatggccgcgttcatcgagaagcgcaagccggtgaacaagaaccgctga

SEQ ID NO: 28843 - protein, 259 aa, Bradyrhizobium japonicum USDA 110
MSTFEHIIVESQGAVGIIKLNRPKMLNALSFGVFREIAAAVDDLEGDDAIGCIVVTGSEKAFAAGADIKEMQPKGFIDMFSEDFAAIGGDRVARCRKPTIAAVAGYALGGGCELAMMCDFIIAADTAKFGQPEITLGTIPGIGGTQRLTRAIGKSKAMDLCLTGRMMDAAEAERSGLVSRIVPADKLMDEVMAAAEKIASMSRPAVAMAKEAVNRAFETTLAEGMSVERNLFHSTFALEDRSEGMAAFIEKRKPVNKNR

SEQ ID NO: 28844 - DNA, 783 bp, Clostridium tetani E88
  CDS (1)..(783): transl_table=11
atggattttaaaaatcttatccttgaaaaggatggtaaaatagcggttttaacaattaatagacctgatgctctaaacgctttaaatagtgaactgctaaaagaactagattatgctattgactgtctagcagaagatgatgaagtattagcagtagtacttacaggagcaggaaaagcttttgtagctggtgcggatataggagagatgaaagatcttactgtaagtgaaggtagaaaatttggagtacttggaaatagagtattcagaaagttggaaaccttagaaaaaccagttattgcagcagtaaatggattcgctttaggcggaggttgtgaaatatccatggcttgtgatataagaattgcttctgaaaaggctaaatttggacaaccggaagttgggctaggaataacccctggatttggtggaactcaaaggttacctagattagttggaccagcagtagccaaagaattaatatatacagcagatataattggtgcagaagaggcattaagaataggattaattaataagatagtagaaaaggatgaacttttagataaagctaaagaaatggctaataagatagctaataatgctcctatagctataaaactatgtaagtcagctataaacagaggagtacaatgtgatatagatacagggatagcttttgaagcagaagtatttggagaatgcttctctacagaagaccaaaaagaaggtatgacagcatttcttgaaaaaagaaaagataaatgcttcaaaaatagatag

SEQ ID NO: 28845 - protein, 260 aa, Clostridium tetani E88
MDFKNLILEKDGKIAVLTINRPDALNALNSELLKELDYAIDCLAEDDEVLAVVLTGAGKAFVAGADIGEMKDLTVSEGRKFGVLGNRVFRKLETLEKPVIAAVNGFALGGGCEISMACDIRIASEKAKFGQPEVGLGITPGFGGTQRLPRLVGPAVAKELIYTADIIGAEEALRIGLINKIVEKDELLDKAKEMANKIANNAPIAIKLCKSAINRGVQCDIDTGIAFEAEVFGECFSTEDQKEGMTAFLEKRKDKCFKNR

SEQ ID NO: 28846 - DNA, 774 bp, Pseudomonas syringae pv. tomato str. DC3000
  CDS (1)..(774): transl_table=11
atggattacgagacaatcctcagtgaggttgtaggcagcgtcgggctggtcactttgaaccgtcccaaggccctgaacgcactgaatgctcgtctgatcgacgagttgaaccacgcgcttgaccagttcgaggcggacagcgccattggctgtatcgtgctgaccggcacgcaaaaagccttcgctgcgggggctgacatcaaggaaatggtcgagctctcctacccgcagatctacctcgatgacctgtttcgtgaaagtgaccgcgtggccgcgcggcgtaaaccgatggtcgcggccgtggccggtttcgcgctgggcggtggctgtgaattggcactgatgtgtgacttcattctggctgccgaaaacgccaggtttggtcaaccggagatcaacctcggcgtgttaccgggcatgggcgggacgcaacgtctgacccgtgcggttggcaaggccaaggcaatggaaatgtgcctgacaggccgcctgatcgacgcccatgaagccgagcgcgcgggtctggtgtcccgcgtcttgccgcttgaccagctactgcccgaagcacttgcagtggccgccaccatcgccgcgaaatcgctgccggtggcgatgatggtcaaggagagcgtcaaccgcgcttttgaggtgagcctggctgaaggtatccgtttcgagcgccgggtgttccatgcggccttcgccagtcacgaccagaaagaaggcatgcaagcgtttatcgacaagcgccagccggatttcaaggactgttag

SEQ ID NO: 28847 - protein, 257 aa, Pseudomonas syringae pv. tomato str. DC3000
MDYETILSEVVGSVGLVTLNRPKALNALNARLIDELNHALDQFEADSAIGCIVLTGTQKAFAAGADIKEMVELSYPQIYLDDLFRESDRVAARRKPMVAAVAGFALGGGCELALMCDFILAAENARFGQPEINLGVLPGMGGTQRLTRAVGKAKAMEMCLTGRLIDAHEAERAGLVSRVLPLDQLLPEALAVAATIAAKSLPVAMMVKESVNRAFEVSLAEGIRFERRVFHAAFASHDQKEGMQAFIDKRQPDFKDC

SEQ ID NO: 28848 - DNA, 768 bp, Streptomyces avermitilis MA-4680
  CDS (1)..(768): transl_table=11
atgactgtgcatctcgaagtcgccgagggcgtcggcaccatccgcctcgaccgtccgccgatgaacgcgctggacgtcgccacccaggaccggctcaaggaactcgccgaagaggccacgcgccgcgaggacgtgcgcgcggtggtgctgtacggcggggagaaggtgttcgcggcgggcgcggacatcaaggagatgcaggccatggaccatacggcgatggtcgtacgctcccgggccttgcaggactccttcaccgccgtcacccgcatccccaagccggtcgtcgccgccgtcaccgggtacgcgctgggcgggggctgcgaactggcgctctgcgcggactaccgcatcgccgccgagaacgcgaagctcggccagccggagatcctgctcggcctgattccgggcgcgggcggcacccagcgcctgtcccggctgatcggtccctcgcgcgccaaggacctgatcttcacgggccggatggtcaaggcggacgaggcgctggcgctcggcctggtcgaccgggtggttccggtcggggaggtgtacgagcaggcgcacgcctgggccgcgaagctggcgcagggcccggccctcgcgctgcgggcggcgaaggagtcgatcgacgtcggcctggagacggacatcgacaccggactcgcggtcgaacggaactggttcgcgggcctgttcgccacggaggaccgtgagcgcgggatgcgcagcttcgtggaggaagggccgggcaaggcgaagttcctctga

SEQ ID NO: 28849 - protein, 255 aa, Streptomyces avermitilis MA-4680
MTVHLEVAEGVGTIRLDRPPMNALDVATQDRLKELAEEATRREDVRAVVLYGGEKVFAAGADIKEMQAMDHTAMVVRSRALQDSFTAVTRIPKPVVAAVTGYALGGGCELALCADYRIAAENAKLGQPEILLGLIPGAGGTQRLSRLIGPSRAKDLIFTGRMVKADEALALGLVDRVVPVGEVYEQAHAWAAKLAQGPALALRAAKESIDVGLETDIDTGLAVERNWFAGLFATEDRERGMRSFVEEGPGKAKFL

SEQ ID NO: 28850 - DNA, 789 bp, Bacillus cereus ATCC 14579
  CDS (1)..(789): transl_table=11
atgctacaattacaaaacatttcagttgattatgtaacacctcacgttgtaaagatttcgttatatcgtgaaagacaagcaaactcattatctttagcgttattagaagagttacaaaacatattaactcaaataagtgaagagtccaatacgcgtgtagttattctaacaggtgctggtgaaaaagcattttgtgctggtgctgatttaaaagaacgtgctggtatgaatgaggaacaagttcgccatgctgttagtatgattcgcacgactatggagatggttgaacaattaccacagccagttattgctgctataaatggaattgcacttggtggtggtacggaattaagtttagcttgtgattttagaattgctgctgaatctgcaagtcttggtcttactgaaacgacacttgcaattataccaggagcgggtggtacacagcgcttaccgagattaattggtgttggtagagcgaaagaattaatttatacaggtagacgtatttcagcgcaagaagcaaaagaatatggtttagtagaatttgttgtaccagctaatttacttgaagagaaagcgattgaaatagcagagaaaattgctagtaatggacctattgctgttcgattagcaaaagaggcaatttcaaatggtattcaagttgatttacataccggattacaaatggaaaaacaagcgtatgaaggtgtaatccatacgaaagatagattagaaggattacaagcattcaaggaaaaacgcacaccaacgtataagggggagtaa

SEQ ID NO: 28851 - protein, 262 aa, Bacillus cereus ATCC 14579
MLQLQNISVDYVTPHVVKISLYRERQANSLSLALLEELQNILTQISEESNTRVVILTGAGEKAFCAGADLKERAGMNEEQVRHAVSMIRTTMEMVEQLPQPVIAAINGIALGGGTELSLACDFRIAAESASLGLTETTLAIIPGAGGTQRLPRLIGVGRAKELIYTGRRISAQEAKEYGLVEFVVPANLLEEKAIEIAEKIASNGPIAVRLAKEAISNGIQVDLHTGLQMEKQAYEGVIHTKDRLEGLQAFKEKRTPTYKGE

SEQ ID NO: 28852 - DNA, 828 bp, Bordetella pertussis Tohama I
  CDS (1)..(828): transl_table=11
gtgtcgttcatgcgcatatcttacatttcatactctgacaggaggcaatcaatgagcgagtcgtttgtgctggtcgaaacccggggccgcgtgggatggctgacgctgaaccggcccaaggcattgaatgcgctgaacgaccagttgatggaggaactgggcgcggcgttgctggcgctcgacgccgacgacggcatcggcgcgatcgtgatcaccggcagcgagaaagccttcgccgcgggcgcggatatcggcgccatgaaagactggtcctacatggacgtctaccgcagcgactacatcacccgcaactgggaaaccataaagcgcgtacgcaagcccgtgatcgccgcggtggccggctatgcgctgggcggcggctgcgaactggccatgatgtgcgacatcgtcatcgccgccgactcggcccgcttcggccagcccgagatcaagctgggcgtgattcccggcgccggcggcacgcagcgcctgccgcgcgcggtgggcaaggccaaggccatggacctggcgctgacggcgcgcatgatggatgccgcggaggccgagcgggccggcctggtatcgcgcgtggtgccggccgacaggctggcggatgaggcgctcgaggccgccaccgtcatcgcctcgatgtcgctgccgtcggtcatgatggccaaggagtgcatcaaccgcgcgtacgaagtgccgctcaacgatgggttgctgttcgagcgccgcgtgttccactcgctgttcgccaccgaagaccagaaagagggcatggcggcgttcaccgagaagcgcaagcctgacttcaagcacaggtag

SEQ ID NO: 28853 - protein, 275 aa, Bordetella pertussis Tohama I
MSFMRISYISYSDRRQSMSESFVLVETRGRVGWLTLNRPKALNALNDQLMEELGAALLALDADDGIGAIVITGSEKAFAAGADIGAMKDWSYMDVYRSDYITRNWETIKRVRKPVIAAVAGYALGGGCELAMMCDIVIAADSARFGQPEIKLGVIPGAGGTQRLPRAVGKAKAMDLALTARMMDAAEAERAGLVSRVVPADRLADEALEAATVIASMSLPSVMMAKECINRAYEVPLNDGLLFERRVFHSLFATEDQKEGMAAFTEKRKPDFKHR

SEQ ID NO: 28854 - DNA, 768 bp, Bordetella bronchiseptica RB50
  CDS (1)..(768): transl_table=11
atgtcagaactggtcaaggtggaaatcgccgacggcatccagatcatcacggtcaaccgtcccgaagccaggaacgccatcaatttcgaaacggcgcaggccatggccgccgcgctggaccagctcgatgagcgcgacgacgtgcgtatcggcatcctgaccggcgcgggcggcacgttctcggccggcatggacttgaaggcgttcgcccggaccggacagcgcccgtcgctacccgagcgtggctttgccgccctgaccgaacgcccgccgaagaaaccgctgatcgcggcggtcgagggctatgcgctggccggtggctgcgaaatggccctgagctgcgatctgctggtggccgccgacaatgccaagttcggcctgcccgaagtcaagcgcggcctggtgccgggcgccggcggcatgctgcgcctgccgcgccggctgccgtaccacatcgccatggaaatcatcctgacgggcgatttcctggatgcgtcgcgcgcccatgcgctgggcctggtcaaccgcctgacggcggccggcggcgcgctggaaggcgcgctggcgctggcccgcgtcatcgtcgagaacggcccgctggcggtgcaggttgccaagagcatcgtcgcgcaatcgggcgactgggaccaggaaaccatgttcgaccgccagcgtccgcaggtcaccgaaatcttcacctcggccgacgccaaggaaggcgccaccgccttcgccgagaagcgcaagcctgtctggcaaggcaaataa

SEQ ID NO: 28855 - protein, 255 aa, Bordetella bronchiseptica RB50
MSELVKVEIADGIQIITVNRPEARNAINFETAQAMAAALDQLDERDDVRIGILTGAGGTFSAGMDLKAFARTGQRPSLPERGFAALTERPPKKPLIAAVEGYALAGGCEMALSCDLLVAADNAKFGLPEVKRGLVPGAGGMLRLPRRLPYHIAMEIILTGDFLDASRAHALGLVNRLTAAGGALEGALALARVIVENGPLAVQVAKSIVAQSGDWDQETMFDRQRPQVTEIFTSADAKEGATAFAEKRKPVWQGK

SEQ ID NO: 28856 - DNA, 777 bp, Bordetella bronchiseptica RB50
  CDS (1)..(777): transl_table=11
atgagcgagtcgtttgtgctggtcgaaacccggggccgcgtgggatggttgacgctgaaccggcccaaggcattgaatgcgctgaacgaccagttgatggaggagctgggcgcggcgttgctggcgctcgacgccgacgacggcatcggcgcgatcgtgatcaccggcagcgagaaagccttcgccgcgggcgcggatatcggcgccatgaaagactggtcctacatggacgtctaccgcagcgactacatcacccgcaattgggaaaccataaagcgcgtacgcaagcccgtgatcgccgcggtggccggctatgcgctgggcggcggctgcgaactggccatgatgtgcgacatcgtcatcgccgccgactcggcccgcttcggccagcccgagatcaagctgggcgtgattcccggcgccggcggcacgcagcgcctgccgcgcgcggtgggcaaggccaaggccatggacctggcgctgacggcgcgcatgatggatgccgcggaggccgagcgggccggcctggtatcgcgcgtggtgccggccgacaggctggcggatgaggcgctcgaggccgccaccgtcattgcctcgatgtcgctgccgtcggtcatgatggccaaggagtgcatcaaccgcgcgtacgaagtgccgctcaacgatgggttgctgttcgagcgccgcgtgttccactcgctgttcgccaccgaagaccagaaagagggcatggcggcgttcaccgagaagcgcaagcctgacttcaagcacaggtag

SEQ ID NO: 28857 - protein, 258 aa, Bordetella bronchiseptica RB50
MSESFVLVETRGRVGWLTLNRPKALNALNDQLMEELGAALLALDADDGIGAIVITGSEKAFAAGADIGAMKDWSYMDVYRSDYITRNWETIKRVRKPVIAAVAGYALGGGCELAMMCDIVIAADSARFGQPEIKLGVIPGAGGTQRLPRAVGKAKAMDLALTARMMDAAEAERAGLVSRVVPADRLADEALEAATVIASMSLPSVMMAKECINRAYEVPLNDGLLFERRVFHSLFATEDQKEGMAAFTEKRKPDFKHR

SEQ ID NO: 28858 - DNA, 771 bp, Porphyromonas gingivalis W83
  CDS (1)..(771): transl_table=11
atggaatttcacaatctgatcatccaatcgaaagatggtatcacgacgctgaccatcaacaaaccggagacactgaacgccctctcctctgaagtcctttccgaattgaagtcggccattgccgttatcgctacagaaaagcctcgagtgctgatcattaccggaagcggcaaagcatttgtcgcaggagcagacatagccgagatgcaacatctgagtgcagccgagggaaaagcctttggagggcttggagcagaggtattccgaaggatagaagaattgcctttccctgttattgcagccatcaatggctttgctttgggaggcggatgcgaattggccatggcttgtgacatccgcatagcttcggctaaagccaagtttggtcagcccgaagtcggattgggcatcacccccggattctccggtacacagcgcttgccacgccttgtcgctccgggtatagccaaagaactcatctacacggggcgtatcatcgatgcagaagaagcacttcgtattggtcttgtcaatcgggtaacaactccggaggaattattacctgccacgatggaaacggctcaactcattgcatcacgctcagcttctgccgtatcagcttcaaaagaggctatcaatcgtggtacggagatgcatattgccgaaggcattgctttggaacagaatctcttcggactgtgctttgccacagccgaccagaaggaaggcatggcagctttcctcgaaaaacgtaaaccggctttctgctga

SEQ ID NO: 28859 - protein, 256 aa, Porphyromonas gingivalis W83
MEFHNLIIQSKDGITTLTINKPETLNALSSEVLSELKSAIAVIATEKPRVLIITGSGKAFVAGADIAEMQHLSAAEGKAFGGLGAEVFRRIEELPFPVIAAINGFALGGGCELAMACDIRIASAKAKFGQPEVGLGITPGFSGTQRLPRLVAPGIAKELIYTGRIIDAEEALRIGLVNRVTTPEELLPATMETAQLIASRSASAVSASKEAINRGTEMHIAEGIALEQNLFGLCFATADQKEGMAAFLEKRKPAFC

SEQ ID NO: 28860 - DNA, 798 bp, Vibrio vulnificus YJ016
  CDS (1)..(798): transl_table=11
atgtctgacataattccaccgagtgaaaacggtatttcactttccctcaatggtcatgtggcgacgatcaccatggtcaatcctcctgccaatacatggacggcaaactctctgaccgagctaaaaaagacggtgttagcactgaatgacaacaaggcgatttacgccttagtgctgaccggggacggcgaaaagtttttctccgctggggccgatcttaaattattcgcttcgggagacaagggcgttgcggtggacatggcgcgtattttcggtgaagcgttcgagacactttcagcttttcgcggcgtttctattgcggcgatcaatggttatgccatgggcggtgggctcgaagttgcactggcttgtgatattcgcattgccgaagagcaggcggtgctcgccttacccgaggcgaaagtggggctgctgccttgtgcgggggggacacaaaacttaacggccttggtcggcgaagggtgggccaaatgcatcatattatgtggtgagcaagtgagcgcggaaaaagcgctgagcatcggattgatcgaagaagtggtggccaaaggggaagcgctgagtgcagcacaagcgttggcgcagcaagtggccaaccagtcccccagttcagtttctgcctgtaaaaagctgattcagaatacgcgccaagcaccgctgtcgatggggctgatacgtgagcgcgagttgtttattcagttgttcgatacgcaagatcagcaagaaggggtgcaagcattcctcgagaaacgcgcaccacaatggaaaaatcagtag

SEQ ID NO: 28861 - protein, 265 aa, Vibrio vulnificus YJ016
MSDIIPPSENGISLSLNGHVATITMVNPPANTWTANSLTELKKTVLALNDNKAIYALVLTGDGEKFFSAGADLKLFASGDKGVAVDMARIFGEAFETLSAFRGVSIAAINGYAMGGGLEVALACDIRIAEEQAVLALPEAKVGLLPCAGGTQNLTALVGEGWAKCIILCGEQVSAEKALSIGLIEEVVAKGEALSAAQALAQQVANQSPSSVSACKKLIQNTRQAPLSMGLIRERELFIQLFDTQDQQEGVQAFLEKRAPQWKNQ

SEQ ID NO: 28862 - DNA, 777 bp, Rhodopseudomonas palustris CGA009
  CDS (1)..(777): transl_table=11
ttgtcgtccaatcctatcctcaccgaaacccagggccgggtcggcatcatcacgctgaaccggccggatgtgctcaacgcgctcaacgatgccctgatggatgcgctcggcggcgcgctgctggcgttcgacgccgacgacggcatcggcgcgatcgtgatcgccggcaatacccgggccttcgcggccggcgccgacatcgcctcgatggcagcatggagctatagcgacgtctatggctcgaacttcatcacccgcaattgggaaacgatccgccaaatacggaagccggtgctggccgcggttgccggcctcgcctatggcggcggctgcgagctggcactcgcctgcgacatcgtgatcgctggccgcagcgccaagttcgcgctgccggaaatcaagctcggcctgctgcccggcgccggcggcacgcaacgattgccgcgcgcgatcggtaaggccaaggcgatggacatgtgcctgtcggcgcggccgctcaacgccgaagaggccgatcgctatggtctggtctcccgcgtcgtcgatgacgacaggctgcgtgacgagaccgtcgcgctggccaccacgatcgcggcgttctccgctccggcgctgatggcgctgaaggaaagcctcaatcgcgccttcgaaagcacgctcgccgaaggcatcctgttcgaacgccgcgaactgcatgcccgcttcgccagtgccgacgcccgcgagggcattcaggcgttcctggagaagcgcgcaccgtgcttctcccaccgctag

SEQ ID NO: 28863 - protein, 258 aa, Rhodopseudomonas palustris CGA009
MSSNPILTETQGRVGIITLNRPDVLNALNDALMDALGGALLAFDADDGIGAIVIAGNTRAFAAGADIASMAAWSYSDVYGSNFITRNWETIRQIRKPVLAAVAGLAYGGGCELALACDIVIAGRSAKFALPEIKLGLLPGAGGTQRLPRAIGKAKAMDMCLSARPLNAEEADRYGLVSRVVDDDRLRDETVALATTIAAFSAPALMALKESLNRAFESTLAEGILFERRELHARFASADAREGIQAFLEKRAPCFSHR

SEQ ID NO: 28864 - DNA, 780 bp, Rhodopseudomonas palustris CGA009
  CDS (1)..(780): transl_table=11
atgagcacattcgaattcatcatcgtcgagcgtcaaaacgcggtcggcatcatcaagctcaaccgcccgaagatgctgaatgcgctgtcgttcggcgtgtttcgcgagatcggcgcagcggtcgaggatctcgaggccgacgatgcgatcggatgcatcctgatcaccggcagcgagaaggcgttcgccgccggcgccgatatcaaggagatgcagccgaagggtttcatcgacatgttcaacgaggacttcacttcgatcggcggtgaccggctcgcgcgctgccgcaagccgaccgtcgccgcggtcgccggctacgcgctcggcggcggctgcgaattggcaatgatgtgcgacatcattatcgccgccgacaccgccaagttcggtcaaccggaaatcacgctgggcaccattccgggcatcggcggcacccagcgtctcacccgcgctatcggcaagtacaaggcgatggacctgtgcctcaccggacggatgatggacgcgcaggaagccgagcgctcgggtctggtcagccgcatcgtgccggccgacaagctaatggaagaagcgctcggcgccgccgaaaagattgccacgatgtcgcgccccaccgcagcgatggccaaaagcgcggtgaaccgggcgctggaaactacgctcgccgaaggtctcgccgtcgagcgcgacctgttccgatcgaccttcgcgctggaagaccgcgccgagggcatggcggcgttcatcgaaaagcgcaagccgaacaaccagaaccgctga

SEQ ID NO: 28865 - protein, 259 aa, Rhodopseudomonas palustris CGA009
MSTFEFIIVERQNAVGIIKLNRPKMLNALSFGVFREIGAAVEDLEADDAIGCILITGSEKAFAAGADIKEMQPKGFIDMFNEDFTSIGGDRLARCRKPTVAAVAGYALGGGCELAMMCDIIIAADTAKFGQPEITLGTIPGIGGTQRLTRAIGKYKAMDLCLTGRMMDAQEAERSGLVSRIVPADKLMEEALGAAEKIATMSRPTAAMAKSAVNRALETTLAEGLAVERDLFRSTFALEDRAEGMAAFIEKRKPNNQNR

SEQ ID NO: 28866 - DNA, 783 bp, Geobacter sulfurreducens PCA
  CDS (1)..(783): transl_table=11
atgaacggataccatctgctgctggagatcagcgaaggaatcgccgccatcacgatcaacagaccgagcgccatgaacgccatgactcccgcaaccctggacgagctggccgaggcggtccggcgggtgaacggcgcccccgaggtccgggccgcgatcctgaccggcgccgggaccaaggccttcatggcgggcgccgacatcgccgccatgcgggacatgacaccggcccaggcgcgggatctggcccggcaggcccaccagatctatgccgacatcgaacggtctcccaagaccttcatcgcggcggtcaacggctacgccctgggcggcgggtgcgaactggccatggcctgcgacatccggctcgcctcggagaacgcgaaattcggccaaccggagatcaacatcggcatcatccccggcttcgggggcacccagcggcttccccggctggtgggcaaagggcgggccctggagatgatccttaccggcgagatgattgacgcccgggaggcccaccgcatcggactggtgaaccgggtggtgacccaggaagaactgccggaggaggcccggcggctggcccgcgccattgccgccaagggcatggttgccgtgggactctgcaaggaagcggtaaacaacggcctgaacatggaactgaccaaggcatgcgcctacgaggccgagctctttgcccacagcttctccacggcggaccagaaggaaggtatgagcgcctttctggagaagcgccccgccgtgtttcgcgactgctga

SEQ ID NO: 28867 - protein, 260 aa, Geobacter sulfurreducens PCA
MNGYHLLLEISEGIAAITINRPSAMNAMTPATLDELAEAVRRVNGAPEVRAAILTGAGTKAFMAGADIAAMRDMTPAQARDLARQAHQIYADIERSPKTFIAAVNGYALGGGCELAMACDIRLASENAKFGQPEINIGIIPGFGGTQRLPRLVGKGRALEMILTGEMIDAREAHRIGLVNRVVTQEELPEEARRLARAIAAKGMVAVGLCKEAVNNGLNMELTKACAYEAELFAHSFSTADQKEGMSAFLEKRPAVFRDC

SEQ ID NO: 28868 - DNA, 792 bp, Mycobacterium avium subsp. paratuberculosis K-10
  CDS (1)..(792): transl_table=11
atgacagacagcaccgaccgcaccttcgaaaccatcctcgtcgagcgcgaggagcgcgtcggcatcatcaccctgaaccggcccaaggcgctcaacgcgctcaacacccaggtgatgaacgaggtcaccgccgcggcaacggatttcgacgccgaccccggcatcggcgcgatcatcatcaccggatcggccaaggcgttcgccgcgggcgcggacatcaaggagatggccgagctgaccttcgccgacgcctacggcgccgacttcttcgccccctggggcaagctcgccgcggtgcgcaccccgacgatcgccgcggtggccgggcacgccctcggcggcggctgcgagctggccatgatgtgcgacgtgctgatcgccgccgacacggcgaaattcggccagcccgagatcaaactcggggtgctgcccggcatgggcggatcgcagcggctgacccgcgccatcggcaaggccaaggcgatggacctgatcctgaccggccgcaccatcgacgccgcggaagccgaacgcagcggcctggtttcgcgcgtggtgcccgccgacgacctgctgaccgaggccaagaaggtcgccaccacgatttcgcagatgtcccggtcggcagcccggatggccaaggaggccgtcaaccgcgctttcgaaaccaccctggccgagggactcctctacgaacgccggttgttccattcgactttcgccaccgccgaccagaccgaggggatggcggccttcgtcgagaagcgcgcgccgaacttcacccaccgctag

SEQ ID NO: 28869 - protein, 263 aa, Mycobacterium avium subsp. paratuberculosis K-10
MTDSTDRTFETILVEREERVGIITLNRPKALNALNTQVMNEVTAAATDFDADPGIGAIIITGSAKAFAAGADIKEMAELTFADAYGADFFAPWGKLAAVRTPTIAAVAGHALGGGCELAMMCDVLIAADTAKFGQPEIKLGVLPGMGGSQRLTRAIGKAKAMDLILTGRTIDAAEAERSGLVSRVVPADDLLTEAKKVATTISQMSRSAARMAKEAVNRAFETTLAEGLLYERRLFHSTFATADQTEGMAAFVEKRAPNFTHR

SEQ ID NO: 28870 - DNA, 798 bp, Bdellovibrio bacteriovorus HD100
  CDS (1)..(798): transl_table=11
atggcaagcaattataaaacaattcttcttgaacaaaaaacacacggggtttgggttctgacgatcaaccgtccagaatctttgaacgccctgaactccaccgtgctgaacgaaatgggtgaagcccttcgtcagatcggtgaaatggactattccgatgcgcgcgctttgattatcacgggtgctggtgaaaaagctttcgtggcgggtgccgacatcaaggaaatccatgatctggacgaagaaaaggcgctggtctttgctcagcgtggccagagcatcttccatgaactgacgcttttgaaaatcccggtgatcgctgcggtgaacggctttgccctggggggcggctgtgaactggcgctgggttgtgatttcatctatgccgctgaaaatgcgaaattcggtttgccggaagtttctttgggattgatcccaggcttcggtggcacggttcgtatggcgcgcgcggtgggttcccgtcgtgcccgtgagttgacttataccggtggcatgatcaccgcggcagaagctttgtctgcaggtctggtgaacaaagtcgttcctcaagcggaactgatgaacactgtgatgaaaactgttgaggctattttggccaaagcgccgattgccgtgggttctgcgaagttctccatcaatcaggcttgggacatggacgttgaagaagcgcagaaaaatgaagcaagaatctttgcggaacttttcacttctgaagatgttaaagaaggcacgggtgccttcatcgagaaacgcaaagctgaatttaaaggtcgataa

SEQ ID NO: 28871 - protein, 265 aa, Bdellovibrio bacteriovorus HD100
MASNYKTILLEQKTHGVWVLTINRPESLNALNSTVLNEMGEALRQIGEMDYSDARALIITGAGEKAFVAGADIKEIHDLDEEKALVFAQRGQSIFHELTLLKIPVIAAVNGFALGGGCELALGCDFIYAAENAKFGLPEVSLGLIPGFGGTVRMARAVGSRRARELTYTGGMITAAEALSAGLVNKVVPQAELMNTVMKTVEAILAKAPIAVGSAKFSINQAWDMDVEEAQKNEARIFAELFTSEDVKEGTGAFIEKRKAEFKGR

SEQ ID NO: 28872 - DNA, 912 bp, Strongylocentrotus purpuratus
  CDS (1)..(912)
atggcgactcatctgacaaagttagtccgcatcgccggtggtttcactggtttaaattcaaagattttaaacaccaggcggttgctggttcctgtctctcgaaatttcagctcccctgcagatgacctgaaagtcagctaccttgatgatggaggaattgttgtacttggaatgaacagacctgcaaacaaaaatgcaatcagcagaaatcttttaaatctgtttgaagatgcagttgccaaagtcaggtttgataataatgtgagagtactcattataaggagtgaggcccctggaatattctgtgcaggagccgatttgaaggagagaatacagatgacccaggaggaagttgggccttttgttgccaaattacggcaggcaatcctttcctttggggaccttccaatgccaaccatagtggccctggatggcgttgccgtgggcggtggcctagagatggccctgtcatgtgaccttagagttgctgcttcgtctgctaagatgggtctagtcgaagccaaacttgccattatcccaggtggaggtggaactcagaggttaccccggctagtgggcccatccattgccaaggaactcatgttcactgggagggttctagacggagaggaagcagcacgcatcggactggtcaaccactgcgttgagcaagacgatagccaggaagcagcgtacaagcgagccttggagcttgctagagagattgcaactcagggtcccattgctctgagaatggtcaagaaagcagtagacaagggtgtagaggtggatttggcatctggacttgcatttgaagaggcatactatgctcaggtgattccaaccaaagatcgtatggaaggcttgatggcattcaaggagaagaggaagccaaattttaaaggagaataa

SEQ ID NO: 28873 - protein, 303 aa, Strongylocentrotus purpuratus
MATHLTKLVRIAGGFTGLNSKILNTRRLLVPVSRNFSSPADDLKVSYLDDGGIVVLGMNRPANKNAISRNLLNLFEDAVAKVRFDNNVRVLIIRSEAPGIFCAGADLKERIQMTQEEVGPFVAKLRQAILSFGDLPMPTIVALDGVAVGGGLEMALSCDLRVAASSAKMGLVEAKLAIIPGGGGTQRLPRLVGPSIAKELMFTGRVLDGEEAARIGLVNHCVEQDDSQEAAYKRALELAREIATQGPIALRMVKKAVDKGVEVDLASGLAFEEAYYAQVIPTKDRMEGLMAFKEKRKPNFKGE

SEQ ID NO: 28874 - DNA, 983 bp, Strongylocentrotus purpuratus
  CDS (71)..(958)
tgctttttgacccctgaaaagtgcaaccccgacatagacactgagctagctgagtcgacgatacgaaatcatgtctgctcttcgtcaagttttcacctctgcaagccgggctttcctggtatccagcgccagaaactctccagtagctccttctgttacaagatgtcttgcaacaggagcctatgagaacatcatcgtcgaccatgttggtgaaaagaagaatgttggtttgatcaagttaaaccgacccaaggcactgaacgctcttaaagatgatctgatgaatgaattggcactggctttagatgtttttgaggctgataaaaatgtaggtgccattgtggtgacggggagtgagaaagcatttgcagctggagctgatatcaaggagatgtcaggcttgacgtttcaggagacgctgggcgcaaacttcttagaatcttggagcagactctcaaaatccaagaaacccaccattgcagctgtcaatggctttgctcttggaggaggatgtgaggttgccatgatgtgtgacatcatctatgcaggagagaaggcatcgtttggtcagccggaaattctccttggtctcatcccaggtgctggtggaacccagaggttacccagggctgtagggaagtctctggctatggagatggttctttctggtgataggatcacagctcagcaagctctacaagcaggacttgtcagcaagatctaccctgtcgaggagctactggagaaggccatcgcgctgggtgagaagatcagtaagaactctaagctcatcaactctctttgcaaggaggccgtcaacacgagctacgaactcacactcaatgaaggcatgcactttgagaagaggctcttccacgcttgctttggaacggaggatgcaagggaaggaatgggggcatttgtaggaaagagagccgctgacttcaaggacaactgatccacccattcatccattccagcgt

SEQ ID NO: 28875 - protein, 295 aa, Strongylocentrotus purpuratus
MSALRQVFTSASRAFLVSSARNSPVAPSVTRCLATGAYENIIVDHVGEKKNVGLIKLNRPKALNALKDDLMNELALALDVFEADKNVGAIVVTGSEKAFAAGADIKEMSGLTFQETLGANFLESWSRLSKSKKPTIAAVNGFALGGGCEVAMMCDIIYAGEKASFGQPEILLGLIPGAGGTQRLPRAVGKSLAMEMVLSGDRITAQQALQAGLVSKIYPVEELLEKAIALGEKISKNSKLINSLCKEAVNTSYELTLNEGMHFEKRLFHACFGTEDAREGMGAFVGKRAADFKDN

SEQ ID NO: 28876 - DNA, 876 bp, Magnaporthe grisea 70-15
  CDS (1)..(876)
atgaacgccttcagagctcttcggccagtcgcctcaaaaatacaggcacctaccctgccgcgaatcaccaggggatttgcagcttcttccaggctgggatatgagcacattcaggtctcggagcccaggccaggtgttggtcaagtcacgctcaacaggccaaaggcgctcaacgccctcagcaccccactgatcaaggagcttaatacggcgctgggcgactaccaaaagtcagatagcatatcggttattgtaatcacgggctctcagaaggccttcgcagcaggtgccgacatcaaggagatggcacctctgacattctccaaggcctacaccgagtcattcatcgagaactggtcagacctgaccactcaggtcaaaaagcccatcattgcagccgtttccggtcacgcgcttggtggcggctgcgagctggcccttatgtgcgactttatctactgcaccgaatcggccaactttggccagcctgagatcaaactgggcgtcattcccggcgccggcggcagtcagcgcctcaccaaggcagttggaaaggctcgtgccatggagctgatcctcacgggcaagtccatgactggcgctgaggccgcacggtggggtgttgctgccaggtcgtttgcgacgtacgaggagctgatggaggccacgctcaagacggccgagacgatcgcaagctactcaaaggtcgctgtccaggcgtgcaaagaggttgtcaacaagagccaggatctggggctgcgcgacggcgtggaatatgagcgtagggtgttccacagtctgtttggaagccaggaccagaagattgggatgacggcttttgcggagaagaagaagcccgaatggactcatcagtaa

SEQ ID NO: 28877 - protein, 291 aa, Magnaporthe grisea 70-15
MNAFRALRPVASKIQAPTLPRITRGFAASSRLGYEHIQVSEPRPGVGQVTLNRPKALNALSTPLIKELNTALGDYQKSDSISVIVITGSQKAFAAGADIKEMAPLTFSKAYTESFIENWSDLTTQVKKPIIAAVSGHALGGGCELALMCDFIYCTESANFGQPEIKLGVIPGAGGSQRLTKAVGKARAMELILTGKSMTGAEAARWGVAARSFATYEELMEATLKTAETIASYSKVAVQACKEVVNKSQDLGLRDGVEYERRVFHSLFGSQDQKIGMTAFAEKKKPEWTHQ

SEQ ID NO: 28878 - DNA, 798 bp, Magnaporthe grisea 70-15
  CDS (1)..(798)
atgacaatcacggaagcagatctggtgctgagcggcacacctagtcccggagttctagtcctgcagttgaatcggccagacaagaggaatgctctttcgcagagtcttatcaatcaattgctgggcaaacttcgtgatgcatcggtagacgaaacggtcaaggcggtcgtggtgacaggcagtgcgactttcttttgcgctggtgccgatatcaaggagatatcggctcttgacggagagggcgcgagaaagtgcaggtatctcgaggatctgtgccatggattttcgtcgtttaggaaacccatttttgctgccgtggaagggatggctctcggcggggggttcgaagttgctctcgcttgcgatctgatctttgcttctgaaagcgcaaattttgggctcccagaggttaagatcggcttgattccaggggccggtggcacccaacgcttgacaaactccatgggaaagtacctggcgatgcgcatgatattgtttggagcaacaatcacgagccaagaagcactccatcacggcttggtcgcagagatcttccctgctggatcggtgctggagggcgccgttgccaaggccgcacaggttgctggcctcagctccacggcggtgcaattggccaaagaggccatctgccggagcgataacctgggcagggacgacgagttcgagcgaagtttgtactatttctcgtacgggacggcgcacaagcgggagggcattgctgcctttcttgagaagcgcgcccctgactggcgtgaggcccctcagggttcaccctag

SEQ ID NO: 28879 - protein, 265 aa, Magnaporthe grisea 70-15
MTITEADLVLSGTPSPGVLVLQLNRPDKRNALSQSLINQLLGKLRDASVDETVKAVVVTGSATFFCAGADIKEISALDGEGARKCRYLEDLCHGFSSFRKPIFAAVEGMALGGGFEVALACDLIFASESANFGLPEVKIGLIPGAGGTQRLTNSMGKYLAMRMILFGATITSQEALHHGLVAEIFPAGSVLEGAVAKAAQVAGLSSTAVQLAKEAICRSDNLGRDDEFERSLYYFSYGTAHKREGIAAFLEKRAPDWREAPQGSP

SEQ ID NO: 28880 - DNA, 906 bp, Nasonia vitripennis
  CDS (1)..(906)
atggtattcctggtgcgtcgcgtgagcgtcagcctgctgaaggcggcctcggtgtccgtgcgagctctgtccaccaaagtccagctgaaggaggacagcagtcccgggaaggagatcgtcctgaagtacctggacggcaaggacaacggaatcgcggttctcggcctcaaccgacccgaggctcgcaacgccttcggcaagaacctcgtgagtcagctgtcggacgccgtgtcgacgatcgagcaggacaagaaagtccgcgtgctgattctgcgcagccttgtgcccaaggtcttctgcgccggagctgatctgcgagagcgcagcaagatggagccccaggaggtggctaatttcgtcagctcgctgagggacctcatgcgcgatctcgaggccctctcggcccccgtcatctcggctctcgacggagtggctcttggaggcggactggagatggctctggccagtgacatcaggacagcctcggtcgaggcgaagatgggcctcgtcgagacgaagctggctatcattcccggagccggtggtacccagagactgcccaggatcgtcggacccgctttagccaaagagctcatctacaccgcgagaattttggacggcatcgaggcgcacaaaatcggtctggtgaaccgcgtcgtggcgcagaacaaggagggagacgccgcctatcaggccgctcttcacatcgccagagagatcctgccgaatgggccgatcggtgtcaaactggccaaggtggcgatttcaaagggtatcgaagtatcgatagatgacggctttgagatcgagaaacaatgctacgctcagcttttggatacggaagacaggatcgaaggcttggcagctttcgcctcgaaacgtgtacccgtttaccgagggctgtga

SEQ ID NO: 28881 - protein, 301 aa, Nasonia vitripennis
MVFLVRRVSVSLLKAASVSVRALSTKVQLKEDSSPGKEIVLKYLDGKDNGIAVLGLNRPEARNAFGKNLVSQLSDAVSTIEQDKKVRVLILRSLVPKVFCAGADLRERSKMEPQEVANFVSSLRDLMRDLEALSAPVISALDGVALGGGLEMALASDIRTASVEAKMGLVETKLAIIPGAGGTQRLPRIVGPALAKELIYTARILDGIEAHKIGLVNRVVAQNKEGDAAYQAALHIAREILPNGPIGVKLAKVAISKGIEVSIDDGFEIEKQCYAQLLDTEDRIEGLAAFASKRVPVYRGL

SEQ ID NO: 28882 - DNA, 882 bp, Anopheles gambiae str. PEST
  CDS (1)..(882)
ctgcaaatgcttcatttcacagcaccggttgcgccacacatcgcacgtaatctgtgtgccgcggctaacgcttccaccgatgcgtcgacaaagtacaacttcaagacactgaaactgtccacgccgagcccgttcgtggtgcacgtggagttcaatcggcccgatcgtatgaacgcgttcaatcggcagctgtggacggagatcaaggactgcttcgaccagctgcacaacgatcccgactgccgggtggtggtactgtccggcggttcctccaaacactttaccgccggcatcgatctgttcgatatgatgaagctgggccaggagatgggagccatcgaggagctgtaccaggattgcatcagctcgctggagcactgctacaagccggtcatcgtggcggtacattccgcttgcatcggggccggccttaacctgattacggcggctgacgtgcggtactgcacgcgggacgcctggttctcgctgaaggaggtggacatcgggctggcggcggacgttggcgcactgcagcgattcccgcgtgtcgtcggaaatcagagctgggtgcgggaacttgcctttaccgcgcggaagttcgctagcgatgaagcgcacagccacgggctcgtatcgcggctgttcgacaatcgggaagagttgctgcagggtgcgatcaagctggcggaggagatcgcgagcaagagcccgatcgcggtgcacggaacgaagaaaaacatcgtctactcggcggaccacacggtgcaggaagggctcgatcatatccgcgctattaacatgctgaacttgcagagtgaagatttcctgaacgcgatcatggcttcgcagagcaaggaaacgccggtatttgctaagctgtaa

SEQ ID NO: 28883 - protein, 293 aa, Anopheles gambiae str. PEST
LQMLHFTAPVAPHIARNLCAAANASTDASTKYNFKTLKLSTPSPFVVHVEFNRPDRMNAFNRQLWTEIKDCFDQLHNDPDCRVVVLSGGSSKHFTAGIDLFDMMKLGQEMGAIEELYQDCISSLEHCYKPVIVAVHSACIGAGLNLITAADVRYCTRDAWFSLKEVDIGLAADVGALQRFPRVVGNQSWVRELAFTARKFASDEAHSHGLVSRLFDNREELLQGAIKLAEEIASKSPIAVHGTKKNIVYSADHTVQEGLDHIRAINMLNLQSEDFLNAIMASQSKETPVFAKL

SEQ ID NO: 28884 - DNA, 900 bp, Anopheles gambiae str. PEST
  CDS (1)..(900)
atggcaaacattggacgtctgcttgcttcccgtgtggcgggtcagctggtgcgcaatgtcgccaccaaccagcagcagcagcaagccaacctgctccgtttctatagcagcgccccgaaagcgtacgagttcatcaaggcggagctggcgggcgagaagaagaatgtcgccgtgatcacgctgaaccgcccgaaagcgctgaacgcactgtgcaatgggctggtggcggagattagcgacgcgctggaccggtacgaggcggacgattcgatcggtgcgatcgtgatcacgggcagcgagaaggcgttcgcggccggcgccgacatcaaggagatgcagccgaacacgtacgccaagtgcatcaacaccgacttcctggccaactggacgcgggtggccaaggcacagaagccggtcattgcggcggtgaacgggtacgcactgggcggtggctgcgagctggcgatgatgtgcgatatcatctacgcgggcgataaggcacggtttgggcagccggaaattgcgctcggaacgatccccggggcgggcggttcgcagcgtacgacccgcgcgatgggcaaatcgaaggcgatggagatgtgcctgacagggaacatgatcacggccgaggaagcggaacgatcggggctagtgagcaaggtattcccggccgaaaagctggtcgaggaggcggtcaagctgggcgagaagatttccaccttctcgccgctgatcgtgcggctgtgcaaggaggcagtcaacgcgtcgtacgagatgtcgctcaacgaggggctgcgcttcgagcggcgccacttccacgcgaccttctcgaccaaggatcggctggagggtatgacggcgttcgtggagaagcgtgcgccaaagttctcgaacgaatag

SEQ ID NO: 28885 - protein, 299 aa, Anopheles gambiae str. PEST
MANIGRLLASRVAGQLVRNVATNQQQQQANLLRFYSSAPKAYEFIKAELAGEKKNVAVITLNRPKALNALCNGLVAEISDALDRYEADDSIGAIVITGSEKAFAAGADIKEMQPNTYAKCINTDFLANWTRVAKAQKPVIAAVNGYALGGGCELAMMCDIIYAGDKARFGQPEIALGTIPGAGGSQRTTRAMGKSKAMEMCLTGNMITAEEAERSGLVSKVFPAEKLVEEAVKLGEKISTFSPLIVRLCKEAVNASYEMSLNEGLRFERRHFHATFSTKDRLEGMTAFVEKRAPKFSNE

SEQ ID NO: 28886 - DNA, 1050 bp, Magnaporthe grisea 70-15
  CDS (1)..(1050)
atgccgccagtctcaaggatactgtcgtacgccccaagggtagccatacgaccatcgagtcaattggcccgtcctgcccgcgcctttgcggtcggcactgttcgctactactcagccgagcaacccgaggagccccttatccgcgtgacggatctccccgcgcccaacagcggccacattcgagtcctcgagttgaatcgaccaaaagcacgcaatgccatctctcgcgcgctcctagcttctctaagggaagaggtccactcgattgcccggcaatacgatgctcaaaccggtgaggagatcccgacgccgtcgtggaacaagaggtttggcgggatagcaggcgacagcgaaaagggcccgacgcgcgctctggtgctcgccagtgcagtggagagcagcttttgcgctggtgctgatctcaaggagcggaggggtttcacgcaagaggagaccaacgagttcctcgccaatttacgctctacctttgccgctctcgacgctctaccaattcccaccatctccgctatatcgtcccgcgcccttggcggcggactcgaacttgccctatgcacacactttcgagtcctcacctccaacgccatcgtgtccctgcccgagactcgcctcggaatcatccccggagcgggcggcactcacaggctaccccgcctcatcggcctcggtcgggcccgcgacatgattgtgacgggccgggccgtgtcgggcgccgaagcctacttcctgggcctagccgaccgattggtcgaggtgctcccgcccgacgagcaggaggccgcagacaccacggacaaggatgcggcgctgctaagtgccgcccgcgaggctgccttgaccgaggccgtgcgcctcgcctcgcagatctgcgagggtggaccgatcgggatcagggccgccctgcaggcggtgcaggcgccgtcccaagagactgagaacaaaatgtacgagagggtgattgggaccgaggaccggaacgaggcgctcaaggcgtttgcggagaagagaaagcctgtgttcaaggggaggtaa

SEQ ID NO: 28887 - protein, 349 aa, Magnaporthe grisea 70-15
MPPVSRILSYAPRVAIRPSSQLARPARAFAVGTVRYYSAEQPEEPLIRVTDLPAPNSGHIRVLELNRPKARNAISRALLASLREEVHSIARQYDAQTGEEIPTPSWNKRFGGIAGDSEKGPTRALVLASAVESSFCAGADLKERRGFTQEETNEFLANLRSTFAALDALPIPTISAISSRALGGGLELALCTHFRVLTSNAIVSLPETRLGIIPGAGGTHRLPRLIGLGRARDMIVTGRAVSGAEAYFLGLADRLVEVLPPDEQEAADTTDKDAALLSAAREAALTEAVRLASQICEGGPIGIRAALQAVQAPSQETENKMYERVIGTEDRNEALKAFAEKRKPVFKGR

SEQ ID NO: 28888 - DNA, 777 bp, Gibberella zeae PH-1
  CDS (1)..(777)
atggaccagcaactcatcctcccttccactcccgcagacggcgtacgcgtcctcgcgttaaacagaccctccaagcgaaacgccctctcgcaggaactcataaccgtctttctggaacagctcaagacagcatcccaagacgatggcgtgcgagtcattgtcatcactggcagctcgactttcttttgcgccggagctgatatcggggagatctcacgcctcgatgcggaaggcgcgcgggactgccgctacttgtcggatctttgtacggggatgcaagccgtgcgcaagcctttgatagcggctgttgagggaatggcgctcggtgggggcttcgagcttgctctcatgtgcgacctgatttttgcagcgcatgacagtcgatttggtctcccagaggtctcaattggtcttatccctggtgctggcggtacacagcggcttaccaacgccgtaggaaagttcaaggccatgcagatgatccttcttggacgtcccatacaagcagaagaggctcagtctgcaggactagttgcgcagctctatgaaagcggcagcgtcttggacaacgtggtgaaagacacggcatcgacgcttgcggcgctaagccccacggccttgggcttggctaaggaagcaatctgcaaatcggatgatttgggggttgatcacgagttcgagaggagtttgtattactttgcttttgggaccaaggataaagaagagggtgtccgagccttcctggagaagaggaagcctgagtggacgtccaagtaa

SEQ ID NO: 28889 - protein, 258 aa, Gibberella zeae PH-1
MDQQLILPSTPADGVRVLALNRPSKRNALSQELITVFLEQLKTASQDDGVRVIVITGSSTFFCAGADIGEISRLDAEGARDCRYLSDLCTGMQAVRKPLIAAVEGMALGGGFELALMCDLIFAAHDSRFGLPEVSIGLIPGAGGTQRLTNAVGKFKAMQMILLGRPIQAEEAQSAGLVAQLYESGSVLDNVVKDTASTLAALSPTALGLAKEAICKSDDLGVDHEFERSLYYFAFGTKDKEEGVRAFLEKRKPEWTSK

SEQ ID NO: 28890 - DNA, 873 bp, Gibberella zeae PH-1
  CDS (1)..(873)
atggcgcaacacaccttcaacagacaaccaccaccacaaacctatggccttgtgtcattcccagcccagcatgtcatgcttgtggtctttaacagacccaaagctctcaattccatgaccagcgacggagaatatgagctggaagccctttgggagtggtacgacaacgagccctccctccgatgcgccatagtgacaggtgccgggcgtgcattctgcgcaggcatggacctcaaggaatggaaccagatcaaccagcgcaaaagagatggcatacccgagaagcgaccgatggacccgcccacgacgggatttggcggcctctcgcgtaggagcggaaagaagcccatcatcgctgctgtcaatggcttggccatgggaggcggattcgagatgattgccaacctcgacctcatcgtcgctgcgaaaagcgctgtctttgccctaccagaggccaagattggtgtcgtcgctaatgcgggttccctgccgagactagccaggaccattggccgtcacagagcgactgagatggccctgacgggacggagcatcagcactacagaagcccgcgagtttggcatcctcaacgctataaccgaagacgctccagcggactgcgacgtgctggagcgtcccgtggtgaagaaagcccttgagtacgcggcagccatcatcagcaacagtcccgacagcgtgattgcgtctcgggctggtatccttgctggctgggaacatgggagcgccgagaatgcagtgcgcgtgcatcgtcagacgtgggactctgtcatggcggatggacacaatttccatgagggcgtgcaggcctttgtggagaagaggagcccgagatgggtggacagcaagttatga

SEQ ID NO: 28891 - protein, 290 aa, Gibberella zeae PH-1
MAQHTFNRQPPPQTYGLVSFPAQHVMLVVFNRPKALNSMTSDGEYELEALWEWYDNEPSLRCAIVTGAGRAFCAGMDLKEWNQINQRKRDGIPEKRPMDPPTTGFGGLSRRSGKKPIIAAVNGLAMGGGFEMIANLDLIVAAKSAVFALPEAKIGVVANAGSLPRLARTIGRHRATEMALTGRSISTTEAREFGILNAITEDAPADCDVLERPVVKKALEYAAAIISNSPDSVIASRAGILAGWEHGSAENAVRVHRQTWDSVMADGHNFHEGVQAFVEKRSPRWVDSKL

SEQ ID NO: 28892 - DNA, 825 bp, Gibberella zeae PH-1
  CDS (1)..(825)
atgacaaagacacttacacccccagaggtccccaatgtggttctctcataccccgagcctcatatccttcttgttaggctcaatcggccggagcatctcaatgcgatgcagcgacagatgagctttgatcttgatcgtctctggaaatggtacgacaacgagccctcactacgatgcgccgtcatcacaggcactggtcgggcattctgtgccggagcagacttgaaagaatggaacgtcaagaacagcgaaagcagcacaaccaacttggacaagtgggcagacaacggtttcggaggtttgagtaacagacgaggcaagaagcccgtcatcgcggcagtcaacggtctctgtctaggtggtggaatggaaatgatacttaacctcgacatggtcattgcaagcgaaacagccaagtttggcctgcccgaagtgaagcgcggcgttgtagccatcgccggcgcgctaccacgactgattcgtaccgtgggacgtcaacgcgcatccgagattgcactgctgggacgcatgtacaccgcagagcagttcctaagctggggtgttgtgaacaaggttgtcaagctggaggaagttgtctccgaggcgctgcgatgggcggtggaaatgtctaacaattcccccgattcggttatcgtgtcgcgcgaggggttgctgggtgggtgggaagcagaagggcccaaggacagcaccaacaggattgagcatggtgtatttaagacaatggaaggcggtgacaacatgaaggagggtgtcttgagttttgtcgagaagaggagcgctgtgtggaagaacagcaagctgtag

SEQ ID NO: 28893 - protein, 274 aa, Gibberella zeae PH-1
MTKTLTPPEVPNVVLSYPEPHILLVRLNRPEHLNAMQRQMSFDLDRLWKWYDNEPSLRCAVITGTGRAFCAGADLKEWNVKNSESSTTNLDKWADNGFGGLSNRRGKKPVIAAVNGLCLGGGMEMILNLDMVIASETAKFGLPEVKRGVVAIAGALPRLIRTVGRQRASEIALLGRMYTAEQFLSWGVVNKVVKLEEVVSEALRWAVEMSNNSPDSVIVSREGLLGGWEAEGPKDSTNRIEHGVFKTMEGGDNMKEGVLSFVEKRSAVWKNSKL

SEQ ID NO: 28894 - DNA, 960 bp, Gibberella zeae PH-1
  CDS (1)..(960)
atgcgtccccgtctctctcaacccgtaacaaccctccgcgtcctccggcgttgctactcttccgccactgctgaacctctcatccgcgtaacaaacctccccgcgcctaacactggacacattcgcattctcgaattgaaccgcccctcagctcgaaatgccatctcaaaagctctcctagcaaacctacgcgccgagattgatgaattgcatagccagtatggacccaatggcgaggaattgcctcttccgcaacgctttggtggtgctgctggtgtagatgagaagggccccacgagagctgttgtcctggctagtgctgtcgacacatctttttgcgcgggcgctgatctcaaggagcgcaagggatttacccctggagaaaccgctgagtttcttacaaatcttcgcaacacctttacatcgctctccaacctccccatcccgaccatctcagccatttcctccgtcgcacttggcggcggcctcgagctcgccctctccacccacttccgagtcctcagctcgaacgcaacagtcggtcttccagagacacgcctcggcatcatccccggcgccggcggcacccatcgtctgcccgccctgatcggtctctcgcgcgcccgcgatctgatcctcaccggccgtcgagtcggagctccagaggcttacttcctcggcattgcggaccgtctggtagaagttgtgcccaaggatgagcgcgacggctctgctattctcagtgaggcgagaaaggcggctttgagcgaggctgtgagactagcgcaggaaatctgcgagggaggacctattggtgtgagagcaggacttcaggctgtcgcgtgggcgagggaagaggtggaaaataagatgtatgagcgagtcgtcaactctgaggacaggaatgaggcgctcaaggcattcggggagaagagaaagcccatcttcaccggccgataa

SEQ ID NO: 28895 - protein, 319 aa, Gibberella zeae PH-1
MRPRLSQPVTTLRVLRRCYSSATAEPLIRVTNLPAPNTGHIRILELNRPSARNAISKALLANLRAEIDELHSQYGPNGEELPLPQRFGGAAGVDEKGPTRAVVLASAVDTSFCAGADLKERKGFTPGETAEFLTNLRNTFTSLSNLPIPTISAISSVALGGGLELALSTHFRVLSSNATVGLPETRLGIIPGAGGTHRLPALIGLSRARDLILTGRRVGAPEAYFLGIADRLVEVVPKDERDGSAILSEARKAALSEAVRLAQEICEGGPIGVRAGLQAVAWAREEVENKMYERVVNSEDRNEALKAFGEKRKPIFTGR

SEQ ID NO: 28896 - DNA, 858 bp, Gibberella zeae PH-1
  CDS (1)..(858)
atgtctaccgctacgcccattcccgcttacgcttcttataagcacatgcttgtcagctccccaggaccctttgtcgcccatgtcgagatcaaccgtcccaagaagctcaatgctttctcacaagaagtctggcttgagtttggccacgtcttcaaccaactcagcaatgattcagacatacgcgctgttgtgctcagcggcgctggcgatcgcgcattcacagcaggcctcgacgtgcaggctgcgtctggagatgggatcctctctgacgctgcaggtgatgtcgcgaagaaggccaaggtattgaggaatcacattgaggagttccaagattcaattagcgcgatggagaagtgcgaaaagcctgtcatttgcgttcttcatggtattgctatcggccttgctattgatattgcatgctgtgctgatatccgcttctgcgcttccactgtgcgcttcgccgtcaaggaagttgacattggtatggcggcagatatcggcacgctctctcgcctgcccaagatcgttggctcgacatcgtgggtcaaggatgtatgtctcacagcgcgagacttttctgcgcaagaggcgctgtcgatgggctttgtaagccaggtccacgagaacaaacaggcgactgtacaggccgcagtggcgctggcgacgacgcttgctgagaagagccccgtggcagttcagggaacaaaggagctgctcaactacagcagagatcacagtgtcgcggagggcttgaggtatacaaaggtgtggaacgcggcggctgtgcagggcagggactttgccgtgggattgacgagcgggttgaagaagacaaagcctcgattcgagaagttgtag

SEQ ID NO: 28897 - protein, 285 aa, Gibberella zeae PH-1
MSTATPIPAYASYKHMLVSSPGPFVAHVEINRPKKLNAFSQEVWLEFGHVFNQLSNDSDIRAVVLSGAGDRAFTAGLDVQAASGDGILSDAAGDVAKKAKVLRNHIEEFQDSISAMEKCEKPVICVLHGIAIGLAIDIACCADIRFCASTVRFAVKEVDIGMAADIGTLSRLPKIVGSTSWVKDVCLTARDFSAQEALSMGFVSQVHENKQATVQAAVALATTLAEKSPVAVQGTKELLNYSRDHSVAEGLRYTKVWNAAAVQGRDFAVGLTSGLKKTKPRFEKL

SEQ ID NO: 28898 - DNA, 789 bp, Gibberella zeae PH-1
  CDS (1)..(789)
atggacaatcttacagacctcaagctctcagtcaacgaggaaacaggtgttgcaaccattcagttcaacagacctgcaaagcgcaatgcgtttgcgcaaaagacaattgatgagatggtggccactttggcctacctcgactcagtggatactgtccgcgccgttgttctgactggtggaccagagggccatttctgcgctggaatggatctcaatgagcttgttgagctttccacttccaaagctcatcagattgcctttctcaaggacctcacagatgctcttgatcgattcaccaagcccatcatcgctgctgttgtaggctatgcgcttggcggtggttttgagatttcgcttgcatgcgacatcatctacgccgccgaagatgccatgtttggtcttcccgaggtaaagattggaacgatccctggagccgggggtacacagcgcctggctcgtgctcttggcaagcacaaggcaatggaattcgtcctcaccggcgaacctgccagcggcgcagaattcgagcggcttggagtggtaaccaaggttttccccaaggcggatgtgttgtcttccgcaacagcccttgccgaaaagattgcaaggctctctggtccagtcatcaagacggcgaagcaagctgtgttgacagtggaaaacagcaccctgagcgctggcatgacccatgaaaaggccctgtactactcgactttcggcctaaacgatttccaggagggcattcagtcattcctccagaagagagcgcctacattcaagcattcttga

SEQ ID NO: 28899 - protein, 262 aa, Gibberella zeae PH-1
MDNLTDLKLSVNEETGVATIQFNRPAKRNAFAQKTIDEMVATLAYLDSVDTVRAVVLTGGPEGHFCAGMDLNELVELSTSKAHQIAFLKDLTDALDRFTKPIIAAVVGYALGGGFEISLACDIIYAAEDAMFGLPEVKIGTIPGAGGTQRLARALGKHKAMEFVLTGEPASGAEFERLGVVTKVFPKADVLSSATALAEKIARLSGPVIKTAKQAVLTVENSTLSAGMTHEKALYYSTFGLNDFQEGIQSFLQKRAPTFKHS

SEQ ID NO: 28900 - DNA, 948 bp, Apis mellifera
  CDS (1)..(948)
atgcattctataaagcaaatatcgaatataatcaatttatattataaaagttatttacgaagatgtttaacctctaaatcatctgaaaatgttttgaaagaaattgatagagaacaaaaggaaaaaaatatagtagtggaatattttgaagatgttgctatgattggtataaatcgacctgaaacaaaaaatgctttaaatgttgcaactgcacaagaactggcagatgaaatagataaatttgaaaatgatgaaaactgtttaatcggtgtacttcatggaataggaggaaatttttgtagtggttatgatcttaaagaaattgcacaatataatggaaaaaatgaagaagttttacctcaatttggagcattggctaataaaattgaattgagtaaaaaacctttaatagctgctataaacggatatgctctaggagtaggatttgaacttgcattaatgtgcgatcttagagtaatggaagaaagtgcattattaggttttgccaatagacgatttgggatacccatattatgtggtggtacggttcgattacctgctctaattggatattcaagagcaatggatttgattttaactggtcgtcatattgatgcaaaagaagcattttcatgtggtttaattaatcgttatacagccgttggtaacgtgataggacatgcagtaaattttgcaagatcttttgtgaagtttcccaaaaaaacgctgcttgccgatcgagcttctgtacattatgctacattttctgctaaacaattagaagaagctatgcaatttgagaaagacaatgcatctcatttattatttgaagaaggagttgaaggtgcaaaaaggtttgttacagagggattaggaaaacatggaaaattttataatattacgaaaataaatttgaaatttaaggaattggataaagatcttttatga

SEQ ID NO: 28901 - protein, 315 aa, Apis mellifera
MHSIKQISNIINLYYKSYLRRCLTSKSSENVLKEIDREQKEKNIVVEYFEDVAMIGINRPETKNALNVATAQELADEIDKFENDENCLIGVLHGIGGNFCSGYDLKEIAQYNGKNEEVLPQFGALANKIELSKKPLIAAINGYALGVGFELALMCDLRVMEESALLGFANRRFGIPILCGGTVRLPALIGYSRAMDLILTGRHIDAKEAFSCGLINRYTAVGNVIGHAVNFARSFVKFPKKTLLADRASVHYATFSAKQLEEAMQFEKDNASHLLFEEGVEGAKRFVTEGLGKHGKFYNITKINLKFKELDKDLL

SEQ ID NO: 28902 - DNA, 1601 bp, Apis mellifera
  CDS (234)..(1043)
agttacgtttacgacgtcgtcgttggaagtactgaaggttaggttgagattactacgttatatttgaactttcctcaattctccctaccacaaatgttattggttgaacgttgaacgcgacagtgcgtaaagtccaaggagtcgcttgtgacattcttatacgatttgaaagggatacgcttaattgtaattacacgagacttaatttactgttcatatacaagctttatataatgggtcctttaactacaagagttaaatatacttttcattctctttgtacaattgctataagagcattatctaccaatgtaatgttaaatccaaaaaatgatgtaaaagaaatagtacttaaatatttggatggaaaagataatggtattgtagtattaggattaaatcgacccactgcttctaatgctcttggcaaaactttaactagtcaactaaatgatgctatttcttccatcagagaagatacaaaactacgagtattaattattcgcagtttggttccaaaaattttttgtgctggtgcagatttaagagaaagaagaaggatggataattcagaaattttaaaatttgtttcatttttaagaagcataacaaatattgcagcatcagattccaaaatgggacttgtagaaacaaaatgggctattattcctggagcgggtggcacacaacgacttccaagaataattggaattgctaaagcaaaagaactcatttatactgcacgtatagttgatggtgaacaagctatggaaattggtttaataaatcaagtagttcctcaaaataaaagtggtgatgctgcttatcaaactgctttaacaattgctagagaaattttacctaatggtcctattggagttaaaatggcaaaaatagcaatgtcaaaaggtcttcaagtatctattacagatggacttgaagttgaaaaacaatgttatagtaaagttgtggatacaaaagacagaattgaaggactagcagcattcataacaaaacgtatacctgtttatcaaggaatgtaaatatatcaaaatgaaatattgaaatatgagtgttttacaaatttgttacgcttaattattaacatatcaaaaatatgcattttaatagaaactaaatataggaaatacgccatttctttactacatttttataatatgactaattttgatatacatgtttacaaaagttcaagcatctttgtatttaaatagaaatctacaaaaatagcaaattaatacttagtataatacagaaataatattacataagatttatagttttaagtatttttatatgtgatttaaaattccagaatttatatagtttatattaattttgttatgttaatatataaatgtatatatgcatctatatacaaaatttatttttaaaaaataaaattatatttataaaatttcatgattttcattttattttatttatatttatataatattatcatcttaaataaaataaaaaatataagattatgctctatataaaatgaatatatatatatattcattctttgttttttttttttaactaaaattttatcatctattttatgtaaaatc

SEQ ID NO: 28903 - protein, 269 aa, Apis mellifera
MGPLTTRVKYTFHSLCTIAIRALSTNVMLNPKNDVKEIVLKYLDGKDNGIVVLGLNRPTASNALGKTLTSQLNDAISSIREDTKLRVLIIRSLVPKIFCAGADLRERRRMDNSEILKFVSFLRSITNIAASDSKMGLVETKWAIIPGAGGTQRLPRIIGIAKAKELIYTARIVDGEQAMEIGLINQVVPQNKSGDAAYQTALTIAREILPNGPIGVKMAKIAMSKGLQVSITDGLEVEKQCYSKVVDTKDRIEGLAAFITKRIPVYQGM

SEQ ID NO: 28904 - DNA, 1041 bp, Yarrowia lipolytica CLIB122
  CDS (1)..(1041)
atgcgaagcctatatataaacgttccgggtctttttccttccacctctctagcacgagaaacagtccaccacagaacagaaatgctccgaaccatccgatcttcctctcgacttggcgtccgagccatgtctaccgctgccacccgacgagctgcccagattggcttccacacccgagtccccactgtcgtcaccaaggcccccaccctccgaatgcagaccacccctttctcttcctctgctcccgcccagacctttggtgacaagaagtacgagcacatcctgacctccacccccgtccccaaggtcgctctcgtcaccctcaaccggcccaaggccctcaacgccctgtgcactcctctcattaaggagctgaacgaggctctccaggctgctgatgccgaccccaccattggcgccatcgttctcaccggatccgagaagtcctttgctgccggcgccgacatcaaggagatgaaggacaagaccgtcacttccgtgctcaacgagaacttcatcgaggagtggggcaacatggccaacatcaagaaacccatcattgctgccgtcaacggctttgccctcggtggtggatgcgagcttgccatgatggccgacatcatctacgccggcgccaaggccaagtttggccagcccgagatcaagcttggtgtcattcccggagctggaggaacccagcgactcacccgagccattggcctctaccgagctaaccactacattcttaccggagagatgttcactgctcagcaggctgctgactggggtctggccgccaaggtctacgagcccgcccagctcgttgacgagtccgtcaaggctgctgctcagatcgcctcttacggccagttggctgtccaggccgccaaggcttctgtccaccagtccgctgaggtcggtctccgagccggtctcgagtttgagcgagtccgattccacggtctctttggcacccacgaccagaaggagggcatggctgcttttgccgagaagcgagagcccaacttcaagaacgagtaa

SEQ ID NO: 28905 - protein, 346 aa, Yarrowia lipolytica CLIB122
MRSLYINVPGLFPSTSLARETVHHRTEMLRTIRSSSRLGVRAMSTAATRRAAQIGFHTRVPTVVTKAPTLRMQTTPFSSSAPAQTFGDKKYEHILTSTPVPKVALVTLNRPKALNALCTPLIKELNEALQAADADPTIGAIVLTGSEKSFAAGADIKEMKDKTVTSVLNENFIEEWGNMANIKKPIIAAVNGFALGGGCELAMMADIIYAGAKAKFGQPEIKLGVIPGAGGTQRLTRAIGLYRANHYILTGEMFTAQQAADWGLAAKVYEPAQLVDESVKAAAQIASYGQLAVQAAKASVHQSAEVGLRAGLEFERVRFHGLFGTHDQKEGMAAFAEKREPNFKNE

SEQ ID NO: 28906 - DNA, 879 bp, Yarrowia lipolytica CLIB122
  CDS (1)..(879)
atgctccgaacaatctccagaacccggaccatggtccccagccgacatttgatctcatacagattcttctccgacgtgtccacgaccaagggagagacgttcactctgaccaaacactttttggatgcctccaataccgcccacattgccgtctactcgctcaaccggcccgaggccatgaactccatctccaagaagcttctggaggaatttgagacctacatcaactcgctggcagccgaaggacgtcatcagaatgtcaccaacactcgtgctctgattctgagctcggagctgcccaaggttttctgtgctggagcagatctcaaggagcgaaagacatttactgatgctgacaccgctgccttccttaacaagctcaatggcactctcgacaccatccagagcctgcacatgcccactatcactgccattcagggctttgccctcggaggaggcgctgagatctccctggccacagacttccgagttctgtctgatgtggcccaatttggtctgcccgagacccgtttggcaatcttgcctggcgctggaggaaccaagcgactccccaagctgattggatactctcgagctcttgatctggtgctcactggacgacgagtaaaggccgacgaggctctccatcttggtattgccaaccgaaccggcgagaacgccctcgagactgcccttgaaatggctaagctcatctgtgagggaggacccattgcgatcaatgcggcaaagatggctgttcgaggccagtccaaggagtgggagatcgccgcctacaacaaggtggtcaattcggaagacaagttcgaggctctgtcggcattcaaggaaaagcgaaagcccattttcaagggtcgataa

SEQ ID NO: 28907 - protein, 292 aa, Yarrowia lipolytica CLIB122
MLRTISRTRTMVPSRHLISYRFFSDVSTTKGETFTLTKHFLDASNTAHIAVYSLNRPEAMNSISKKLLEEFETYINSLAAEGRHQNVTNTRALILSSELPKVFCAGADLKERKTFTDADTAAFLNKLNGTLDTIQSLHMPTITAIQGFALGGGAEISLATDFRVLSDVAQFGLPETRLAILPGAGGTKRLPKLIGYSRALDLVLTGRRVKADEALHLGIANRTGENALETALEMAKLICEGGPIAINAAKMAVRGQSKEWEIAAYNKVVNSEDKFEALSAFKEKRKPIFKGR

SEQ ID NO: 28908 - DNA, 843 bp, Aspergillus nidulans FGSC A4
  CDS (1)..(843)
atggcctcaaactactcgcccaaatactttaatatcaatttcccacaagaatatgtcgcccacgtcgagatcaaccggccgaaccagctaaatgcgttcttcgaggccatgtggctcgaactcggccaactcttcgcccagctctctactgaccccgccgttcgcgcaatagtcatctccggcgctggcactaaagcattcacagccggcctcgatgtaaaagccgcgtcgcagggcctcctatcatcagactccaaggccagtgaccccgcgcgcaaggctgtgcacctccgccgcgaagtcggctcgttccaagattgcgtctcatccattgagaaatgcgagaagcccgtcatcgtcgccatgcatggtttctcactcggtctggcgattgacctctcctctgctgcggatgtgcgcttctgtgcgaaagatacgcgcttcgcggttaaagaagtggatattgggcttgcggcggacgtgggtacactaagccgactgcccaagatcgtgggtaactatggctgggtaaaggatgttgcgctgtcagcgaggttgttcggggcagaggaggcactgagcgttggctttgttagtcgtgtatttgaaacgaaggaggaggctgttaagggggcgattgagcttgcggctcttattgcaagtaagagccctgtggcggtgcaagggacgaaagagctgttgaattggtcgagggatcatacggtgcaggatggtctccgatacacagcggtatggaacagtgccgcgctgcagaccagcgacgtccaatcggcattactgtcgggtatccaaaaacggaagccaacttttgagaaactgtag

SEQ ID NO: 28909 - protein, 280 aa, Aspergillus nidulans FGSC A4
MASNYSPKYFNINFPQEYVAHVEINRPNQLNAFFEAMWLELGQLFAQLSTDPAVRAIVISGAGTKAFTAGLDVKAASQGLLSSDSKASDPARKAVHLRREVGSFQDCVSSIEKCEKPVIVAMHGFSLGLAIDLSSAADVRFCAKDTRFAVKEVDIGLAADVGTLSRLPKIVGNYGWVKDVALSARLFGAEEALSVGFVSRVFETKEEAVKGAIELAALIASKSPVAVQGTKELLNWSRDHTVQDGLRYTAVWNSAALQTSDVQSALLSGIQKRKPTFEKL

SEQ ID NO: 28910 - DNA, 918 bp, Aspergillus nidulans FGSC A4
  CDS (1)..(918)
atgcctcctcgtcttacgcgtctggcgcttccaattcgagcttcgccgaccgtctcgctgcgtgtgaaggtcgcgagatacagcaccagtcccgacgatgccgtgattcagactcaatacgtccctgcgcctggatctggaaatattcgcgtccttctcctgaacagaccgaatgctcgaaatgcactgtccaaaaaccttctgacctcgttagctcagcatgtcaattcgatctctgccgagggtggtaacgggccgactagagctttggtcatcggtagcaatgctgactccgccttttgcgcgggagctgatcttaaggagcgactgcatatgacaaaggatgaaacaaacgcattcttggccaagctgagaggcacattccgcgaccttgctgctcttccggtccctaccatctctgctgtatcttccctagccctgggtggcggtctcgagctcgccctttgcacgcatctccgcgttttcggctccaacagcaccgtcgccctacccgagacgaagctggcgatcatccctggcgcaggcggtacttatcgccttccgtcgctgattggtgtgaaccgtgcccgggacctcatacttaccggacgccgtgtgacgggacctgaggcatactttatcgggctgtgcgatcgactggttgagatccttccggaagaggagcagaaggagggtgctgcgcgtgagaaggtactgcgtgagagcatcaagcttgctctggacatctgtgacggtggtcccattgccataaagcaggcattgaaagcagtcaacgggtatgagcagggtgaggcggcagagaacgaggcgtatgatggtgttgtcgagacggaggacaggcgcgaggctctgattgcgttcgcggagaagaggaagcctgctttccggggccgataa

SEQ ID NO: 28911 - protein, 305 aa, Aspergillus nidulans FGSC A4
MPPRLTRLALPIRASPTVSLRVKVARYSTSPDDAVIQTQYVPAPGSGNIRVLLLNRPNARNALSKNLLTSLAQHVNSISAEGGNGPTRALVIGSNADSAFCAGADLKERLHMTKDETNAFLAKLRGTFRDLAALPVPTISAVSSLALGGGLELALCTHLRVFGSNSTVALPETKLAIIPGAGGTYRLPSLIGVNRARDLILTGRRVTGPEAYFIGLCDRLVEILPEEEQKEGAAREKVLRESIKLALDICDGGPIAIKQALKAVNGYEQGEAAENEAYDGVVETEDRREALIAFAEKRKPAFRGR

SEQ ID NO: 28912 - DNA, 864 bp, Aspergillus nidulans FGSC A4
  CDS (1)..(864)
atgcctgacttccaaacgcccccaccatcctcctccatcttcacactctcctttccaacgccccacatcctcctcgtcactatatcacgagagtctcgcatgaacgcgatccccacgcaaggccacaaagacggttacgcaatttggaactggtttgacgaggagccctcgctacgggtcggcataatcacaggcgcagggagcaaggcgttctcagcgggcgcggatctgctcgagcagcttgagttcaagacgaagaatgatgatgcatcttctgcttcaggtaaagggacagaaggggtgagacgggaaccaatgccaaatggctttggcgggatctcgcagcgcagaggcaagaaacctgttattgcggctgtgaacggactcgcgctgggtggggggtttgagatttgcttaaattgtgatatggtcgttgcctcaccaaccgctcaattcgccctcccagaagtccaacgcggcctctatgcgggggccggcggcctcacacgtattatccgcacagtgggaatgcaggttggcacggagctcgccctgactggacgccgcattagcgcgcaggaagcaaaatccctacggcttgtgaatcgcatctctgagacaccagagaaggttctggatgatgcgatcagtctggccaacatggtggccgacgttagtcctgacgcggtgattgtctcgaggcatggattgcgggaggcctgggagtcagggtctgtggaacagggtagtcgggcgacggcggagctttatggggcgaggttgatgaagggggataatttaaggagaggactcgaggcttttaaggagaagaggaagcctaactgggttggttcgaagctttag

SEQ ID NO: 28913 - protein, 287 aa, Aspergillus nidulans FGSC A4
MPDFQTPPPSSSIFTLSFPTPHILLVTISRESRMNAIPTQGHKDGYAIWNWFDEEPSLRVGIITGAGSKAFSAGADLLEQLEFKTKNDDASSASGKGTEGVRREPMPNGFGGISQRRGKKPVIAAVNGLALGGGFEICLNCDMVVASPTAQFALPEVQRGLYAGAGGLTRIIRTVGMQVGTELALTGRRISAQEAKSLRLVNRISETPEKVLDDAISLANMVADVSPDAVIVSRHGLREAWESGSVEQGSRATAELYGARLMKGDNLRRGLEAFKEKRKPNWVGSKL

SEQ ID NO: 28914 - DNA, 783 bp, Aspergillus nidulans FGSC A4
  CDS (1)..(783)
atgactcaggcgcaaacccaatcacatctccaagggaacgatctcatcctcgcctggtcaccctgcccaggagtgcgcgtgctcacgttgaaccgcccggcaaagaaaaacgctctatcacagggtctcatagacgagcttctattgcagctgaaaatatccacaggcgacgacgatatccatgcaattatcgtaacgggctccgacacagttttctcagccggtgcagatatcaacgagatctcgaaactcgatgcagaaggtgccaaggaaatacgctatcttgaggaactatgcgatgtaatacggggagtaagaaagccagttattgtagctgttgaggggatggcttcggatttcatcgtcgcaacaactgcctccgagttccgtctgccagaactgacaattggacttatccccggggctggaggaacacagaggctgaccagtgcgcttggcaaataccgagctatgaaactgatcgtcctgggtgagcctctgtccggaactgaagcccacagcttgggcttagtttgctcgctcacggaaccggggcaagcattgcagagtgcgctgggtctagctatgaagctaggctcacggagtcagtcagctatcatgctggccaaagaagctatttgcagaggtagttactcttactggattctgggccaaatagccttgtttgtgctgtttcagtcaatcaaatatcttttcgcgcatatctttaggtccctcactgttgtgacactgcaggagtgcaagaccatcatcatcaaatga

SEQ ID NO: 28915 - protein, 260 aa, Aspergillus nidulans FGSC A4
MTQAQTQSHLQGNDLILAWSPCPGVRVLTLNRPAKKNALSQGLIDELLLQLKISTGDDDIHAIIVTGSDTVFSAGADINEISKLDAEGAKEIRYLEELCDVIRGVRKPVIVAVEGMASDFIVATTASEFRLPELTIGLIPGAGGTQRLTSALGKYRAMKLIVLGEPLSGTEAHSLGLVCSLTEPGQALQSALGLAMKLGSRSQSAIMLAKEAICRGSYSYWILGQIALFVLFQSIKYLFAHIFRSLTVVTLQECKTIIIK

SEQ ID NO: 28916 - DNA, 825 bp, Ustilago maydis 521
  CDS (1)..(825)
atgacggcatcagcgctggcgtatctggagcctgactcttcagcagagctgactggtgtataccacctcgtactggatcggcccgaagctcgcaatgccatttcacgatctctgttgcaagatgtgctacaatgtctacaagtgcttgtttgcaagatcactcaacctaaacaagacgagcccttacctcgcgttctgatccttcgagccaacggcccatgcttttgcgcaggagcagatctcaaggagcgaagggagatgtcggaagccgaggtcattgagtttcttcaagatctgaggcatatgctcgagcaggtcgagaagctgcccattccaactcttgctgccatcgacggaccggccttaggtggtggactggagctcgctttggcgtgtgacttccggatcgcagccgaaactgtgagcaagatcggctttcctgaagtcaagcttggtatcattccgggtgcaggaggaacacagagagcccctcggatcattggcatgcaacgggccaaagagctgatttatacaggtactcagctgaacgcgacacaagccaaagacctgggcttgattgaccatgtcgctccaggatcaacgtgtctcaagctctgccaggagctggcgcagcagatgatgccttccgctcccttggcacttcgagctgcaaagatggcgatcagtatgggcgccaatgtggagctagctcgtggactcgacctcgagtgggcctgctatgagccacttctcgaaagcaaggatcgaagagaggctttggatgctttccaacagaaacgcaaaccaatcttcactggcaaatag

SEQ ID NO: 28917 - protein, 274 aa, Ustilago maydis 521
MTASALAYLEPDSSAELTGVYHLVLDRPEARNAISRSLLQDVLQCLQVLVCKITQPKQDEPLPRVLILRANGPCFCAGADLKERREMSEAEVIEFLQDLRHMLEQVEKLPIPTLAAIDGPALGGGLELALACDFRIAAETVSKIGFPEVKLGIIPGAGGTQRAPRIIGMQRAKELIYTGTQLNATQAKDLGLIDHVAPGSTCLKLCQELAQQMMPSAPLALRAAKMAISMGANVELARGLDLEWACYEPLLESKDRREALDAFQQKRKPIFTGK

SEQ ID NO: 28918 - DNA, 951 bp, Ustilago maydis 521
  CDS (1)..(951)
atgctgcgattacgacctgttgcaacgagcgcttgctccgctgcctctctactgcatcgctctgcagcatgctatcctagaagcgcgatccgctgctactctacaagcattggcccaacacagctagtgtcgctggatactttgtccgacatcgccaaaaccgagcatgggtcggcttcgccatatgatgagcacatttcggtgctgacgctcaaccgtgcgcctgccaagaatgccatctcgaaggcacttttggcggagatggatcaacacgtcacgtcgctgctcacctcgtctacggttcgaacgctgttgatccgctcttccgtgagcggaacgttctgcgccggtgcagatctcaaggagcgcaaaggaatgtcaaaagcggaagtggatgcgttcttactgggcttgcggaaagtgttcaccaatgtgtcacgattgccgatgcctacgattgcctgtctcgatggattggctatgggcggagggctggagctcgcgctcacgtgtgatctgaggattgccggacccgcagcaacgaggctgggcttgaccgagacaaagcttggcatcattcctggcgccggcggaacgagcaggttgaccagattggtgggagctgctcgtgcaaaagagctcatcttcagtgccaaactcgttgatgcggtcgaggcaagtcgaatcgggtttgtcgacattgtcgctcaggaaggtgacgatacagctgccttcaacaagggagtacagcttgcaagatcgttcgctaagaatggaccactagcggtgcgagctgctaagcttgcgatcgacaagggcgaacagatggaccctgagacggcgcttgactttgagcgccaatgctatgagacgattcttggcaccaaggatcgtctggaagggctcaaagcgtttgctgaaaagcgggagcccgagtaccgaggcgagtag

SEQ ID NO: 28919 - protein, 316 aa, Ustilago maydis 521
MLRLRPVATSACSAASLLHRSAACYPRSAIRCYSTSIGPTQLVSLDTLSDIAKTEHGSASPYDEHISVLTLNRAPAKNAISKALLAEMDQHVTSLLTSSTVRTLLIRSSVSGTFCAGADLKERKGMSKAEVDAFLLGLRKVFTNVSRLPMPTIACLDGLAMGGGLELALTCDLRIAGPAATRLGLTETKLGIIPGAGGTSRLTRLVGAARAKELIFSAKLVDAVEASRIGFVDIVAQEGDDTAAFNKGVQLARSFAKNGPLAVRAAKLAIDKGEQMDPETALDFERQCYETILGTKDRLEGLKAFAEKREPEYRGE

SEQ ID NO: 28920 - DNA, 957 bp, Ustilago maydis 521
  CDS (1)..(957)
atgacctcctctaaaatcatgatgccgaaggtgggctcacatctgatcctcaccatccctgcacgtcatgtgcttcagatgacgctcaacagacccaaacagctcaactcgatgacggatgctatggaagaggacatctgtcgtgtgttcgattggttcgagaccgagccctctctttgggttatcatccttgcgggcaagggtagagcgttttgcgccggccaagacctcaaggattggctcagcaagaatcagacttccgatactatgacgcataccacaggagagcccatgcagtctgatgcagaggttagtaaatccattcagaggctcaagcgaggtggctttgggggtatgagttcgcgaaggagcgccaagcccatcatcgccgctgttgatggtatttgcatgggaggcggcacagagaccatcctcaattgcgacatggtggtggccagtactcgatccgtaatcggcctgcctgaggtagccaggggcgttgtggctgccatgggtggtattcctcgactcacacagctatgtggtcaccaacgtgcgtcggagcttctcctcctcggcaagcctatcagtgctaaggaagctcatgaccggtacaatatggtcaaccggctcgttgatgttgcaaagtcgacatccgaggagctcggtcaggcagcagtagataaggctgctatcgatatcgccattcagctgacccagaatagtcccgatagcgtgcttgtgacaaagtctgccttagtcatggcccgcgactcgacgaacggcgacattgatgcttcggcgcgagacaacttgttgtccgacagaagtcgattgctctatgtgggcaagaacatcaacgaaggcttagaggcattcaaagggaaacgcaacccgaaatggttcaacccacttcccctggccccgccatccagccacgcgaggtcaaagctttga

SEQ ID NO: 28921 - protein, 318 aa, Ustilago maydis 521
MTSSKIMMPKVGSHLILTIPARHVLQMTLNRPKQLNSMTDAMEEDICRVFDWFETEPSLWVIILAGKGRAFCAGQDLKDWLSKNQTSDTMTHTTGEPMQSDAEVSKSIQRLKRGGFGGMSSRRSAKPIIAAVDGICMGGGTETILNCDMVVASTRSVIGLPEVARGVVAAMGGIPRLTQLCGHQRASELLLLGKPISAKEAHDRYNMVNRLVDVAKSTSEELGQAAVDKAAIDIAIQLTQNSPDSVLVTKSALVMARDSTNGDIDASARDNLLSDRSRLLYVGKNINEGLEAFKGKRNPKWFNPLPLAPPSSHARSKL

SEQ ID NO: 28922 - DNA, 975 bp, Ustilago maydis 521
  CDS (1)..(975)
atggagccgatggtgctttgcagcgtgaagtcagaagatttgtttcgcgacaccatcatcttcccgtcccgtagctcgcacaagatgttggcctcaaccgttcgcaccgcgcttcgcaccagcgcgccccgcatcgctgcgctcccctccacacgctgcctgtccacctcgctgccgcgtctttcgtcggcaactgccaaggaataccaaaacatcctcgtctcgtcgcccgccaaaggcgttacgctgatcacgttgaaccgacctaaggcgctgaatgcactcaattcggcgctcttccacgaactcaacgaagccaccgagatcgccgacaatgaccctgaggtcggagctatcgtcctcaccggatccgaaaaggcgttcgctgcgggcgccgatatcaaggagatgaaggacaagcagtacgctgatgcatacaagaccaacttcttgggtcactggaccaagctcaccacggtgcgcaaaccgatcattgctgctgtgagcgggttcgcccttggtggtggttgcgagttggccatgatgtgcgatatcatcctcgcttcgcccacagccaactttggtcaacctgagatcaacctcggcgtcattcctggcgccggtggcacgcaacgtctcaccaaagctgttggaaaatccaccgccatggagatggtactcacgggccgcaactttagcgccgatgacgccgagcgtcgcggcttgatctcgcgcgtcgttcgcgagggaagcgtcgttgatgaagccgtcaaggtcgcttccaccattgccaaaaagggtcagatcgctgtccaggccgccaaggaaggtgtcaatgcctccttcgagctgagcttgcaagagggaactcgcttcgaacgccgtctcttccagagtctattcgctaccaaagatcagaaagaaggcatggcggctttcgccgaaaaaaggaaggccaactttacgcacgagtaa

SEQ ID NO: 28923 - protein, 324 aa, Ustilago maydis 521
MEPMVLCSVKSEDLFRDTIIFPSRSSHKMLASTVRTALRTSAPRIAALPSTRCLSTSLPRLSSATAKEYQNILVSSPAKGVTLITLNRPKALNALNSALFHELNEATEIADNDPEVGAIVLTGSEKAFAAGADIKEMKDKQYADAYKTNFLGHWTKLTTVRKPIIAAVSGFALGGGCELAMMCDIILASPTANFGQPEINLGVIPGAGGTQRLTKAVGKSTAMEMVLTGRNFSADDAERRGLISRVVREGSVVDEAVKVASTIAKKGQIAVQAAKEGVNASFELSLQEGTRFERRLFQSLFATKDQKEGMAAFAEKRKANFTHE

SEQ ID NO: 28924 - DNA, 852 bp, Cryptococcus neoformans var. neoformans B-3501A
  CDS (1)..(852)
atgttagctcgcactctcctcaagccttcccaatctacataccgactcactatccgcgccatgtccacctctgcagaacagctcgtcatcccctctcgttctccttcgaacaacgtagccatcttgacccttaacaggcccaaggccctcaacgcgttgagcacgcccttgttcaatgctctcaacgccgagcttgagaaggccgagacagatgagagtgtgagggctatcgtcatcaccggtggtgacaaggtgtttgctgccggtgccgacatcaaggagatgaaggacaaggaatttgctgaagcatacactagcaacttccttggatcctggaaccaaatcgcctctatccgcaagcccattgtcggtgctgtcgccggctacgccctcggaggcggatgtgagctcgccatgctctgcgacatcctcgtcgcttctccgaccgccgtctttggccaacccgagatcacacttgggattattccaggtatgggcggctcccaacgccttacttccctgattggaaaggcgagggcaatggacatggtcctcactgggaggaagattgatgcggagacggctgagagatgggggttggttagcagggttacgaaagaaggagagagtgtgactgaggaagcggtgaaggtggcagagaacgtgagcaagtttggaaaggtggctgtacaggctggtaaggaggccgttaatggatctctcgaccttcccctcgagcaaggtctaaggctcgaaaggaggctcttccagcaactcttcgcgaccaaggaccagaaggaaggtatggctgcttttgccgagaagaggaagcctacttggtccgacaagtaa

SEQ ID NO: 28925 - protein, 283 aa, Cryptococcus neoformans var. neoformans B-3501A
MLARTLLKPSQSTYRLTIRAMSTSAEQLVIPSRSPSNNVAILTLNRPKALNALSTPLFNALNAELEKAETDESVRAIVITGGDKVFAAGADIKEMKDKEFAEAYTSNFLGSWNQIASIRKPIVGAVAGYALGGGCELAMLCDILVASPTAVFGQPEITLGIIPGMGGSQRLTSLIGKARAMDMVLTGRKIDAETAERWGLVSRVTKEGESVTEEAVKVAENVSKFGKVAVQAGKEAVNGSLDLPLEQGLRLERRLFQQLFATKDQKEGMAAFAEKRKPTWSDK

SEQ ID NO: 28926 - DNA, 903 bp, Cryptococcus neoformans var. neoformans B-3501A
  CDS (1)..(903)
atgctcctcccattggtcagacacgtatccaagtcactaaccaaacaacgatgcttcgccgcatggggaaggaccatatcgaccacccccgagccccacgcctaccttcgtcccctcctctcaaccaccgcagacgccaagttgcctgagcttgacaaggttatgaccctcatgctgaatcggccggctactaaaaatgcgctgactgttcaaatggtttcggagatgcgtgaagcacttgccaccttgaatcccgcagactctcgtctacttctcatacagtcttccaacccctctcttttttgttctggcgcagacttgcgtgaacgtcgtactatgagcccgatgcaggtctcgaacttccttgacaatctcagacaattgctggccgagctagaggctttaccgatcccgactgttgctgtgattgacgggtatgctttgggaggaggggcagagctggctttggggtgtgatttgagagttggcggagacaataccaagattgctttgccggagactaagcttggcattattccaggagcgggcggcactcaacgcctcacccggatcgtaggcatggccaagtctaaggaacttatatttacagggcgtcacgttcaagggcctgaagctgaacgcatcggtcttttgaacatttacgcctcttctccttcctcccctttcgaagccgcactcattttggcccgtcagatactgacatccgctcccctggctctggcagccgcaaaacgagccatttcatcagcaccggaattgtctcttgaagccggcctcgacctggaacgagcagtctataatgggctgctggatacggatgacagacaagaagggctgaaggcttttgcagagaagagaagggcagactttcgtggacggtaa

SEQ ID NO: 28927 - protein, 300 aa, Cryptococcus neoformans var. neoformans B-3501A
MLLPLVRHVSKSLTKQRCFAAWGRTISTTPEPHAYLRPLLSTTADAKLPELDKVMTLMLNRPATKNALTVQMVSEMREALATLNPADSRLLLIQSSNPSLFCSGADLRERRTMSPMQVSNFLDNLRQLLAELEALPIPTVAVIDGYALGGGAELALGCDLRVGGDNTKIALPETKLGIIPGAGGTQRLTRIVGMAKSKELIFTGRHVQGPEAERIGLLNIYASSPSSPFEAALILARQILTSAPLALAAAKRAISSAPELSLEAGLDLERAVYNGLLDTDDRQEGLKAFAEKRRADFRGR

SEQ ID NO: 28928 - DNA, 858 bp, Strongylocentrotus purpuratus
  CDS (1)..(858)
atgtcttcaggagggctttcaaaatataattttgagtcactcgctgtgacaagtccccaggagtttatctacaaggttgaggtgaacaggccagagaaacgtaatgctatgaacaaaacattttggagagagatggtagaatgttttaataccattgcaactgacgaagactgcagagtagtactattaactggggcaggcaagacattttctgctggtatcgatctacaggataatgctgaattgatgcagggtgctattccgggatcaactgatcttgatgtatcacgtatcgcctataaactcagatcgaagatcaaggagtatcaagagtctttctttgttattgagaagtgtcctaagccagtgatagcagccgtccagggggcctgtttaggaggaggactctgtatgatctctggatgtgatattaggttgtgtactgaagatgcttggttccaaattaaggaaacagaccttggtctagctgcagatgtaggagtgcttcagtggttaccaaagaagacatctaatgacagtctgcttcgagagctctgtttcacagcaaggaagtttgattcaagtgaagccaaggaattaggtctgatcagtcgcctgtacccagaccaagaagccatgatgggtagtgctatggagctagcagcaactatcgccagtaagagtccagtggctatgcagggcactaaagttaatctgaactacagccgagatcataccgtagcagaaagcttcgagtatattgcaacgtggaacgcagcccatctacagactgaggatcttgcaaaagcagtcatggcaagcatgacaaaatcaaaggcagagttttcaaagctgtga

SEQ ID NO: 28929 - protein, 285 aa, Strongylocentrotus purpuratus
MSSGGLSKYNFESLAVTSPQEFIYKVEVNRPEKRNAMNKTFWREMVECFNTIATDEDCRVVLLTGAGKTFSAGIDLQDNAELMQGAIPGSTDLDVSRIAYKLRSKIKEYQESFFVIEKCPKPVIAAVQGACLGGGLCMISGCDIRLCTEDAWFQIKETDLGLAADVGVLQWLPKKTSNDSLLRELCFTARKFDSSEAKELGLISRLYPDQEAMMGSAMELAATIASKSPVAMQGTKVNLNYSRDHTVAESFEYIATWNAAHLQTEDLAKAVMASMTKSKAEFSKL

SEQ ID NO: 28930 - DNA, 864 bp, Tribolium castaneum
  CDS (1)..(864)
atgttcgcaataagagtggcacaaaatgtgttgcgcccccaaagacgcaaactatcgcaagtcgcccaagacctgacctacacgcaactgcaaggatctgacaccggaataaccgttttcggttttaaccgccccaaacaaaagaacgccttaagtgccaacctagtaaccgaattacagaaatctctccagaaaatcacattcgacccctcggcccgcgttttaatagtgcgaagccacgtcccgggagtcttctgtgccggagcggatcttaaagaacgcgcaacgatgcctcaagcggaagtcggtaaattcgtctcaaacctgcgaagtctcatggaccagttccacaacctccctatccccgtcatagccgccttggatggagttgctttggggggaggtctggagatatccctggcttgtgacattcgggtcgcttcaagtgactgtaaaatggggctagttgagggcaaattggccataataccgggggccggaggcacccaaagactcccccggcttatcaacccctcaatcgccaaggaattgatatacacggcgcgaacaatcgacggtggtaccgcccaccgattgggtattgtcaaccacgtggtgtcacaaaacgccaatcaggacgcagcttatttgaaatcactggagttggcgcacgaaatattaccgaatggacctgtggcggtccaaatggccaaaaaggccatcaataagggggttcaagtcgacttaagttcgggattagcgatcgaggaggcgtgctatgctcagctgataccgaccaaggacaggttagagggactacaggcgttcaaggagaagcgaaaaccgaattatattggcgaatga

SEQ ID NO: 28931 - protein, 287 aa, Tribolium castaneum
MFAIRVAQNVLRPQRRKLSQVAQDLTYTQLQGSDTGITVFGFNRPKQKNALSANLVTELQKSLQKITFDPSARVLIVRSHVPGVFCAGADLKERATMPQAEVGKFVSNLRSLMDQFHNLPIPVIAALDGVALGGGLEISLACDIRVASSDCKMGLVEGKLAIIPGAGGTQRLPRLINPSIAKELIYTARTIDGGTAHRLGIVNHVVSQNANQDAAYLKSLELAHEILPNGPVAVQMAKKAINKGVQVDLSSGLAIEEACYAQLIPTKDRLEGLQAFKEKRKPNYIGE

SEQ ID NO: 28932 - DNA, 825 bp, Tribolium castaneum
  CDS (1)..(825)
atgtctcaagtttcttacgaaactttatcggtaacagtgcctaaagaatttgtatatcatgtcgaactcagtcgtcctgacaaaattaatgcgatgaataacactatgtggatggaaatcaagaaatgcttcgaaaccttaaacactgatgaaaattgcagagccattgtcttatcagcagcggggaaaattttcacttgtggtttggacttccagcaagtgatgcaagttgggccccaactggctcagatgagtgacatagctcgcaaagctaaaattttgtatcagtttgttacaaattaccagaactccgtttcatcacttgaattatgcagaaagcctgttttggctgctgttcattctgcttgcattgggggaggttttaatcttatcacagcagctgatatgagatactgtactaaagatgcatttttccaactcaaagaggtcgatattgggatggctgccgacgtgggggcccttcaaagactgcctaaagtggtggggtccgatagtttagtaagagagttggcttacactgcccgaaaaatgccagcaagtgaagccctaagctcggggttggtctcgaaagtgtttgatgataaagatggaatgattgagggtgttgttgggatagcggcagaaattgcctcaaagagccccgttgcagtacaaggtacaaaatttaatttggtttattcacgggatcacactgtacaagagggattggatcatattgccatgtggaatcaaacaatgatgcaaagtgaagattttacgactgccactgtagctcaagcaacaaaacagaaaaacaaagcttaa

SEQ ID NO: 28933 - protein, 274 aa, Tribolium castaneum
MSQVSYETLSVTVPKEFVYHVELSRPDKINAMNNTMWMEIKKCFETLNTDENCRAIVLSAAGKIFTCGLDFQQVMQVGPQLAQMSDIARKAKILYQFVTNYQNSVSSLELCRKPVLAAVHSACIGGGFNLITAADMRYCTKDAFFQLKEVDIGMAADVGALQRLPKVVGSDSLVRELAYTARKMPASEALSSGLVSKVFDDKDGMIEGVVGIAAEIASKSPVAVQGTKFNLVYSRDHTVQEGLDHIAMWNQTMMQSEDFTTATVAQATKQKNKA

SEQ ID NO: 28934 - DNA, 888 bp, Tribolium castaneum
  CDS (1)..(888)
atggcagcgaaaagtttggctcggtttgtggtctccagaatttccacccccgcctccaacaaggcattccttaacaaccccaacatcaaattctacagcgttcaaaaaaacttcgaatttattaaaacgcacaaagctggggcccgcaacaatgtgggggtgattactctgaaccggccaaaggcccttaatgccctttgcaacggcttgatgcaggaagttgccgacgctttggacgtgtttgagaaggacaacgacgtgggggctatcataatcaccggtagcgaaaaggcctttgctgcaggtgccgacatcaaagaaatgcaaaacaacacttattcgcaatgcgttcggggcaactttttggcccattggaaccgcgtctctgagagcgtgaagccggtgattgctgccgtcaacggctacgctctggggggcggttgcgagctggccatgatgtgcgacatcatctacgcaggcgagaatgccaagtttgggcaaccggagatcttgattgggaccattccgggggctgggggcacccagaggttgacgagggttgtggggaagtccaaggctatggagatggtgctcacgggggatcaagtgccggcgcacgaggccgagaagatgggtctggtcagtaaagtcttcccggttgagaaactgatggacgaaacggtcaaactagcggagaaaattgcgaaaaattcgcacctagttaacggaatgtgcaaggagtcggtcaatacagcgtacgaaacgacgctcagagaggggctccacttcgagaaacggatgttccacgggaccttcgctactaaagaccgcaaagaaggaatgactgcttttattgagaaacgggccccgaatttcacaaatgaataa

SEQ ID NO: 28935 - protein, 295 aa, Tribolium castaneum
MAAKSLARFVVSRISTPASNKAFLNNPNIKFYSVQKNFEFIKTHKAGARNNVGVITLNRPKALNALCNGLMQEVADALDVFEKDNDVGAIIITGSEKAFAAGADIKEMQNNTYSQCVRGNFLAHWNRVSESVKPVIAAVNGYALGGGCELAMMCDIIYAGENAKFGQPEILIGTIPGAGGTQRLTRVVGKSKAMEMVLTGDQVPAHEAEKMGLVSKVFPVEKLMDETVKLAEKIAKNSHLVNGMCKESVNTAYETTLREGLHFEKRMFHGTFATKDRKEGMTAFIEKRAPNFTNE

SEQ ID NO: 28936 - DNA, 876 bp, Tribolium castaneum
  CDS (1)..(876)
atggtaacaagaattccatcagttgtaatacgacattacagcaatagccctaaaacggttttaaccgaaaaaattggcgaaatcgttaccattggtctaaaccgacctgaaaaacgcaactgcattgaccccagcactgcggatctgctccgtgaggctattgaagacttcgaaaatgataacacactcaaagctgctgttttgtacgggactgggggcaacttctgtgccggttacgatcttaaatccctgtcaaaggtggacgagactcagattgcgttgaatcccgaaggccaaataggccccacgttacgttttattaaaaaaccaatggtggctgccataagtgggtatgctgtcgcgggcggcttggagttggctctgatgtgcgatttgcgcgttatggaggacactgcagttatgggggtgtattgtagacgctttggggtccctttagtcgatgggggcacagtgcggcttcaagcgatggtggggttatcaagagcgctagatttaatcctcacggggcgttcgctcagtgccaaagaagcgtttgagtggggggtagccaataggattgtggcatgtggcacagccctgggtcaagcaatccaactcgcaaattctctagtcaaatttcctcaagagtgtctgctgactgatcggaattcaacgtataatgcggcttttagttcagcgtatttagatcttttgaaatacgagcaagagaatggagttaaagtggtgcggactgagtcaatcgcgggggctaaaagattcgctgaggggtttggaagacatggaaaatcaaccaatttgaaagtgccagaattgaaggattgggaaagagaatttgaaactaagagcaaattgtga

SEQ ID NO: 28937 - protein, 291 aa, Tribolium castaneum
MVTRIPSVVIRHYSNSPKTVLTEKIGEIVTIGLNRPEKRNCIDPSTADLLREAIEDFENDNTLKAAVLYGTGGNFCAGYDLKSLSKVDETQIALNPEGQIGPTLRFIKKPMVAAISGYAVAGGLELALMCDLRVMEDTAVMGVYCRRFGVPLVDGGTVRLQAMVGLSRALDLILTGRSLSAKEAFEWGVANRIVACGTALGQAIQLANSLVKFPQECLLTDRNSTYNAAFSSAYLDLLKYEQENGVKVVRTESIAGAKRFAEGFGRHGKSTNLKVPELKDWEREFETKSKL

SEQ ID NO: 28938 - DNA, 783 bp, Leptospira interrogans serovar Copenhageni str. Fiocruz L1-130
  CDS (1)..(783): transl_table=11
atgaacgaattttctacagtattgtattccacggaaaaagaaatcgcggttctacttctaaatagaccggaaaaaagaaacgcaatcagtaaagaacttctttctacacttcataaaaatattctcaaagcaaaaaaggaaaaatcaatccgtagtcttgttctaagcggcgttggaccttccttttgtgcaggagcagacttaaaagaaagagtaaccatgtctcctaaagaagtgaaacgttttttagaagatctcaaaaattgttttttggaattggaaaactttccatatcctacggttgccgccttagacggagacgcatttggaggaggattggaacttgcactttgttgtgatttgattcttcttaaaaacgatattagaattggacttacagaaactcgtttaggaattattcctggtggaggaggaactcaaagactttcacgtagaatcggaatctcgaaagcgaaagaaatgatttttacgggcaaaacaattgacgcacaaaccgctttagattttggaatcgcaaattccatttggcacgattcctcccttcccgcagcaaaaatgttagctgaagaaatcgcatctcaatgtgcaccaatcgcacttcagcttgcaaagaaagcaattacagaaggttatggtcaggacatacgaaaagctctcataaccgagagtaaatactataataacactttaaatacggaagatcggttggaggcactcaaagcgtttcaggaaaaacgaaaaccgatttttaaaggaaaataa

SEQ ID NO: 28939 - protein, 260 aa, Leptospira interrogans serovar Copenhageni str. Fiocruz L1-130
MNEFSTVLYSTEKEIAVLLLNRPEKRNAISKELLSTLHKNILKAKKEKSIRSLVLSGVGPSFCAGADLKERVTMSPKEVKRFLEDLKNCFLELENFPYPTVAALDGDAFGGGLELALCCDLILLKNDIRIGLTETRLGIIPGGGGTQRLSRRIGISKAKEMIFTGKTIDAQTALDFGIANSIWHDSSLPAAKMLAEEIASQCAPIALQLAKKAITEGYGQDIRKALITESKYYNNTLNTEDRLEALKAFQEKRKPIFKGK

SEQ ID NO: 28940 - DNA, 801 bp, Mycobacterium sp. JLS
  CDS (1)..(801): transl_table=11
atgacagacaccttgacgaaccccgcggcgctcgtcgagcggcgaggcaacgtcgccctgatcaccatcaacaggcctgaggcacgaaacgccgtcaacggcgcggtcagtacggcggtcggcgacgcgctggctgcggcccaaagcgatcccgacgtgtgggcggtggtcatcaccggtgcgggggacaagtcgttctgcgccggggcggatctgaaggccgtatcgcgtggcgagaacctctaccacgccgagcacccggaatggggcttcgccgggtatgtgcaccacttcatcgacaagccgaccatcgccgcggtgaacggcactgcgctggggggtggctccgagctggcattggccagtgatctcgtcgtcgcatgcgagagcgcgagtttcgggctaccggaggtcaagcgtggactgatggcaggggccggcggggtgttccggatcgtcgagcaactgccgcgcaaggttgcactggagttgatcttcaccggggagccgatgtcctctgccgacgcgctgcgttggggcctgatcaaccaggtagcacccgacggcgccgtggtcgaggccgcgctggcgctggccgagcggatcgccgtcaacgccccgctgtcggtccaggccagcaagcgggtggcatacggcgccgacggtgacatcatcgccaccgaggaacccaagtgggaccgcaccacacgcgaattcaccgcgttgctggaatccgaagacgccaaggaaggcccgctggccttcgcgcagaaacgtcaacccgtatggaagggacgctga

SEQ ID NO: 28941 - protein, 266 aa, Mycobacterium sp. JLS
MTDTLTNPAALVERRGNVALITINRPEARNAVNGAVSTAVGDALAAAQSDPDVWAVVITGAGDKSFCAGADLKAVSRGENLYHAEHPEWGFAGYVHHFIDKPTIAAVNGTALGGGSELALASDLVVACESASFGLPEVKRGLMAGAGGVFRIVEQLPRKVALELIFTGEPMSSADALRWGLINQVAPDGAVVEAALALAERIAVNAPLSVQASKRVAYGADGDIIATEEPKWDRTTREFTALLESEDAKEGPLAFAQKRQPVWKGR

SEQ ID NO: 28942 - DNA, 777 bp, Herminiimonas arsenicoxydans
  CDS (1)..(777): transl_table=11
atgcaatacgaaaacatcctgatcgaaattcacggcaaggtcgggctcatcactcttaaccggccggcggcattgaatgcgctcaatgacaaattgatggatgagctgggaaaggccctgctgtcgtttgacgccaatgaagatataggttgcatgatcattactggtagcgagaaagcttttgccgccggcgccgatatcggcgcaatggcgacctactcatatatggatgtatataagggcgattacattacgcgcaactgggagcaaatccgcagcgtgcgcaaaccggtcatcgcagcggtggcaggttatgcgctcggtggtggctgcgaattggcaatgatgtgcgacttcattattgcagcggatacggccaagttcggccagcctgaaatcaagctcggcattattccaggcgcgggtggtacgcagcgcttgccgcgatctgtttcaaaatccaaggcgatggatatgtgcctgaccgcgcgcatgatggatgcagccgaagccgagcgcgccggtttggtatcgcgcgtagtggcggcggacaagttgcaggaagaagcattggctgcggcaaccgtcattgccagcatgtcgctgcctatggtcatgatgatcaaggaatccatcaatcgggcttatgaaacaacgctggccgaaggcgtgcagttcgaacgcaggctctttcacagcaccttcgcaacagaagatcagaaagagggaatgagagcatttgtcgagaagcgcgcagctaaattcaagaatgtttga

SEQ ID NO: 28943 - protein, 258 aa, Herminiimonas arsenicoxydans
MQYENILIEIHGKVGLITLNRPAALNALNDKLMDELGKALLSFDANEDIGCMIITGSEKAFAAGADIGAMATYSYMDVYKGDYITRNWEQIRSVRKPVIAAVAGYALGGGCELAMMCDFIIAADTAKFGQPEIKLGIIPGAGGTQRLPRSVSKSKAMDMCLTARMMDAAEAERAGLVSRVVAADKLQEEALAAATVIASMSLPMVMMIKESINRAYETTLAEGVQFERRLFHSTFATEDQKEGMRAFVEKRAAKFKNV

SEQ ID NO: 28944 - DNA, 777 bp, Burkholderia vietnamiensis G4
  CDS (1)..(777): transl_table=11
atgtcttacgagaacatcctggtggagacccgagggcgagtcggattgatcacgctcaaccgtccgaaggcgctcaatgcgctgaacgatgcgttgatggatgagttgggtgcggcgctgaaggcgttcgacgcagacgacgaaatcggcgcgatcgtcgtgacgggcagcgagaaggcgttcgcggccggcgccgacatcggcatgatggccacctattcgtatatggatgtgtaccgcggcgactacatcacgcgtaactgggagaccgtccgcgagatccgcaagccgatcattgcggccgtggcggggtttgcgctcggtggcggctgcgaactcgcgatgatgtgcgacatcatcttcgcggccgatacggccaagttcggccagccggagatcaagctgggcgtgatgcctggcgccggcggcacgcagcgtctgccgcgcgcggtctcgaaggcgaaggccatggacatgtgcctgactgcacgtttcatggatgcggccgaagccgagcgcgccgggctcgtgtcgcgtgtgctgccggccgacaaactcctcgacgaagcggttgcggctgcgacgacgatcgccgagttttcgctgccggcagtcatgatggtgaaggagtcggtgaatcgcgcgtacgagacaacgctggccgagggcgtccacttcgagcgccgcctgttccattcgctgtttgcgacggaagatcagaaggaagggatggcggcattcgtcgagaagcggaagccggtattcaagaaccgctga

SEQ ID NO: 28945 - protein, 258 aa, Burkholderia vietnamiensis G4
MSYENILVETRGRVGLITLNRPKALNALNDALMDELGAALKAFDADDEIGAIVVTGSEKAFAAGADIGMMATYSYMDVYRGDYITRNWETVREIRKPIIAAVAGFALGGGCELAMMCDIIFAADTAKFGQPEIKLGVMPGAGGTQRLPRAVSKAKAMDMCLTARFMDAAEAERAGLVSRVLPADKLLDEAVAAATTIAEFSLPAVMMVKESVNRAYETTLAEGVHFERRLFHSLFATEDQKEGMAAFVEKRKPVFKNR

SEQ ID NO: 28946 - DNA, 801 bp, Bradyrhizobium sp. ORS278
  CDS (1)..(801): transl_table=11
ttgattttgcagggtggaaacatgagcgtttacgagcacatcatcgtcgagggcaaaggcgcggtcggcgtcatcaccttgaatcggccgaagatgctcaacgcattgtcgttcggcgtcttccgcgagatcgccgcggccgtcgacgatctcgaggccgacgacgccatcggctgcatcgtcatcaccggcagcgagaaggcgtttgccgccggcgccgacatcaaggagatgcagccgaagactttcatcgacatgttctcgagcgacttcactgcgatcggcggcgaccgcgtcgcgcgctgtcgcaagccgaccatcgccgccgtctcgggctatgcgctcggcggcggctgcgagctcgcgatgatgtgcgacttcatcatctgctccgacaccgccaagttcggccagcccgagatcacgctcggcactatccccggcatcggcggcacgcaacgcctgacgcgcgcgatcggcaaggccaaggcgatggacctctgcctcaccggccgcatgatggacgcggccgaagccgagcgcgccggcctggtcagccgcatcgtgcccgccgacaagttgatggaagagacgatggccgcggccgagaagatcgccgcgatgtcgcggcccgccgccgccatggccaaggaggccgtcaaccgcgccttcgagacgcagctgtccgagggcatgaacgtcgagcgcaacctcttccacgccaccttcgcgctggaggaccgcgcagaggggatggccgccttcatcgagaagcgcaagccggtgaataagaaccgctga

SEQ ID NO: 28947 - protein, 266 aa, Bradyrhizobium sp. ORS278
MILQGGNMSVYEHIIVEGKGAVGVITLNRPKMLNALSFGVFREIAAAVDDLEADDAIGCIVITGSEKAFAAGADIKEMQPKTFIDMFSSDFTAIGGDRVARCRKPTIAAVSGYALGGGCELAMMCDFIICSDTAKFGQPEITLGTIPGIGGTQRLTRAIGKAKAMDLCLTGRMMDAAEAERAGLVSRIVPADKLMEETMAAAEKIAAMSRPAAAMAKEAVNRAFETQLSEGMNVERNLFHATFALEDRAEGMAAFIEKRKPVNKNR

SEQ ID NO: 28948 - DNA, 774 bp, Leptospira interrogans serovar Copenhageni str. Fiocruz L1-130
  CDS (1)..(774): transl_table=11
atgagtgaaaaattaatcaatataactaaagaaggacaaattgcaattcttacgatccaaagaccttccgctttgaatgccctcaatcgggaagtattaattcagatcggtcaagaagtggatgcgcttgaaaaagatgaaaacataagagttttaattgtgaccggtgaaggtaaagcgtttgttgccggagccgatattgccgaaatgaaagacttaaacgtttctcagggaaacgagttttctaaattaggaaattctgtattccaaaaattgcatcaatccagaatcgtttcgattgccgcgatcaatggtttttctcttggcggagggttagaacttgctcttgcctgtgatatacgagtcggttctgaaaaagcgaagttgggtttgccggaagtttctctgggactgattccaggttttggaggcacacaaagactagccagattgatcggttatgcgagagcgattgagcttgtaataaccggggaaatgatttctgcggaagaaggttatagaatcgggattcttaataaactcgtaaaagagggagaaagtatattagatttttctaaatcgattgcaaactcgatccttaaaaaaggacctcaggcgatcgaaagagttaaaaagacaatccaacagggtttagatgtttctttaaaggaaggaatttctatagaagaaaaggcgtttggagactgttttgacggagggcaatctaaagaaggtatgagcgcgtttttggaaaaaagatcagctcaattttaa

SEQ ID NO: 28949 - protein, 257 aa, Leptospira interrogans serovar Copenhageni str. Fiocruz L1-130
MSEKLINITKEGQIAILTIQRPSALNALNREVLIQIGQEVDALEKDENIRVLIVTGEGKAFVAGADIAEMKDLNVSQGNEFSKLGNSVFQKLHQSRIVSIAAINGFSLGGGLELALACDIRVGSEKAKLGLPEVSLGLIPGFGGTQRLARLIGYARAIELVITGEMISAEEGYRIGILNKLVKEGESILDFSKSIANSILKKGPQAIERVKKTIQQGLDVSLKEGISIEEKAFGDCFDGGQSKEGMSAFLEKRSAQF

SEQ ID NO: 28950 - DNA, 774 bp, Acinetobacter sp. ADP1
  CDS (1)..(774): transl_table=11
atgacattcgcaacaattttattggaaaaacgtaagggtgtgggcttgattacacttaaccgtccaaaagcattaaatgctttaaactcagaattaatttatgaaataaatttagccttagacgatttagaaaatgatcaaacgattggttgtatcgtccttacaggttcagaaaaagcctttgccgcaggtgcggatatcaaagaaatggcagaattaacttttccaaatatttattttgatgatttttttagtcttgcagatcgtattgcacagcgtcgtaagcctttaattgccgcagtgagtggttatgctttaggtggtggctgtgagttagcactcatgtgtgactttatttattgtgccgacaatgccaagtttgcactaccagaagtaactttaggtgtcattcctggtattggtggaacacagcgtctaacgcttgcaataggcaaagccaaagccatggaaatgtgtttgactgcacggcaaatgcaggctgctgaggcagaacaaagtggtttggtggcacgcgtttttagtaaagaagaacttttagaacaaaccttacaggctgccgaaaaaatagcggaaaaatcacgggtatctaccataatgattaaagagtcaattaatcgagcttttgaagtgagtttagcagagggtttacgttttgagcgccgaatgttccattcagtttttgcgaccttagatcagaaagaaggcatgcaagcatttattgataaacgtccagcccaatttaaacatcaataa

SEQ ID NO: 28951 - protein, 257 aa, Acinetobacter sp. ADP1
MTFATILLEKRKGVGLITLNRPKALNALNSELIYEINLALDDLENDQTIGCIVLTGSEKAFAAGADIKEMAELTFPNIYFDDFFSLADRIAQRRKPLIAAVSGYALGGGCELALMCDFIYCADNAKFALPEVTLGVIPGIGGTQRLTLAIGKAKAMEMCLTARQMQAAEAEQSGLVARVFSKEELLEQTLQAAEKIAEKSRVSTIMIKESINRAFEVSLAEGLRFERRMFHSVFATLDQKEGMQAFIDKRPAQFKHQ

SEQ ID NO: 28952 - DNA, 774 bp, Symbiobacterium thermophilum IAM 14863
  CDS (1)..(774): transl_table=11
gtggcgtacgagaacatcctggtctttcgtgagggagctgtcggccgggtgcagctgaaccgcccccaggcgctcaacgccctcaacttccgcctgatgacggagctggtggaggcgttccgggagatggagcgcgatccgggcatcgggtgcctcctgctgcacggcaatgagaaggccttcgccgccggcgccgacatcaaggagatggcggagctgggcgcaatcgacatgtacacccgggactacatcgaactctgggatgaagtcgcccgcatcaagaagcccatcgtcgctgccgtcagcggctactgcctgggcggcggcctggagctggcgatgatctgcgacatcatcgtcgcctcggagacggcgaagttcggccagccggagatcaacatcggcgtcctgccgggcgccggcggcacccagcggctcacccgggcggtcgggaagtcgctggcgatggagatggtcctgaccggccggatgctcaccgcgcaggaggccctggcggccggtctggtcagtcgggtggttccggtggaggtctacctcagcgaggcgcagaagctggccggcgagatcgcgtccaagtcgcccgtggccctgcggctggccaaggaggcggtgctgcaggccttcgagggcagcctgagcagcggactcgcgtacgagcgccggctgttcgccatggcttttgcctccgaggaccagaaggagggcatgcgggccttcaccgagaagcggaagcccgagtggaaggggaggtaa

SEQ ID NO: 28953 - protein, 257 aa, Symbiobacterium thermophilum IAM 14863
MAYENILVFREGAVGRVQLNRPQALNALNFRLMTELVEAFREMERDPGIGCLLLHGNEKAFAAGADIKEMAELGAIDMYTRDYIELWDEVARIKKPIVAAVSGYCLGGGLELAMICDIIVASETAKFGQPEINIGVLPGAGGTQRLTRAVGKSLAMEMVLTGRMLTAQEALAAGLVSRVVPVEVYLSEAQKLAGEIASKSPVALRLAKEAVLQAFEGSLSSGLAYERRLFAMAFASEDQKEGMRAFTEKRKPEWKGR

SEQ ID NO: 28954 - DNA, 777 bp, Bacillus licheniformis ATCC 14580
  CDS (1)..(777): transl_table=11
atggcagcattatcatacgccgtagacggccatgttgcgacgattacgattcagcacccgccggcaaatgcgctatcgacgcaagtgcttgaagatctttcggcatgccttgatgaactttcagaacgtcaggatgtcagaagcgtcgttattcacggggaaggaagatttttctcggcaggcgctgatattaaagagtttacatcattgatggacgggtctgattatgcaaatttggctgataagggccagcagattttcgaaaaagtagaatcttttccaaaaccggtgatcgccgcgattcacggggccgctcttggaggcggtcttgagctagcgatggcatgccacatccggattgccgaggaaagcgcaaagctcggccttcccgaactgaatctcggaatcattcccggctttgcgggaacgcagcgccttcccaagtatgtgggcaccgccaaagcgcttgaaatgatcgggacatcagagccgatatccggcaaggaagcttttgaatacggtcttgtcacgattttggcggcgaatgaagaagaagtgctgcaaaaggcaaaagagctcgcacaaaaattcgctgaaaaaagtccgcagacgatggcttatgtcattgaactcctgaattcgagcaaagtgtattcgtatgaaggaggcctcaagctagaagggaaatacttcggcgaagtgttccaatccgaggatgcgaaggaagggattcaggcatttcttgaaaagcggaagccgcattttaaagggaaataa

SEQ ID NO: 28955 - protein, 258 aa, Bacillus licheniformis ATCC 14580
MAALSYAVDGHVATITIQHPPANALSTQVLEDLSACLDELSERQDVRSVVIHGEGRFFSAGADIKEFTSLMDGSDYANLADKGQQIFEKVESFPKPVIAAIHGAALGGGLELAMACHIRIAEESAKLGLPELNLGIIPGFAGTQRLPKYVGTAKALEMIGTSEPISGKEAFEYGLVTILAANEEEVLQKAKELAQKFAEKSPQTMAYVIELLNSSKVYSYEGGLKLEGKYFGEVFQSEDAKEGIQAFLEKRKPHFKGK

SEQ ID NO: 28956 - DNA, 780 bp, Legionella pneumophila subsp. pneumophila str. Philadelphia 1
  CDS (1)..(780): transl_table=11
ttgatgaatttaattgaacaggatatagataataacggaatcttaactttaactttgaataggccagagaagctcaatgctttaagcactgatgttctgagcgcattaaatgaattattctttcaagcgaaatccaatcccaaagtcaaagcattattgttaacaggaaatggtaaagcattttgcgctggggctgacattaatcgactggctgaatgtaacgctcaaactggttatgaatttgcttgccagggacaagaggtttttcgacttttggaaacgatggggaaaccttcacttgccgcagtgaatggttttgctttcggtggcggatgtgagttagcgatatctgcgactcttagaattgcttcaaataaggcaatgtttggtcagcctgaggtaaaattaggtgttattcccgggtatggcggcacacaacgattggccaggctaattggcaaagggcgcgcgatggatttatgtttgactgggcgctttataaatgctgagactgccttaaactgggggttagtcagtgaagttgtagcaccagaggatttgttgactcaaggaaaaaatattctaaacggaatattaagcatggctcctttagcagttgccagtgtaatggaagtgatagatcatggttatgatttatcactcacagaggcacttcatttggaagcaattcattttgcaaaagtttgcgccactgaagataagaaggaaggagtagctgcgtttctagacaagagaaccgcggattttaaaggggtttaa

SEQ ID NO: 28957 - protein, 259 aa, Legionella pneumophila subsp. pneumophila str. Philadelphia 1
MMNLIEQDIDNNGILTLTLNRPEKLNALSTDVLSALNELFFQAKSNPKVKALLLTGNGKAFCAGADINRLAECNAQTGYEFACQGQEVFRLLETMGKPSLAAVNGFAFGGGCELAISATLRIASNKAMFGQPEVKLGVIPGYGGTQRLARLIGKGRAMDLCLTGRFINAETALNWGLVSEVVAPEDLLTQGKNILNGILSMAPLAVASVMEVIDHGYDLSLTEALHLEAIHFAKVCATEDKKEGVAAFLDKRTADFKGV

SEQ ID NO: 28958 - DNA, 777 bp, Burkholderia mallei ATCC 23344
  CDS (1)..(777): transl_table=11
atggcttacgagaacattctggtggagacgcggggcagggtggggctgattacgctgaaccgtccgaaggcgctgaatgcgttgaatgacgccctgatggatgaacttggcttggcgctcaaagcgttcgacgcggacgagggtattggcgcgatcgtgctgacgggcagcgagaaggcgttcgcggcgggcgccgacatcgggatgatggcgacctattcatacatggacgtcttcaagggcgactacatcacgcgtaactgggagacggtgcgccagatccgcaagccgatcatcgcggcggtggcgggtttcgcgctgggcggcggctgcgaactcgcgatgatgtgcgacatcatctttgcggccgatacggcgaagttcggccagccggaaatcaagctcggcgtgctgccgggtgcgggcggcacgcagcgcctgccgcgcgcggtgtcgaaggcgaaagcgatggacatgtgcttgaccgcgcgcttcatggacgcggaggaggctgagcgggcgggcttggtgtcgaggatcctgccggcggacaagttgctcgacgaggcgatcgccgcggcgacgacgatcgcggaattctcgctgcctgccgtaatgatggtgaaggaggcggtgaatcgcgcatacgagacgaccttgtccgaaggggtgcacttcgagcgtcgcttgtttcactcggcatttgcgactgaagatcagaaggaagggatggcggcgttcgtcgagaagcgcaagcccgtcttcaagcatcgctga

SEQ ID NO: 28959 - protein, 258 aa, Burkholderia mallei ATCC 23344
MAYENILVETRGRVGLITLNRPKALNALNDALMDELGLALKAFDADEGIGAIVLTGSEKAFAAGADIGMMATYSYMDVFKGDYITRNWETVRQIRKPIIAAVAGFALGGGCELAMMCDIIFAADTAKFGQPEIKLGVLPGAGGTQRLPRAVSKAKAMDMCLTARFMDAEEAERAGLVSRILPADKLLDEAIAAATTIAEFSLPAVMMVKEAVNRAYETTLSEGVHFERRLFHSAFATEDQKEGMAAFVEKRKPVFKHR

SEQ ID NO: 28960 - DNA, 777 bp, Azoarcus sp. EbN1
  CDS (1)..(777): transl_table=11
atgagtttccagaacatcctcgttgaaacgcgtggccgggtcggcctgatcacccttaatcgcccgaaggcgatgaacgcgctcaacgatcaggtcgtcgatgaaatgtgggaggcgctcgaccacttcgaggccgacgagggaatcggcgccatcgtcatcaccggcagcgagaaagctttcgccgcaggcgccgatatcggcgcaatggcgaacttttcgcatatggacgcctacaagggcgactacatcacgcgcaattgggaacgcgtcaagacctgccgcaagccggtcatcgcagcggtcgccggcttcgcgctcggcggcgggtgcgaactggcgatgatgtgcgacatgatcatcgctgccgacaacgccaagttcggccagcccgaaatcaagctcggcatcctgcccggctcgggtggcacgcagcgcctgccccgcgcgatcggcaaggcgaaaacgatggacatgtgcctcaccgcgcggctgatgggggccgaggaagcagaacgttcgggactcgttgcccgggtggtgccggccgacaaactgctcgacgaagcgcttgcggtggccaccgaggtcgccaacttctcgctgccggtcgtgatgatgatcaaggaatcagtcaatcgcgccttcgaaggaagcctcaacgaaggccttctgttcgaacgccgcgttttccatgccgcgttcggcctcgacgatcagaaggaaggaatggctgccttcgtcgagaaacgcaagcctgacttcaagcaccgctga

SEQ ID NO: 28961 - protein, 258 aa, Azoarcus sp. EbN1
MSFQNILVETRGRVGLITLNRPKAMNALNDQVVDEMWEALDHFEADEGIGAIVITGSEKAFAAGADIGAMANFSHMDAYKGDYITRNWERVKTCRKPVIAAVAGFALGGGCELAMMCDMIIAADNAKFGQPEIKLGILPGSGGTQRLPRAIGKAKTMDMCLTARLMGAEEAERSGLVARVVPADKLLDEALAVATEVANFSLPVVMMIKESVNRAFEGSLNEGLLFERRVFHAAFGLDDQKEGMAAFVEKRKPDFKHR

SEQ ID NO: 28962 - DNA, 774 bp, Azoarcus sp. EbN1
  CDS (1)..(774): transl_table=11
atgaatctcgtaatcctcgtcgaaacccggcacaaggtcggcctgatccgcatcaacaggcccgaagtgcataacgcgctcaacgatgacgtgatgaccgagctcggccgcgcgctcgacgcgttcgaggccgaccggagcattgcctgcgtcgtgctgaccggctccgaaaaagctttcgccgccggcgccgacatcgcggcgatgcgcgcgatggacttcatggacgcctacaagtcggacttcatcacgcgcaactgggagcggctgcgcactttccgcaagccggtcatcgcggcggtgaatggggtcgcgctcggcggcggctgcgagctggcgatgatgtgcgacatcgtcttcgctgccgacaacgcccgtttcggccaacccgagatcaagatcggcacgattcccggcgccggcggcacgcaacgcctgccgcgcgcgatcggcaagaccaaggcgatggacatgtgtctgaccggtcgcctgatggacgcgcaggaagccgagcgcagcgggctcgtcgcacgcatcttcccggccggcacggtactcgacgaggcgctcgcgaccgccgcgcagctcgccgagtattcgctgccggtgctgatgatgatgaaggagtcggtcaaccgtgcatacgagagcccgctcagcgaagggctgctgttcgagcgccgcacgctgcacgcgacgtttgcgctcgctgaccagaaggaaggcatgaacgcgttcgtcgagaaacgcacgccgcagttcgcgcactgttag

SEQ ID NO: 28963 - protein, 257 aa, Azoarcus sp. EbN1
MNLVILVETRHKVGLIRINRPEVHNALNDDVMTELGRALDAFEADRSIACVVLTGSEKAFAAGADIAAMRAMDFMDAYKSDFITRNWERLRTFRKPVIAAVNGVALGGGCELAMMCDIVFAADNARFGQPEIKIGTIPGAGGTQRLPRAIGKTKAMDMCLTGRLMDAQEAERSGLVARIFPAGTVLDEALATAAQLAEYSLPVLMMMKESVNRAYESPLSEGLLFERRTLHATFALADQKEGMNAFVEKRTPQFAHC

SEQ ID NO: 28964 - DNA, 804 bp, Azoarcus sp. EbN1
  CDS (1)..(804): transl_table=11
atgaatctcgatcattccaacgaagcggccgccgagccaccgatcctcgtcgaccggcgcgggcgggtcggcctgctgcggctgaaccggccgtcgcggttcaacgcgctcagcgacgcgctgatcgaccggctcggcgacgagctcgaggcgatggacgccgacgacggcatcggcgcgatcgtcatcaccggctccgacaaggccttcgccgctggcgcggacatcggcgcgatggcggactgggacttcgtccacgtctacaagacgaactacgtgtcgcgcaactgggaccgcctggcgcgcatccgcaagccggtcatcgccgcggtcggcggctttgcgctcggcggcggatgcgagctcgcaatgacctgcgacctcgtcatcgccgcggagaccgcccgcttcggtcaacccgaagtccggctcggcgtgcttccgggcgcgggcggcacgcagcggctgccgcgcgcggtcggcaaggcgaaggcgatggacctgtgcctgaccgcgcgcatgatggacgcgcaggaagccgagcgtgccggactcgtgtcgcgcatcgtccccgccgagcgcctgctcgacgaggcgctcgaagcggccgcaagaatcgcagccttctcgctgccggtcgcgatgatgatcaaggaatcggtgaatcgtgccttcgaatcggggctatcggaagggctgctgttcgaacgccggagtttccacgccgccttcggcttgcaggaccagaaggaaggcatggcggccttcctcgcgaaacgcaacgcttcgttcagtcattgttga

SEQ ID NO: 28965 - protein, 267 aa, Azoarcus sp. EbN1
MNLDHSNEAAAEPPILVDRRGRVGLLRLNRPSRFNALSDALIDRLGDELEAMDADDGIGAIVITGSDKAFAAGADIGAMADWDFVHVYKTNYVSRNWDRLARIRKPVIAAVGGFALGGGCELAMTCDLVIAAETARFGQPEVRLGVLPGAGGTQRLPRAVGKAKAMDLCLTARMMDAQEAERAGLVSRIVPAERLLDEALEAAARIAAFSLPVAMMIKESVNRAFESGLSEGLLFERRSFHAAFGLQDQKEGMAAFLAKRNASFSHC

SEQ ID NO: 28966 - DNA, 777 bp, Silicibacter pomeroyi DSS-3
  CDS (1)..(777): transl_table=11
atggcctttgagacgatcatcgtcgaagttgaagaccacgtagccctgatcaggctgaaccgtcccgatgcgctcaatgcgctcaacacccagttgctgggcgagttgtgtaccgcgctggaagaggccgacggcaatgacaaggtgcgctgcatcgtcatcaccggcagcgacaaggcatttgccgccggggccgatatccgcgagatgtcccaaaagacctatgtcgaggtgtatagcgagaacctgttcgcggccgccaacgaccgtgtcagcgccatccgcaagccgatcatcgccgcagtggcgggctatgcgctgggcggtggctgtgaactggcgatgctgtgcgatttcatcatcgcggcggacaccgcaaagttcggccagcccgagatcaacctgggcgtgatcgccggtatcggcggcacccagcgtctgacccggctggtgggcaagtccaagtcgatggacctgaacctgaccgggcggttcatggatgccgaagaggccgagcgcgccgggctggtcagccgcgtggttccggccaagaagctggtcgaagaggcgctgagcgcagcccagaagatcgccgagaaatcgatgatctcggcctatgcggtcaaggaggcggtcaaccgctcttacgagaccacgctgagcgaggggctgctgttcgagcgccgggtgttccattcgatgttcgccaccgaagatcagaaggaaggcatggccgctttcctcgagaagcgggcggcacagttccgcgacaagtga

SEQ ID NO: 28967 - protein, 258 aa, Silicibacter pomeroyi DSS-3
MAFETIIVEVEDHVALIRLNRPDALNALNTQLLGELCTALEEADGNDKVRCIVITGSDKAFAAGADIREMSQKTYVEVYSENLFAAANDRVSAIRKPIIAAVAGYALGGGCELAMLCDFIIAADTAKFGQPEINLGVIAGIGGTQRLTRLVGKSKSMDLNLTGRFMDAEEAERAGLVSRVVPAKKLVEEALSAAQKIAEKSMISAYAVKEAVNRSYETTLSEGLLFERRVFHSMFATEDQKEGMAAFLEKRAAQFRDK

SEQ ID NO: 28968 - DNA, 774 bp, Pseudomonas syringae pv. syringae B728a
  CDS (1)..(774): transl_table=11
atgctttacgagactattctcattgagattataggtagtgtgggcctgatcaggcttaaccggcctaacgcgttgaacgccttgaatgcgcgtctgatcaacgaattgaaccatgcgctcgatcagttcgaggcggacagtgcgatcggctgcatcgtgctgaccggctcggaaaaagccttcgccgccggtgcggacatcaaggaaatggtcgacctgtcctacccgcagatctacctcgatgacctgtttcgtgacagcgaccgggttgcggcccgacgcaaacccctggtggctgcggtggccggttttgccttgggtggcggctgtgaactggcattgatgtgcgatttcattctggctgccgagaacgccaggtttggacagcccgagatcaatctcggcgtgttgccggggatgggcggaacgcagcgtctgacccgcgcggtgggcaaggccaaggccatggagatgtgcctgaccggccggttgatcgatgctcacgaggccgagcgcgccggtctggtggcccgcgtgctgccgctcgatcagttgctgccggaagcgcttgcagtggcagcggtcatcgccagtaaatccctgccagtagcgatgatggtcaaagagagcgtcaaccgcgcgttcgaggtcagcctggccgaaggcatccgcttcgagcgccgggtttttcacgccgccttcgccagccaggatcagaaggagggcatgcgcgccttcatcgacaagcgccagcccgatttcaaggactgctga

SEQ ID NO: 28969 - protein, 257 aa, Pseudomonas syringae pv. syringae B728a
MLYETILIEIIGSVGLIRLNRPNALNALNARLINELNHALDQFEADSAIGCIVLTGSEKAFAAGADIKEMVDLSYPQIYLDDLFRDSDRVAARRKPLVAAVAGFALGGGCELALMCDFILAAENARFGQPEINLGVLPGMGGTQRLTRAVGKAKAMEMCLTGRLIDAHEAERAGLVARVLPLDQLLPEALAVAAVIASKSLPVAMMVKESVNRAFEVSLAEGIRFERRVFHAAFASQDQKEGMRAFIDKRQPDFKDC

SEQ ID NO: 28970 - DNA, 774 bp, Pseudomonas fluorescens Pf-5
  CDS (1)..(774): transl_table=11
atgagctacgaaaccattctgttggacatcaagggccgggtcggcctgatcactctcaaccgcccccaggcgctgaacgccctcaatgcacagatcgtcggcgaggtgaaccaggccctggatcgcctggaagccgacccgcagatcggctgcatcgtcatcaccggttccaagaaagccttcgccgccggtgccgacatcaaggaaatggccgagctgagctacccgcagatctacctcgacgacctgttcagcgacagcgaccgcgtggccaaccggcgcaagccgatcatcgccgcggtcaacggcttcgccctgggcggcggttgcgaactggcgctgatgtgcgacttcatcctggccggcgacaacgccaagttcggccaaccggaaatcaacctcggcgtgctgccgggcatgggcggcacccagcgcctgacccgcgcggtaggcaaggccaaggccatggaaatgtgcctgaccgggcgttttatcgacgccgtggaagctgagcgttgcggcatcgtcgcacgcatcgtgccggccgatgaactggtggaagaagccctgaaagtggcagcggtgattgccggcaaatcgatcccggtgagcatgatgatcaaggaaagcgtgaaccgcgcctttgaagtcagcctgtccgagggcgtgcgcttcgagcgccgggtattccacgccgccttcgccacccaggaccagaaagaaggcatggccgccttcatcgccaagcgtgacccgcagttcaaggaccagtaa

SEQ ID NO: 28971 - protein, 257 aa, Pseudomonas fluorescens Pf-5
MSYETILLDIKGRVGLITLNRPQALNALNAQIVGEVNQALDRLEADPQIGCIVITGSKKAFAAGADIKEMAELSYPQIYLDDLFSDSDRVANRRKPIIAAVNGFALGGGCELALMCDFILAGDNAKFGQPEINLGVLPGMGGTQRLTRAVGKAKAMEMCLTGRFIDAVEAERCGIVARIVPADELVEEALKVAAVIAGKSIPVSMMIKESVNRAFEVSLSEGVRFERRVFHAAFATQDQKEGMAAFIAKRDPQFKDQ

SEQ ID NO: 28972 - DNA, 777 bp, Psychrobacter arcticus 273-4
  CDS (1)..(777): transl_table=11
atggaagagcaaatcattatttgtgagcaacaagaaaatggcgttagtgtgataagactcaatcgtcctaaagttcgcaatgctttgaatactgaattacgcgaacaaatggcagagattttcaacaaattaaacgatgacgtgaataccaaggccattgtgctgacgggtggtaataaggtgttcgcggccggtgctgatattaatgattttttaaccgcgaaaacagtcgatgtgtatttgcgtcatagcgaacgttattgggatgccatcaccaattgttgtaagccgattatcgcagcagtaaatggctatgcacttggcggtggctgtgaactcgctatgcatgccgacatcattgtcgctggtaagtctgctaagtttggacaaccagaaatcaaaataggactgatgccaggagcagggggtacgcagcggctatttcgcgtaattggcaaacataaagctatgaagctgatattgactggtgacatgataagcgctgatgaagcggatcaaatggggctggtctctgaagtagtcgaagatgaagcaactatcaaacgtgctatcgagattgctgagcaactagcaggttattcgcctattgccttaacccaaattaaagaagtcgccaatttaggggtggatatgccactacaagccgcattggctttagagcgtaaagcctttcagattctgtttgatactgaagatcaaaaagaaggcgcaaaagccttcttagaaaaacgtagtgctgaatacaaaggacgatag

SEQ ID NO: 28973 - protein, 258 aa, Psychrobacter arcticus 273-4
MEEQIIICEQQENGVSVIRLNRPKVRNALNTELREQMAEIFNKLNDDVNTKAIVLTGGNKVFAAGADINDFLTAKTVDVYLRHSERYWDAITNCCKPIIAAVNGYALGGGCELAMHADIIVAGKSAKFGQPEIKIGLMPGAGGTQRLFRVIGKHKAMKLILTGDMISADEADQMGLVSEVVEDEATIKRAIEIAEQLAGYSPIALTQIKEVANLGVDMPLQAALALERKAFQILFDTEDQKEGAKAFLEKRSAEYKGR

SEQ ID NO: 28974 - DNA, 768 bp, Colwellia psychrerythraea 34H
  CDS (1)..(768): transl_table=11
atggaaactatattagtcgaacgccgtgaacgggtaggtatgatcactcttcatagacctaaaagcctaaatgctttaagtaggcagcttgccagagaagttgttgataccttaaaaacctttgacgccgacgataatatcggcgcgattgttattactggcagtgctagagcatttgccgccggggcagatattgaggaaatggcaaacctgacctacgccgaattttattgcgacgatatctttgcaccgtgggatgaattgcgttcaatcagcaaaccgatcattgccgccgtgagtggttatgctttgggcggtggctgtgagctagcgttgatgtgtgattttatcattgcctctgaagacgctcagtttggacaaccagaaattaagcttggtattttgcctggtattggaggctcacaacgcttggccaatgccgttggtaagtcattggcgatggatctagttctaacaggtagaacaatcgatgttcatgaagcaaaagctgcaggattggtggcgcgtgttgttccaggtaaagagttgttacaaacggctttagaagctgcacataccattgcaggctataacagtcctgccgtacgtatggcgaaagaagcggtaaatgtcgcttttgaaaccagccttactgaggggatgcgtcatgagcgccgtttattccaagcagccttcgctaccgaagggcagaaagaaggtatgcatgcgtttatagccaagcgagcacctgtttttcgccatcgctag

SEQ ID NO: 28975 - protein, 255 aa, Colwellia psychrerythraea 34H
METILVERRERVGMITLHRPKSLNALSRQLAREVVDTLKTFDADDNIGAIVITGSARAFAAGADIEEMANLTYAEFYCDDIFAPWDELRSISKPIIAAVSGYALGGGCELALMCDFIIASEDAQFGQPEIKLGILPGIGGSQRLANAVGKSLAMDLVLTGRTIDVHEAKAAGLVARVVPGKELLQTALEAAHTIAGYNSPAVRMAKEAVNVAFETSLTEGMRHERRLFQAAFATEGQKEGMHAFIAKRAPVFRHR

SEQ ID NO: 28976 - DNA, 774 bp, Pseudomonas syringae pv. phaseolicola 1448A
  CDS (1)..(774): transl_table=11
atgtcttacgagacaattctaagtgagattataggtaaggttggcgtgattacgctgaaccgtcccaaggcacttaatgcattgaatgctcagttgattgacgagttgaaccacgcactcgaccagttcgaagcagacagtgccatcggctgcatcgtgctgaccggttcggaaaaagcctttgcggccggtgccgatatcaaggaaatggtcgacctgtcctacccacaaatctacctcgacgatctgtttcgcgaaagtgatcgggtggccgcgcggcgcaaacccatcgtggcggcagtggccggttttgcgttgggtggcggttgtgagctggcgttgatgtgcgattttattctggcggctgaaaacgccaggttcgggcagccggagatcaatctcggtgtgttgccgggcatgggcgggacgcagcgtctgacccgcgctgtcggcaaggccaaagccatggaaatgtgcctgactggtcgcctgattgatgctcacgaagccgaacgtgccgggctggttgcgcgggttttgccgcttgaacagttgctgcctgaagccctcgcggtagcggcggtgatcgccggcaagtccctgccggtggcgatgatggtcaaggagagcgtcaaccgcgcgttcgaggtcagtctggccgaaggcatccggttcgagcgccgggtgtttcacgcagccttcgccagtcacgatcagaaggagggcatgaatgcgtttatcgacaagcgccagccggatttcaaggactgctga

SEQ ID NO: 28977 - protein, 257 aa, Pseudomonas syringae pv. phaseolicola 1448A
MSYETILSEIIGKVGVITLNRPKALNALNAQLIDELNHALDQFEADSAIGCIVLTGSEKAFAAGADIKEMVDLSYPQIYLDDLFRESDRVAARRKPIVAAVAGFALGGGCELALMCDFILAAENARFGQPEINLGVLPGMGGTQRLTRAVGKAKAMEMCLTGRLIDAHEAERAGLVARVLPLEQLLPEALAVAAVIAGKSLPVAMMVKESVNRAFEVSLAEGIRFERRVFHAAFASHDQKEGMNAFIDKRQPDFKDC

SEQ ID NO: 28978 - DNA, 774 bp, Dechloromonas aromatica RCB
  CDS (1)..(774): transl_table=11
atgacccaagtagtcctcaccgaagtgatcggcaaggtcggcctgatccgcatcaaccgtccggaagcgatgaacgcactgaacaacgacgtcgtcgacggcatcggtgccgccatcgacatctacgaagccgacgagaacatcggctgcatcgtcatcaccggcaatgagaaagccttcgccgccggagccgacatcggcttcatgaaggatttcgactacatgcacgcctacaagaccgacttcatcacccgcaactgggaacgcatcaagaccacccgcaagccggtcatcgccgcagtgtccggctttgccctcggtggtggctgcgaaatggcgatgatgtgcgacatgatcttcgccgccgataccgccaagttcggccaaccggaaattcgccttggcaccatgcccggggccggtggcacccagagattgccccgcgccgtcggcaaggccaaggcgatggacatgtgcctgacggcccgcatgatggatgcggccgaagctgaaaaggccggcctggtcgcccgcatcatcccggccgaccaattgctcgacgaaaccctgaaagccgcccagaccattgccggctattcgctgccggtggtcatgatgatcaaggagtcggtcaatcgcgcctatgaatcctcgctgaacgaaggcctgctctttgagcgccgcgtcttccattcggccttcgccctcgaggaccagaaggaaggcatggctgcctttgtcgagaagcgcaagcccgtattcaagaaccgctga

SEQ ID NO: 28979 - protein, 257 aa, Dechloromonas aromatica RCB
MTQVVLTEVIGKVGLIRINRPEAMNALNNDVVDGIGAAIDIYEADENIGCIVITGNEKAFAAGADIGFMKDFDYMHAYKTDFITRNWERIKTTRKPVIAAVSGFALGGGCEMAMMCDMIFAADTAKFGQPEIRLGTMPGAGGTQRLPRAVGKAKAMDMCLTARMMDAAEAEKAGLVARIIPADQLLDETLKAAQTIAGYSLPVVMMIKESVNRAYESSLNEGLLFERRVFHSAFALEDQKEGMAAFVEKRKPVFKNR

SEQ ID NO: 28980 - DNA, 774 bp, Dechloromonas aromatica RCB
  CDS (1)..(774): transl_table=11
atgacccaagtagtcctcaccgaagtgatcggcaaggtcggcctgatccgcatcaaccgtccggaagcgatgaacgcactgaacaacgacgtcgtcgacggcatcggtgccgccatcgacatctacgaagccgacgagaacattggctgcatcgtcatcaccggcaatgagaaagccttcgccgccggagccgacatcggcttcatgaaggatttcgactacatgcacgcctacaagaccgacttcatcacccgcaactgggaacgcatcaagaccacccgcaagccggtgattgccgcagtatccggtttcgctctgggtggcggctgtgaaatggccatgatgtgcgacatgatcttcgccgccgatactgccaagttcggccagccggagatccgtcttggcaccatgcccggggccggtggcacgcaacgtctgccccgggccgtcggcaaggccaaggccatggacatgtgcctgaccgcccgcatgatggatgcggccgaagccgaaaaggccgggctggtcgcccgcatcatcccggccgagcaactgctcgacgaaaccctgaaggccgcccagaccattgccggctattcgctgccggtggtcatgatgatcaaggaatcggtcaatcgcgcctacgaatcctcgttgaacgaaggcctgctctttgagcgccgcgttttccattcggccttcgccctcgaagatcagaaggaaggcatggcggcctttgtcgagaagcgaaaacccgtgttcaagaaccgctga

SEQ ID NO: 28981 - protein, 257 aa, Dechloromonas aromatica RCB
MTQVVLTEVIGKVGLIRINRPEAMNALNNDVVDGIGAAIDIYEADENIGCIVITGNEKAFAAGADIGFMKDFDYMHAYKTDFITRNWERIKTTRKPVIAAVSGFALGGGCEMAMMCDMIFAADTAKFGQPEIRLGTMPGAGGTQRLPRAVGKAKAMDMCLTARMMDAAEAEKAGLVARIIPAEQLLDETLKAAQTIAGYSLPVVMMIKESVNRAYESSLNEGLLFERRVFHSAFALEDQKEGMAAFVEKRKPVFKNR

SEQ ID NO: 28982 - DNA, 789 bp, Thermobifida fusca YX
  CDS (1)..(789): transl_table=11
atgggggagtttgttcgggtcgaaacggatgcggaccatccagccgtcgccgtcatccggctggaccggccgaagatgaacgcgctcaacacccaagttcagcgggaactcgcggaagccgccgcccaggtcagcgaagactcggcggtcgccgccgccgtcatctacgggggagagcgcgtgttcgccgccggagccgacatcaaggagatggcggacatggactacgcggcaatggccgcgcactcccgcacccttcaggactgcttcaccgcggtggcccgcatccccaagcccgtgatcgccgccatcaccgggtacgccctgggcggcggatgcgagctcgcgctgtgcgccgacttccgggtcgccgcggacaacgccaaactcggccagcctgagatccagctcggcattattcctggcgcgggcggcacccagcggctgccgcgcctcatcggcccggcgaaggccaaggacctgatcttcaccggccggcacgtggatgcagcggaggccttggagatcggtctcgtggacaaggtggtgcccgccgaagaggtgtacgcgacagcggtggccatggcagcccgctacgcgaacggtccggcgctcgcgctgcgcgccgccaaacaggccattgacgccgggctcgaagtcgacctggacaccgggctggagatcgaacggctgcagttctccgcgcttttcgctacggaagaccagaagaccgggatgcggagcttcatggagcacggtcccggcaaggccacgttctctgggaggtag

SEQ ID NO: 28983 - protein, 262 aa, Thermobifida fusca YX
MGEFVRVETDADHPAVAVIRLDRPKMNALNTQVQRELAEAAAQVSEDSAVAAAVIYGGERVFAAGADIKEMADMDYAAMAAHSRTLQDCFTAVARIPKPVIAAITGYALGGGCELALCADFRVAADNAKLGQPEIQLGIIPGAGGTQRLPRLIGPAKAKDLIFTGRHVDAAEALEIGLVDKVVPAEEVYATAVAMAARYANGPALALRAAKQAIDAGLEVDLDTGLEIERLQFSALFATEDQKTGMRSFMEHGPGKATFSGR

SEQ ID NO: 28984 - DNA, 777 bp, Ralstonia eutropha JMP134
  CDS (1)..(777): transl_table=11
atgtcgtacgaaaacatcctcgtggaaacgcgcggccgcgtcgggctggtcacgctgcaccgtccgaaggcgctgaatgcgctcaatgacgcattgatggatgaactgggtgccgcactgacggtgttcgacaaggacgagaacatcggtgccatcgttattaccggcagcgaaaaggcgttcgcggccggcgccgatattggcatgatggccaagtactcgttcatggacgtgtacaagggcgactacattacccgcaactgggaaacgatccgcaccatccgcaagccggtgattgcagccgtggcaggctacgcgctgggcggtggctcggaactcgcgatgatgtgcgacatcatcattgccgctgaaaatgcccgcttcgggcagccggaagtcaagctcggcaccatgcccggcgccggcggcacccagcgcatgccgcgcgcggtgtccaaagccaaggccatggacctgtgcctgaccgcgcgcatgatggatgccgccgaagcggagcgggccggccttgtctcgcgcgtggtgccggcggacaagctgctggatgaagcgctcgcagcggcggagaccatcgccggctactcgctgcctgtggtcatgatgatcaaggaatcgatcaacgcggcctatgagacaacgctcgctgagggcgtgcgcttcgagcgccggctcttccatgcgacgtttgccagcgaagaccagaaggaaggcatggctgcttttgtcgagaaacgcagccctgacttcaagcatcgctga

SEQ ID NO: 28985 - protein, 258 aa, Ralstonia eutropha JMP134
MSYENILVETRGRVGLVTLHRPKALNALNDALMDELGAALTVFDKDENIGAIVITGSEKAFAAGADIGMMAKYSFMDVYKGDYITRNWETIRTIRKPVIAAVAGYALGGGSELAMMCDIIIAAENARFGQPEVKLGTMPGAGGTQRMPRAVSKAKAMDLCLTARMMDAAEAERAGLVSRVVPADKLLDEALAAAETIAGYSLPVVMMIKESINAAYETTLAEGVRFERRLFHATFASEDQKEGMAAFVEKRSPDFKHR

SEQ ID NO: 28986 - DNA, 774 bp, Pseudomonas fluorescens PfO-1
  CDS (1)..(774): transl_table=11
atgagttacgaaacgattttgctggaaacccatggccgcgtcggcctgattaccctcaatcgcccgcaggcgctgaatgccctgaatgcgcaactggtcagcgaagtgaatcgcgcgctcgatggatttgaagccgacgcgaacatcggctgcatcgtcatcaccggctcgaccaaggccttcgccgccggcgccgacatcaaggaaatggccgatctgacctacccgcagatctacatggacgacctgttcagcgacagcgatcgcgtggccaaccggcgcaagccgatcatcgccgcggtcaacggttttgccctcggcggcggctgtgagctggcgctgatgtgcgacttcatcctggccggcgacaacgccaaattcggccagccggaaatcaacctcggcgtgctgccgggcatgggcggcacccagcgcctgacccgcgcggtgggcaaggccaaggccatggaaatgtgcctgagcggccgcatgatcgacgcggtggaagccgagcgctgcggcatcgtcgcgcgaatcgtgccgagtgccgagttgctggatgaggcgctgaaagtcgccgcagtgatcgccagcaaatcgctgccgattacgatgatggtcaaggaaagcgtcaaccgcgcgtttgaagtgaatctgaccgaaggcgtgcgcttcgagcgccgggtgttccatgcggcgtttgcgacgcaggatcagaaggaagggatggcggcgtttgtggccaagcgtgcgcctgaatttcagggcaagtaa

SEQ ID NO: 28987 - protein, 257 aa, Pseudomonas fluorescens PfO-1
MSYETILLETHGRVGLITLNRPQALNALNAQLVSEVNRALDGFEADANIGCIVITGSTKAFAAGADIKEMADLTYPQIYMDDLFSDSDRVANRRKPIIAAVNGFALGGGCELALMCDFILAGDNAKFGQPEINLGVLPGMGGTQRLTRAVGKAKAMEMCLSGRMIDAVEAERCGIVARIVPSAELLDEALKVAAVIASKSLPITMMVKESVNRAFEVNLTEGVRFERRVFHAAFATQDQKEGMAAFVAKRAPEFQGK

SEQ ID NO: 28988 - DNA, 777 bp, Rhodobacter sphaeroides 2.4.1
  CDS (1)..(777): transl_table=11
atggcctacgaaaccctgatcgtcgagatcgaggattatgtggcgctgatccggctgaaccgcccggacgcgctcaatgcgctcaacagcaagatgatgtccgaactggccgatgcgctcggcgcggccgaccggaacgagaaggtgcgctgcatcgtcctcaccgggtcggagaaggccttcgccgccggtgccgacatcaaggagatggccgagcagagcttcgtcgatgtcttcggcagcgatttcttcacctcggattccgaggcgatgctgcgggtgcgcaagccgatcgtggcggcggtggcgggctatgcgctcggcggcggctgcgagctggcgatgatgtgcgacttcatcattgccgccgatacggccaagttcggccagcccgagatcaacctcggcgtcgtggccgggctcggcggcacgcagcgcctgacgcgcttcgtgggcaagtcgaagtccatggacatgcatctgaccggccgcttcatggatgcggccgaagccgagcgctgcggcctcgtgagccgcgtggtaccggccaagaacctgatggaggaggcgatgaaggccgcctccaagatcagcgagaagtcgcttctgaccgccatggcggtgaaggaggcggtgaaccgcagctacgagaccacgctgcgcgagggtgtcctcttcgagcgccgcctcttccacgcgcttttcgccaccgaagaccagaaggagggcatggcggccttcctcgagaagcggactccgcagttccgcgacaagtaa

SEQ ID NO: 28989 - protein, 258 aa, Rhodobacter sphaeroides 2.4.1
MAYETLIVEIEDYVALIRLNRPDALNALNSKMMSELADALGAADRNEKVRCIVLTGSEKAFAAGADIKEMAEQSFVDVFGSDFFTSDSEAMLRVRKPIVAAVAGYALGGGCELAMMCDFIIAADTAKFGQPEINLGVVAGLGGTQRLTRFVGKSKSMDMHLTGRFMDAAEAERCGLVSRVVPAKNLMEEAMKAASKISEKSLLTAMAVKEAVNRSYETTLREGVLFERRLFHALFATEDQKEGMAAFLEKRTPQFRDK

SEQ ID NO: 28990 - DNA, 774 bp, Carboxydothermus hydrogenoformans Z-2901
  CDS (1)..(774): transl_table=11
atgagcgtaattgaaatggtaagggaagaaggaattgctatacttaccatcaatagggcaaatgttttaaatgctttaaataccgaagtgcttttagaattaaaaaaggttttatctcaaatcaaagaagatacaagtattaaggttgttataattaccggggccggagagaaagcctttgttgcaggtgctgatataagtgaaatggtaaagcaaagcgtagatgaagggtatagatattcccgtttagggcaggaggtacttgcacttatcgagaatcttccccaaccggtaatagcagcagtaaatggttatgctctgggcggtggctgcgaattagctatggcctgtgacatgaggattgcttcggagaaagcaaagtttggtctgccagaaattaatttgggtattattccagggtttggaggcacgaaaaggctaacagaactggtaggtaaagctaaagcaatggagttaatattaaccggagagatgattgatgctgcccaagctgagcgtttaggattagttaaccaggtagtaaaagcagataagttattggagacagcaaagacgctggctcaaaaaattgcatctaaaagtcaaattgctgttcgggcagctaaactggcagtaaataagagtttgtacactgatattgaaactgcaaatgcttgtgaagcagggctttttggagtctgttttgcttcagaggatagaaaagaagggatgatggcttttttagagaagcgtcctgcaaaatttaaaaattag

SEQ ID NO: 28991 - protein, 257 aa, Carboxydothermus hydrogenoformans Z-2901
MSVIEMVREEGIAILTINRANVLNALNTEVLLELKKVLSQIKEDTSIKVVIITGAGEKAFVAGADISEMVKQSVDEGYRYSRLGQEVLALIENLPQPVIAAVNGYALGGGCELAMACDMRIASEKAKFGLPEINLGIIPGFGGTKRLTELVGKAKAMELILTGEMIDAAQAERLGLVNQVVKADKLLETAKTLAQKIASKSQIAVRAAKLAVNKSLYTDIETANACEAGLFGVCFASEDRKEGMMAFLEKRPAKFKN

SEQ ID NO: 28992 - DNA, 777 bp, Burkholderia sp. 383
  CDS (1)..(777): transl_table=11
atggcttacgagaacatcctggtggagacccgggggcgtgtcgggctggttacgctgaaccgtccgaaggcgctgaatgcgctgaacgatgcgctgatggatgagctgggtgacgcgctgaaggcgttcgatgcggacgatggtatcggtgcaatcgtcgtgaccgggagcgagaaggcgttcgcggccggcgcagatatcggcatgatggcgacctactcctatatggatgcctaccggggcgactacatcacgcgcaactgggagacggtccgcgaaattcgcaagccgatcattgcggcggtttctggctttgcgctgggtggcggctgcgagctggccatgatgtgcgacatcatcttcgcggcggacacggccaagttcggccagccggaaatcaagctgggcgtcatgccgggggcgggcggcacgcagcgcctgccgcgcgcggtgtctaaggcgaaggcgatggacatgtgcctgaccgcgcgtttcatggatgctgccgaagcggagcgcgcggggctcgtgtcgcgcgtattgccggccgacacgctgcttgatgaggcgcttgccgccgcggcgacgatcgccgagttttcgctgccggcggtcatgatggtcaaggagtcggtgaaccgcgcgtacgagacgacgctggccgaaggcgtccacttcgagcgtcggctgtttcattcgctgttcgcgaccgaagaccagaaggaagggatggcggcattcgtcgagaaacggaagccggtgttcaagcaccgctga

SEQ ID NO: 28993 - protein, 258 aa, Burkholderia sp. 383
MAYENILVETRGRVGLVTLNRPKALNALNDALMDELGDALKAFDADDGIGAIVVTGSEKAFAAGADIGMMATYSYMDAYRGDYITRNWETVREIRKPIIAAVSGFALGGGCELAMMCDIIFAADTAKFGQPEIKLGVMPGAGGTQRLPRAVSKAKAMDMCLTARFMDAAEAERAGLVSRVLPADTLLDEALAAAATIAEFSLPAVMMVKESVNRAYETTLAEGVHFERRLFHSLFATEDQKEGMAAFVEKRKPVFKHR

SEQ ID NO: 28994 - DNA, 789 bp, Geobacter metallireducens GS-15
  CDS (1)..(789): transl_table=11
atgagttatgaagcaatcatgctggagcgtaacggagcagttggagttctgacttttaatcggccagaggtattgaatgcatacaaccggacccttgccgcagatattataacgggattcaacgagcttgtagcggacaaatcggtgagggcaatcgtattgaccggtgccggcaaggcgttcatggccggtgcggacatcaatatggtcaatggctggaccaagttggggaatgccgcaaagatcaaggaggatctcaggcaactggtcaatccgaatatgatagaggattgtcccaagccgaccattgctgcagtaaacggtcttgcctttggcatgggatgcgagcttgccatggcctgtgattttcggattgcagcagaaaaagcccaattcggccagcccgaggtaaagctcggcatcattcccggtgcaggggggagccagcgtctgcgggaacttgtcgggccgaccagggcgctggagatgatttccaccggcgaccccattgatgcccaggaggcctacaggattggccttgtcaaccaggtggtcccccgcgatgagttgatggaggcggtcaacgcgtttgccggcaggctgatcgacaagggagcggtagtgctggatatctgcaagaagctggtctacgaagggggtgatctacctctccgtggggggatcgattacgagcaggaccagttctgcaaaatcctcctgacagcagatgcacaggaagggactctggccttcctggaaaagcgcaagccggtcttcaacaagggttag

SEQ ID NO: 28995 - protein, 262 aa, Geobacter metallireducens GS-15
MSYEAIMLERNGAVGVLTFNRPEVLNAYNRTLAADIITGFNELVADKSVRAIVLTGAGKAFMAGADINMVNGWTKLGNAAKIKEDLRQLVNPNMIEDCPKPTIAAVNGLAFGMGCELAMACDFRIAAEKAQFGQPEVKLGIIPGAGGSQRLRELVGPTRALEMISTGDPIDAQEAYRIGLVNQVVPRDELMEAVNAFAGRLIDKGAVVLDICKKLVYEGGDLPLRGGIDYEQDQFCKILLTADAQEGTLAFLEKRKPVFNKG

SEQ ID NO: 28996 - DNA, 777 bp, Rhodospirillum rubrum ATCC 11170
  CDS (1)..(777): transl_table=11
atggcctacgaaaacattctcgtggaaaccaacggtaaagtgggcatcgtcacgctcaaccggcccaaggcgctcaatgccctttcggccgggttggtccgcgatctcggcgccgccctcgacgccttcgaggccgatgtgaacgtccacgtcatcgtcctgaccggctcggacaaggctttcgccgccggcgccgatatcaaggagatggccgaaaagtcctatatggacgcctatctcgaagacttcatcaccaagggctgggagcgggtgaccacctgccgcaagccgatcatcgccgccgtggccggattcgccctgggcggtggctgcgagatggcgatgatgtgcgatttcatcatcgccgcccagaacgccaaattcggccagcccgaaatcaacctgggcaccctgcccggcgccggcggcacccagcgtctgacccgcttcgtcggcaagtccaaggcgatggacatgtgtctgaccgggcggatgatggatgccgacgaggcttggaaatgcggcctcgtcagccgcatcgtcccggtggacgatctcaaggacgaggtgctgaagatcgccgaggcgatcgccgataaaagcctgccgatcaccatgatggtcaaggaggcggtcaatgccgcctatgagaccaccctggcccagggtgtccgattcgagcgccggcttttccaggcgagtttcgccaccgacgaccagaaggaaggcatgaacgccttcatcgaaaagcgtcagcccagtttcaccgaccgctga

SEQ ID NO: 28997 - protein, 258 aa, Rhodospirillum rubrum ATCC 11170
MAYENILVETNGKVGIVTLNRPKALNALSAGLVRDLGAALDAFEADVNVHVIVLTGSDKAFAAGADIKEMAEKSYMDAYLEDFITKGWERVTTCRKPIIAAVAGFALGGGCEMAMMCDFIIAAQNAKFGQPEINLGTLPGAGGTQRLTRFVGKSKAMDMCLTGRMMDADEAWKCGLVSRIVPVDDLKDEVLKIAEAIADKSLPITMMVKEAVNAAYETTLAQGVRFERRLFQASFATDDQKEGMNAFIEKRQPSFTDR

SEQ ID NO: 28998 - DNA, 777 bp, Burkholderia thailandensis E264
  CDS (1)..(777): transl_table=11
atggcttacgagaacatcctggtggagacgcggggccgggtgggactgattacgctgaatcgtccgaaggcgctgaatgcgctgaacgacgcgctgatggacgagctcggcgcggcgctcaaggtatttgatgcggatgagggtatcggcgcgatcgtgctgacgggcagcgagaaggcgttcgcagctggcgccgacatcgggatgatggcgacctattcgtatatggacgtcttcaagggcgactacatcacgcgtaactgggaggcggtgcgtcaggttcgcaagccggtcattgcggcggtggcgggtttcgcgctgggcggcggctgcgagctcgcgatgatgtgcgacatcatctttgcggccgataccgcgaaattcggccaacccgaaatcaagctcggcgtgctgccgggggcgggcggcacgcagcgtctgccgcgggcggtatcgaaggcgaaggcgatggacatgtgcctaaccgctcgcttcatggatgcggaggaggccgagcgcgcggggctggtgtcgcggattctgccggccgacaagttgctcgacgaagcgattgccgcggcgtcgacgatcgccgagttctcgttgcccgccgtgatgatggtgaaggaggcggtgaatcgcgcgtacgagacgaccttgtccgaaggggtgcacttcgagcgccgcttgtttcattcggcgtttgcaactgaagatcagaaggaaggcatggcggcgttcgtcgagaagcgcaagcccgtcttcaagcaccgctga

SEQ ID NO: 28999 - protein, 258 aa, Burkholderia thailandensis E264
MAYENILVETRGRVGLITLNRPKALNALNDALMDELGAALKVFDADEGIGAIVLTGSEKAFAAGADIGMMATYSYMDVFKGDYITRNWEAVRQVRKPVIAAVAGFALGGGCELAMMCDIIFAADTAKFGQPEIKLGVLPGAGGTQRLPRAVSKAKAMDMCLTARFMDAEEAERAGLVSRILPADKLLDEAIAAASTIAEFSLPAVMMVKEAVNRAYETTLSEGVHFERRLFHSAFATEDQKEGMAAFVEKRKPVFKHR

SEQ ID NO: 29000 - DNA, 801 bp, Syntrophus aciditrophicus SB
  CDS (1)..(801): transl_table=11
gtgacagggggacaaaatctcatggcatatgaaacgatactcctcaaaatcgagggtaatattgcaacgataacgatcaatcgcccccccatgaatcccctgaacagcggagttttccgggatgtcattgcggccactcgagaaatcgaagccgacgataatgtcaaggtcatcattctggacagcaccggagacaaggctttcgccgccggcgccgacgtcaaggaaatggttaatttgacgccggtcgagatctacgatttcagcctgaacttccgcaaggcctgtgaatgttttgcagccaatccgcttcctacgattgccgtcatcaagggattcgcccttggaggcggctgcgaaatggccatggcctgtgaccttagaatcgctgccgacaacgcaaaattcggtcagccggaaattaatctgggtgtgactcccggagcgggcggtacgcagaggttgacccgtctggtcggcgctgcccgggccaaggagctgatccttacgggcgacatgatcgacgcggcaacagcggagagaatcggcctcgtaaataaagtcgtgcctctggcggaactggatgccgctgtggccgccctggcggagaaactggcgtccaaaccgaaagtcagcctgaaactgtgcaaatccgcgatcaacacggcagaggatgtcgacatcagcagcggtatcgcctttgaagttctgacgttctcccttgccaatgcatctgctgacaagctggagggaatgaaggcgcttcttgaaaagcgtaaagcgaattttcaagacaagtag

SEQ ID NO: 29001 - protein, 266 aa, Syntrophus aciditrophicus SB
MTGGQNLMAYETILLKIEGNIATITINRPPMNPLNSGVFRDVIAATREIEADDNVKVIILDSTGDKAFAAGADVKEMVNLTPVEIYDFSLNFRKACECFAANPLPTIAVIKGFALGGGCEMAMACDLRIAADNAKFGQPEINLGVTPGAGGTQRLTRLVGAARAKELILTGDMIDAATAERIGLVNKVVPLAELDAAVAALAEKLASKPKVSLKLCKSAINTAEDVDISSGIAFEVLTFSLANASADKLEGMKALLEKRKANFQDK

SEQ ID NO: 29002 - DNA, 789 bp, Syntrophus aciditrophicus SB
  CDS (1)..(789): transl_table=11
atgaatgaagaccctgtgctgtatgccgttgagaaccattgtgcccgaatcacccttaaccggccggaggtaaagaatgccttcagccccgaaatgatccggctttggcgcgaatacctgtcggaagccggccgggatgaccgggtccgtgtcgttgtcgtaaccggaaagggggacaccttctgttcgggcggcgacatcagggacatggccgagggaaaactccgttcctgggatatgaagaactacgtctgggaaggggtccatcgcatcgtcctggccctggaagacctggacaaaccggtgatcgcgtccatcaacggcgcggccatgggcgcgggcctggacatggcgctcatgtgcgatatgagaatctgctcggacaaagcgaagcttgctgaatcctatatcctcatgggccttgttccgggggacggtggagcctatttcctgccgcgtctggtcggcgtttccaaagcgcttgagttgtttctcacaggggatccgattcgtcccgaagaggccctccggctcggcatggtgaaccgtgtcgtccctcacgaccgtcttatggaagaaaccctcgcccttgcggagaaaatagcgagccggccgccgctggccgtccagatgatgaaaagggccgtctatcaggcacagacaagcacgttgcgatcgcaccttgactacatctcttcccagttgtcgctgctctcggaaacggaagaccacatcgaggcggcaaaggcctttctggagaaacggcctccccttttcaaaggaaaatag

SEQ ID NO: 29003 - protein, 262 aa, Syntrophus aciditrophicus SB
MNEDPVLYAVENHCARITLNRPEVKNAFSPEMIRLWREYLSEAGRDDRVRVVVVTGKGDTFCSGGDIRDMAEGKLRSWDMKNYVWEGVHRIVLALEDLDKPVIASINGAAMGAGLDMALMCDMRICSDKAKLAESYILMGLVPGDGGAYFLPRLVGVSKALELFLTGDPIRPEEALRLGMVNRVVPHDRLMEETLALAEKIASRPPLAVQMMKRAVYQAQTSTLRSHLDYISSQLSLLSETEDHIEAAKAFLEKRPPLFKGK

SEQ ID NO: 29004 - DNA, 777 bp, Frankia sp. CcI3
  CDS (1)..(777): transl_table=11
atgagtgtggtgcggctcgaggttgacggcgggatcggcaccatccggttagaccggccgccgatgaacgcgctggactccacggtcgccgcggagctgcggaccgccgcggtcgaggcgacccggcggtcggacgtccgcgcggtggtgctctatggcggggaaaaggtgttcgccgccggggccgacatccggcagatggcgccgatgggttacgccgaggtatccacctgggtgggcgatctgaactccaccttcgaggtcgtggcccggatcccgaagcccgtggtcgccgcggtgacgggctatgccctgggcggcgggttggagcttgccctgtgcgcggacgtgcgggtcttggccgaggacgcccgggtcggccagcccgagatcctgctcggagtgatccccggcgcggggggcacccagcggctgccgcgcctgatcggcccgtcccgcgccaaggacctcatcttcagcggccggcaggtccgggcggccgaggcagcggagatcggtctggccgacgccgtcgttcccgcgggtgaggtgtacgtgcaggcgaagcggatcgcgggccggtacacgaacggcccggcgatggcgctcgcggcggcgaagcaggcggttgacgacggcgcggagatcgcgttggccgaggcgctacgtctggaggcggcgctgttcgccgggctgttcgccaccgaggaccggcggatcggaatggagtccttcctcgagagcgggcccggcaaggccgacttcatcggccgctga

SEQ ID NO: 29005 - protein, 258 aa, Frankia sp. CcI3
MSVVRLEVDGGIGTIRLDRPPMNALDSTVAAELRTAAVEATRRSDVRAVVLYGGEKVFAAGADIRQMAPMGYAEVSTWVGDLNSTFEVVARIPKPVVAAVTGYALGGGLELALCADVRVLAEDARVGQPEILLGVIPGAGGTQRLPRLIGPSRAKDLIFSGRQVRAAEAAEIGLADAVVPAGEVYVQAKRIAGRYTNGPAMALAAAKQAVDDGAEIALAEALRLEAALFAGLFATEDRRIGMESFLESGPGKADFIGR

SEQ ID NO: 29006 - DNA, 786 bp, Novosphingobium aromaticivorans DSM 12444
  CDS (1)..(786): transl_table=11
atggccgagtacgaaaccatcctcgtcgaacagaagggtgctgtcaccctcatcactctgaaccgcccgcaggcgctcaacgcgctcaattcgcaggtgctggccgagctgatcgaagccttcgccgcctacgaggccgacgcctcgcagcgctgcgccgtgctgaccggatcgggcgagaaggcttttgccgccggggccgacatcaaggaaatgtcggaaaagcccgccgccgacttctataacgaggacttcttctcgaagtggaccagccacctcgtgaagaccacccgcaagccctggatcgctgccgtgaacggctttgctctgggcggcggctgcgagcttgccatgatggcggacttcatcatcgcttccgagaacgcgaagttcggccagcccgagatcaagcttggcgttgcccccggcatgggcggctcgcagcgcctgacccgcgcggtgggcaaggccaaggcgatggacatgtgcctgaccggccggatgatggacgccgccgaagccgagcgttcgggcctcgttacccgcgtcgtgccgctggccgatctgctggccgatgcgctcaagaccgccgagaccatcgccgcgatgccgccgatggcggctgtcgccaacaaggaaatggtcaacgccgcgttcgagaccacgctagaccagggcctgctgttcgaacgccgcgtgttccagatcctcaccgccagcgaggacaaggccgaaggcatgaaggccttcatcgaaaagcgccccggcgtgtggaagggacgttaa

SEQ ID NO: 29007 - protein, 261 aa, Novosphingobium aromaticivorans DSM 12444
MAEYETILVEQKGAVTLITLNRPQALNALNSQVLAELIEAFAAYEADASQRCAVLTGSGEKAFAAGADIKEMSEKPAADFYNEDFFSKWTSHLVKTTRKPWIAAVNGFALGGGCELAMMADFIIASENAKFGQPEIKLGVAPGMGGSQRLTRAVGKAKAMDMCLTGRMMDAAEAERSGLVTRVVPLADLLADALKTAETIAAMPPMAAVANKEMVNAAFETTLDQGLLFERRVFQILTASEDKAEGMKAFIEKRPGVWKGR

SEQ ID NO: 29008 - DNA, 777 bp, Burkholderia xenovorans LB400
  CDS (1)..(777): transl_table=11
atggcttacgagaatattctggttgagacgcgggggcgggtcgggttggtcactttgaatcgaccgaaggcgctgaacgcgctgaacgacgcattgatggacgaactgggcgcggcgctgcgcgagttcgatgccgacgacgcgatcggtgcgatcgtggtgaccggcagcgagaaagcgttcgcggccggtgcagacgtcggcatgatgtccacttatacctatatggatgtttataagggggactacatcacccgcaactgggaaacggtccgctccatccgcaagccgatcattgcggcggtggcgggctttgcgcttggcggcggctgcgaattggcgatgatgtgcgatattatttttgccgccgacacggcaaagttcggtcagccggaaatcaagctcggcatcatgccgggtgccggaggcacgcagcggttgccgcgcgccgtctccaaggcgaaggcaatggacctttgcctgaccgcgcgtttcatggatgccgccgaagccgagcgtgccggcctggtgtcgcgtgttattccggctgcttctctggttgacgaggcggtagccgcggctgccacgatcgcagaattcccgttgccggccgtgatgatggtgaaggaatcggttaatcgtgcttatgagacgacgctcgcggaaggtgtgcatttcgagcgccgcctgttccattcgctcttcgctaccgaagaccagaaggaaggcatggccgcgttcgtggagaagcgcaaaccggttttcaaacatcgttaa

SEQ ID NO: 29009 - protein, 258 aa, Burkholderia xenovorans LB400
MAYENILVETRGRVGLVTLNRPKALNALNDALMDELGAALREFDADDAIGAIVVTGSEKAFAAGADVGMMSTYTYMDVYKGDYITRNWETVRSIRKPIIAAVAGFALGGGCELAMMCDIIFAADTAKFGQPEIKLGIMPGAGGTQRLPRAVSKAKAMDLCLTARFMDAAEAERAGLVSRVIPAASLVDEAVAAAATIAEFPLPAVMMVKESVNRAYETTLAEGVHFERRLFHSLFATEDQKEGMAAFVEKRKPVFKHR

SEQ ID NO: 29010 - DNA, 777 bp, Ralstonia metallidurans CH34
  CDS (1)..(777): transl_table=11
atgtcgtacgagaacatcctggtggagacgcgaggtcgcgttggtctggtgacgctgaaccggcccaaagcgctcaatgcgctcaatgacgcgctgatggacgaactgggcgcggcgctgacggcattcgaccaggacgaggcaatcggctgcatcgtcatcacggggagcgagcgtgccttcgccgcaggggccgatatcagcatgatggcgaagtactcctatatggatgtctacaagggcgactacatcacccgcaactgggagacaatccgccgcatccgcaaaccggtgatcgccgccgtggccggctatgcgctgggcggtggttgcgaactggcgatgatgtgcgacattgtgattgccgccgacagcgcgaagttcggccagccggaagtgaagctcggcacgatgcctggcgccggcggcacgcagcggctgccgcgtgccgtctccaaggccaaggcgatggacctgtgcctgaccgcgcgcatgatggatgccaccgaggccgagcgcgccgggctggtttcccggatcgtcccggcagacaaactggtagacgaagccgtggccgcggccgagactatcgccggttactcgctgccggttgtcatgatgatcaaggagtcggtgaacgctgcctatgagacgactctgaatgaaggggtccacttcgagcgccgactgttccactcgaccttcgccaccgaagaccagaaggagggtatggcagcgtttgtggagaagcgtgcacccaatttccagaatcggtga

SEQ ID NO: 29011 - protein, 258 aa, Ralstonia metallidurans CH34
MSYENILVETRGRVGLVTLNRPKALNALNDALMDELGAALTAFDQDEAIGCIVITGSERAFAAGADISMMAKYSYMDVYKGDYITRNWETIRRIRKPVIAAVAGYALGGGCELAMMCDIVIAADSAKFGQPEVKLGTMPGAGGTQRLPRAVSKAKAMDLCLTARMMDATEAERAGLVSRIVPADKLVDEAVAAAETIAGYSLPVVMMIKESVNAAYETTLNEGVHFERRLFHSTFATEDQKEGMAAFVEKRAPNFQNR

SEQ ID NO: 29012 - DNA, 783 bp, Acidobacteria bacterium Ellin345
  CDS (1)..(783): transl_table=11
atgacattcgaaaacattctctacgaagtaagaaatcagatcgcttacgtcaccatcaatcgcccgaaggtcctcaacgcgctcagcatcgccaccatcggcgagatcgggcaggcgatgcaggccgcgaaggacgatgccaacgcgcatgtcgtcatcctcactgggtcaggtgagaaggctttcgtcgcgggtgccgacatcaacgaactgaagaccgctacaagcgaagtcggcaagcaatatgcgctgcgcggacaggccgtgctgagcttgctcgaaaatctcggcaagcctgtcatcgcggctgttaacggtttcgccctcggcggaggctgcgaactggcgctcggctgcacgatgcgcttcgcttcggataacgcgaaactcggacagcccgaagtgaagctgggcatcatggccggtttcggtggctcgcaacgcttgccgcgactcgtagggcgcgggatgggcatgcagcttctcctcaccggcgagaccatcaccgcgcaggaggctctgcgcatcggactggtgaatgcggtcgttccgcaagccgagctgatggcctatgtcgagggcgtggcagcgaagatcatcgccaacgctccgctggcgatccagtacacgatggaggcggtgaatcacggcgccgatatgacgctcgcggaggggctctatctcgaagcgacacttttctcgatcacatgcgcgacggaagacaagaacgaaggcacgtcggcgtttctcgagaagcggggagcgacgtttaagggaagataa

SEQ ID NO: 29013 - protein, 260 aa, Acidobacteria bacterium Ellin345
MTFENILYEVRNQIAYVTINRPKVLNALSIATIGEIGQAMQAAKDDANAHVVILTGSGEKAFVAGADINELKTATSEVGKQYALRGQAVLSLLENLGKPVIAAVNGFALGGGCELALGCTMRFASDNAKLGQPEVKLGIMAGFGGSQRLPRLVGRGMGMQLLLTGETITAQEALRIGLVNAVVPQAELMAYVEGVAAKIIANAPLAIQYTMEAVNHGADMTLAEGLYLEATLFSITCATEDKNEGTSAFLEKRGATFKGR

SEQ ID NO: 29014 - DNA, 777 bp, Silicibacter sp. TM1040
  CDS (1)..(777): transl_table=11
atggcctatgagacgatcaacgtcgatactcaggaccacgtctgccttatcaagctgaaccggcctgaagcgttgaacgcgctcaattccgtccttttgggcgagttgtgtgccgctttggaagaagcggacgccagcgacaaagtgcgctgcatcgtgctgaccggatcggaaaaggcatttgcagcgggcgccgacatcaaggagatgtcggagatgagctatgtggatgtgttcacatccaacctctttgcggacgccaatgaccggatcgctgccatccgcaaaccgatcatcgctgcggtgtctggctatgcgctgggcggcgggtgcgaagtggccatgatgtgtgatttcatcatcgcggctgagaccgcgaaattcggccagcccgagatcaatctgggtgtcattgccggtatgggcggcacgcaacgcctcacccgttttgtgggcaagtcgaagtcgatggacatgaatctgaccggccgcttcatgactgccgatgaggcagagcgggcaggtctggtgtcgcgcgtggttccggccaaaaagctgatcgaagaggcgatggcagcagcctctaagatcgccgagaaatcagtactgacctcgattgcggccaaggaggccgtcaatcgcgcgtatgaattgccgcttagcgaaggcatgctctttgagcggcgggtcttccattccatgtttgcgacggaagaccaaaaggaaggtatggcagcgtttctagaaaaacgcgaagcccagttccgagacaagtaa

SEQ ID NO: 29015 - protein, 258 aa, Silicibacter sp. TM1040
MAYETINVDTQDHVCLIKLNRPEALNALNSVLLGELCAALEEADASDKVRCIVLTGSEKAFAAGADIKEMSEMSYVDVFTSNLFADANDRIAAIRKPIIAAVSGYALGGGCEVAMMCDFIIAAETAKFGQPEINLGVIAGMGGTQRLTRFVGKSKSMDMNLTGRFMTADEAERAGLVSRVVPAKKLIEEAMAAASKIAEKSVLTSIAAKEAVNRAYELPLSEGMLFERRVFHSMFATEDQKEGMAAFLEKREAQFRDK

SEQ ID NO: 29016 - DNA, 774 bp, Mycobacterium sp. MCS
  CDS (1)..(774): transl_table=11
atggactacgagaccatcctcgtcacccgcgagggccgggtcggcacgatcacgctgaaccgccccaaggcgctcaatgcgctcaactcgcaggtgatggccgaagtcaccacagcggcagccgaattcgactccgacgagggtatcggcgcgatcgtcgtcaccggcagcgagaaggccttcgcggcgggcgccgacatcaaggagatggcgagcctgtcgttcgccgaggtgttcacctcggacttcttcgcgctgtggggcaaattcgccgccacccgcaccccgaccatcgccgccgtggcgggttacgccctgggcggcggatgcgagctggcgatgatgtgcgacatcctcatcgccgccgacaccgcgaagttcggccagcccgagatcaagctgggcgtgctgcccggcatgggcggatcgcagcggctgacccgcgcgatcggcaaggccaaggcgatggacctgatcctgaccggccgcacgatcggcgccgaggaggccgagcgcagcggtctggtgtcacgggtggtgcccgccgaccgactgctcgacgaggccaacgaggtggccgcgacgatcgcggggatgtcgcgcaacgcatcccggatggccaaggaagcggtcgaccgtgccttcgagtccacgctgaccgagggcctgctctacgaacgccggctcttccactccaccttcgcgaccgaggatcagaaggaaggtatggcggcgttcagcgagaagcgcccggccaacttcacgcatcgctag

SEQ ID NO: 29017 - protein, 257 aa, Mycobacterium sp. MCS
MDYETILVTREGRVGTITLNRPKALNALNSQVMAEVTTAAAEFDSDEGIGAIVVTGSEKAFAAGADIKEMASLSFAEVFTSDFFALWGKFAATRTPTIAAVAGYALGGGCELAMMCDILIAADTAKFGQPEIKLGVLPGMGGSQRLTRAIGKAKAMDLILTGRTIGAEEAERSGLVSRVVPADRLLDEANEVAATIAGMSRNASRMAKEAVDRAFESTLTEGLLYERRLFHSTFATEDQKEGMAAFSEKRPANFTHR

SEQ ID NO: 29018 - DNA, 777 bp, Rubrobacter xylanophilus DSM 9941
  CDS (1)..(777): transl_table=11
ttggactacgtcaggctggagagggacgagagcggcatcgccgtcctcaccatagaccgccaggagaagctcaacgccctcaacccccaggtcaccgaggagatcgggcagaccctgctggacctggagcgggagtttccgcgggcgatcatcgtgaccggggccggggaccgctccttcgtggccggggcggacatcgaggcgatgagcaccatgcccccgctggaggccaagcgcttcgccgagatggggcacgccgcgatggccctcctggaccgtacgccggtgcccaccatcgccgcggtcaacggctacgcgctcgggggcggctgcgagatagccctggcctgcgatctgcgcgtcgccgccgagaacgccgtcttcggcttccccgaggtctctttgggcatcctgcccggcatgggcgggacccagcgcctcccgcgcctcgtgggcccggcggtcgcgaaggagctgatcttcaccggcaggcgcataagcgccggggaggcgcacaggatagggctggtcaaccgcgtcgtcccgcgcggcgaggcgcttgaggcggcccgtgagatggccgccgagatagccgccaacgccccgctcgccgtgcggcacgccaaggcggcggccaaccgggccttcgacgtggacctcatcagcgggctggagtacgaggccgaccagttctcgctgctgttctccaccgaggacgcccgcgaggggatgggcgccttcgtgcagaagcggaaggcggagttcaggggacgctga

SEQ ID NO: 29019 - protein, 258 aa, Rubrobacter xylanophilus DSM 9941
MDYVRLERDESGIAVLTIDRQEKLNALNPQVTEEIGQTLLDLEREFPRAIIVTGAGDRSFVAGADIEAMSTMPPLEAKRFAEMGHAAMALLDRTPVPTIAAVNGYALGGGCEIALACDLRVAAENAVFGFPEVSLGILPGMGGTQRLPRLVGPAVAKELIFTGRRISAGEAHRIGLVNRVVPRGEALEAAREMAAEIAANAPLAVRHAKAAANRAFDVDLISGLEYEADQFSLLFSTEDAREGMGAFVQKRKAEFRGR

SEQ ID NO: 29020 - DNA, 774 bp, Mesorhizobium sp. BNC1
  CDS (1)..(774): transl_table=11
atggcctatgaaacgattctggtggagacgcgtgggcgggtgggtctcatcacgctcaaccgcccgaaggcgctgaatgcgctcaataccaaaatgatggaggagttgatcggcgcggcagaggcattcgacgccaatccgcgcgtggggaccgttgtcattaccgggtcagagcgggcctttgccgccggggccgacatcaaggagatgcagcccaagacattcattgatgtctatatggaagacctctattcggattgggagcggctcacccgtgtccgcaagcctctcatcgctgcggtaagcggctatgcgcttgggggcggttgtgagctggcgatgatgtgcgatttcatcatagcggctgataatgccaagttcggccagccggagatcacccttggtgtcacgccgggcatgggcgggtcccagcgccttgctcgtttcgttggaaaatccaaggccatggagatgtgcctgacgggccgcatgatggatgcggaggaggctgagcgttgtggcctggtctcccgtgtcgtacctctgggagaattgattgaggatgtgcttgaggtggccggcaaaattgccgagttttccatgcccgcggtgatgatgacgaaagaggccgtcaaccgcgcctatgagacgacgctttcggaaggcctgcggttcgagcggcgggccttccattccctgtttgcgcttgatgaccgggaggaaggcatggccgcctttacggaaaagcgctctccgcaattccgtaaccgttga

SEQ ID NO: 29021 - protein, 257 aa, Mesorhizobium sp. BNC1
MAYETILVETRGRVGLITLNRPKALNALNTKMMEELIGAAEAFDANPRVGTVVITGSERAFAAGADIKEMQPKTFIDVYMEDLYSDWERLTRVRKPLIAAVSGYALGGGCELAMMCDFIIAADNAKFGQPEITLGVTPGMGGSQRLARFVGKSKAMEMCLTGRMMDAEEAERCGLVSRVVPLGELIEDVLEVAGKIAEFSMPAVMMTKEAVNRAYETTLSEGLRFERRAFHSLFALDDREEGMAAFTEKRSPQFRNR

SEQ ID NO: 29022 - DNA, 777 bp, Rhodococcus sp. RHA1
  CDS (1)..(777): transl_table=11
gtgaccgacttcgagaccatcctgctcgaacgcacgggccgggtggggatcatcaccctcaaccgtccgaaagcgctcaacgccctgaactccgagctgatgcgcgaggtcgtgtcggcggtagaggagttggagaaggattcggagatcggtgccattctgatcaccggttccgatcgcgcattcgcggcgggcgccgacatcaaggagatgcagcccaagtcgtacatggacgtctacctggacgacttcttcgccgcgtgggatcggctcgccgcggcccgcaagccgacgatcgcggccgtcgccggttacgcgctcggcggcggatgcgagctggcgatgctctgcgacatcctgatcgccgccgacaccgcgaagttcggtcagccggagatcaagctcggtgtcatccccggcatcggcggttcacagcggctgacgcgcgcggtgggtaaggccaaggccatggaattgtgcctgaccggccggaacatggacgccgaggaagccgaacgcgccggactggtgtcgcggatcgtgcccgccgcggatctcctggacgaggcgctgcagacggcgaccaccatcgccgagatgtcgcttccggtcgcgatgatggcgaaggaagccgtgaaccgctcgttcgagaccaccctcaccgagggtgtccggttcgagcgtcgggtgttccattcgacgttcgccaccgaggatcagaaggaagggatggcggcgttcgtcgagaagcgtgcgccagtattcaagcaccgctag

SEQ ID NO: 29023 - protein, 258 aa, Rhodococcus sp. RHA1
MTDFETILLERTGRVGIITLNRPKALNALNSELMREVVSAVEELEKDSEIGAILITGSDRAFAAGADIKEMQPKSYMDVYLDDFFAAWDRLAAARKPTIAAVAGYALGGGCELAMLCDILIAADTAKFGQPEIKLGVIPGIGGSQRLTRAVGKAKAMELCLTGRNMDAEEAERAGLVSRIVPAADLLDEALQTATTIAEMSLPVAMMAKEAVNRSFETTLTEGVRFERRVFHSTFATEDQKEGMAAFVEKRAPVFKHR

SEQ ID NO: 29024 - DNA, 777 bp, Rhodococcus sp. RHA1
  CDS (1)..(777): transl_table=11
gtgaccgactacgacaccatcctcctcgaccgcaaaggtcgggtcggaatcatcaccctcaaccgcccgaaagcgctcaacgcgttgaacacccagcttctacgcgaactcgtcaccgccgtcgaagaactcgacaccgacagcgacatcggggccatcctcgtcaccggctccgaccgcgccttcgccgccggcgccgacatcaaagaaatgcaaaccaagtcgtacatggacgtctacctggacgacttcttctccatcggcgaccgcatcgccgccgcacgcaaacccatcatcgccgcagtcgcgggatacgccctcggcggcggctgcgagctggcaatgatgtgcgacatccttctcgccgcggacaccgccaagttcggtcagcccgagatcaagctcggcgtcatccccggcatcggcggctcacaacgcctcacccgcgccgtcggtaaggcgaaggcgatggagctgtgcctgaccggccgcaccatggacgccgaggaggccgaacgcgccggactcgtgtcccggatcgtccccgccgccgacctgttcgacgaagcactgcagaccgccaccactgtcgccgagatgtcactgcccgtcgcgatgatggcgaaggaagcagtcaaccgggcattcgagaccaccctcaccgaagggatccgcttcgaacggcgggtcttccactccaccttcgccaccgaggaccagaaggaaggcatggccgcgttcgtggagaagcgcacgcctgcgttcacacaccgctag

SEQ ID NO: 29025 - protein, 258 aa, Rhodococcus sp. RHA1
MTDYDTILLDRKGRVGIITLNRPKALNALNTQLLRELVTAVEELDTDSDIGAILVTGSDRAFAAGADIKEMQTKSYMDVYLDDFFSIGDRIAAARKPIIAAVAGYALGGGCELAMMCDILLAADTAKFGQPEIKLGVIPGIGGSQRLTRAVGKAKAMELCLTGRTMDAEEAERAGLVSRIVPAADLFDEALQTATTVAEMSLPVAMMAKEAVNRAFETTLTEGIRFERRVFHSTFATEDQKEGMAAFVEKRTPAFTHR

SEQ ID NO: 29026 - DNA, 774 bp, Shewanella sp. MR-4
  CDS (1)..(774): transl_table=11
atggaatatttagttgagcgtatcgaaggccacacggcaattctgacgatgaataatccgccggccaacacttggaccgcccagagtttgcaggcgctcaaggccaaagtgctggagcttaatgccaacaaggacatttacgcgctggtgttaacaggcgagggcaacaagtttttctccgcaggtgccgatttaaaactgtttagcgatggtgataagggcaatgcggcgagcatggcaaaacactttggcgaagcatttgaaaccttaagccagttccgcggcgtgtcgattgccgccattaacggctatgccatgggtggcggcttagaagtcgcgctggcctgtgatattcgtatcgccgaaacccaagccgtgatggcgctgcctgaggctaccgttggcctgctgccctgtgcgggcggtacccaaaacctgaccgctttagtgggcgaaggttgggcgaaacggatgatcctctgcggtgagcgggtgaatgccgcccaagcgctgaatttgcgtttagtcgaggaagtggttgaaacgggtgaagccttaaatgcggcgattgcactggccgccaaagtggcgaatcaaagcccaagcagcgtaactgcctgtaagacacttatccaagcagggcgtcaaatgccgcgcagccaagccttaccgatagagcgtgaactgtttgtcggattgttcgatactgaagatcaggccgaaggcgtgaacgcgtttttggaaaaacgtaaagctgattggaagaaccgctaa

SEQ ID NO: 29027 - protein, 257 aa, Shewanella sp. MR-4
MEYLVERIEGHTAILTMNNPPANTWTAQSLQALKAKVLELNANKDIYALVLTGEGNKFFSAGADLKLFSDGDKGNAASMAKHFGEAFETLSQFRGVSIAAINGYAMGGGLEVALACDIRIAETQAVMALPEATVGLLPCAGGTQNLTALVGEGWAKRMILCGERVNAAQALNLRLVEEVVETGEALNAAIALAAKVANQSPSSVTACKTLIQAGRQMPRSQALPIERELFVGLFDTEDQAEGVNAFLEKRKADWKNR

SEQ ID NO: 29028 - DNA, 783 bp, Hyphomonas neptunium ATCC 15444
  CDS (1)..(783): transl_table=11
atggcctacaataccctcatcaccgaagtgaacgcagaagatggttacgcgctcatccagatgaaccgcgcagagagcctcaacgccctcagcgaggaaatgatgacggagctgacccaggcaatcgaccggtttgaagcggacgacgccatcctctgcatcatcctgacggggaccaagcgcgccttctccggcggcgccgatgtccgcgagatccagtcaaagaccttcccgcaatcctattatgaggatttcatcacccggaactgggagcgcgcggcgcgtgcccgcaagcccatcatcgcggccgtgggcggctatgccatcggcggcgggtgtgaactggccatgatgtgcgacatcatcctggccgccgacaatgcccgcttcggtcagccggaaatccgcctcggcgtgatgccgggcgccggcgccacccagcgcctgacccgcgctgtgggcaagtcaaaggcgatggagctgtgcctcaccgggcgcatgatggaggccgaggaggctgaacgctgcggcctggtggcccggatcgtcccggccgatgatctgctcagcgaagccaaatccctggccgccaccattgccgccatgccccgcgctgctgcgatgatgacaaaagaggcgatcaaggccgccttcgaaaccccgctttcacaggggattcagttcgaacgccgcctgttccagtcgcttttcgccaccgacgatcagaaagaaggcatgaaagcctatgtggagaagcgctcggcccatttccgggatcgctga

SEQ ID NO: 29029 - protein, 260 aa, Hyphomonas neptunium ATCC 15444
MAYNTLITEVNAEDGYALIQMNRAESLNALSEEMMTELTQAIDRFEADDAILCIILTGTKRAFSGGADVREIQSKTFPQSYYEDFITRNWERAARARKPIIAAVGGYAIGGGCELAMMCDIILAADNARFGQPEIRLGVMPGAGATQRLTRAVGKSKAMELCLTGRMMEAEEAERCGLVARIVPADDLLSEAKSLAATIAAMPRAAAMMTKEAIKAAFETPLSQGIQFERRLFQSLFATDDQKEGMKAYVEKRSAHFRDR

SEQ ID NO: 29030 - DNA, 783 bp, Hyphomonas neptunium ATCC 15444
  CDS (1)..(783): transl_table=11
atgtccgaacccattgtcctgaccgaacgccacggcgccgtctgcctggttacgctgaaccggcctgacgccctcaacgcgctcaaccgcgccctgcgcgccgagatcgtgcgcgtgttcaccgagctgaaagacgaccccgaaatccgcgctgtcgtgctgaccggcgcgggccgcgccttcagcgcagggatcgacctcaaggaagcgggccagaccggttttgccctcggcgccgacgaggattccaaatcgatcaacatgctcgccgccctcgaagcttatccctggcccatcatcggcgcgatcaatggctttgccattaccggcggctttgagctggcgctgatgtgcgacgtgctgctcgcctccgagcatacccgctttgccgatactcatgcccgcgttggcatcgtgccgggctggggcctctcgcagaaactctcccgcctcatcggcatcagccgcgccaaggaactctccttcaccggcaacttcatcgacgcggaaacctccgagaaatggggcctcgtcaaccgcgtctatccggccgccgatctcgtgccggccgcgctgcagatggccaccgaaatgacctccaccaatcctgacctcctgcgcaaatacaaggcgctgatcgacgatggcttcggcatgaatttcgccgcctcgatgaaggaagagatcaaacgctcgatcgaccattccaaatcggtttcggcttcggctgtggaagaagcccgcaagcaggtgaccgcgcgcgggcgggaccagcagggataa

SEQ ID NO: 29031 - protein, 260 aa, Hyphomonas neptunium ATCC 15444
MSEPIVLTERHGAVCLVTLNRPDALNALNRALRAEIVRVFTELKDDPEIRAVVLTGAGRAFSAGIDLKEAGQTGFALGADEDSKSINMLAALEAYPWPIIGAINGFAITGGFELALMCDVLLASEHTRFADTHARVGIVPGWGLSQKLSRLIGISRAKELSFTGNFIDAETSEKWGLVNRVYPAADLVPAALQMATEMTSTNPDLLRKYKALIDDGFGMNFAASMKEEIKRSIDHSKSVSASAVEEARKQVTARGRDQQG

SEQ ID NO: 29032 - DNA, 765 bp, Hyphomonas neptunium ATCC 15444
  CDS (1)..(765): transl_table=11
atgcccgtcgaatacgtcaaaaaaggccacgtcgcgatcatcacgatgaaccgccccgaagcccgcaacgccatcaacggcgaaatggccgccaccatggaagctgcgctcgaccagatggaatcagatccggaagtctgggtcggcatcctcaccgccgtcggcaaagcgttctgcgctggcgcagacctgaaagaaatctccgccggcaatggcggcgccctctccaccaagaagggtggcttcgccggcatcgccaagcgcgagcgcaccaagcctctcatcgccgccatcacaggctcggcgctggccggcggcacagagatcgcgctttcctgcgacatgatcgtggcggccgacgacaccaatttcggcctgccggaagtcaagcgctcgctcgtcgccggcgccggcggcctcttccgcctgccccgccagatcggcaaagccgtcgccctggaagccatcctcacgggtgacccgctctcctcgcagcgcgcttacgagctcggcatggtcaacaaggtcgtcccggaagccgacgtgatggccgaagccgaaaagctcgccggccgcatcaccgccaacgcccccctcgccgtcgccgccagccgcgccgtcgcgatcagcgcgacagccaaaaccgacgaagaactctggaaagactccggcgtcgccttcgccagcatcatcaacaccgaagactacaaagaaggccccaaagccttcatcgaaaaacgcgcgcctgtctggaagggtaagtaa

SEQ ID NO: 29033 - protein, 254 aa, Hyphomonas neptunium ATCC 15444
MPVEYVKKGHVAIITMNRPEARNAINGEMAATMEAALDQMESDPEVWVGILTAVGKAFCAGADLKEISAGNGGALSTKKGGFAGIAKRERTKPLIAAITGSALAGGTEIALSCDMIVAADDTNFGLPEVKRSLVAGAGGLFRLPRQIGKAVALEAILTGDPLSSQRAYELGMVNKVVPEADVMAEAEKLAGRITANAPLAVAASRAVAISATAKTDEELWKDSGVAFASIINTEDYKEGPKAFIEKRAPVWKGK

SEQ ID NO: 29034 - DNA, 798 bp, Hyphomonas neptunium ATCC 15444
  CDS (1)..(798): transl_table=11
atgtccattctgctgctagagaagcgcggcccgattgccgtgatgacgctgaaccgtccggaaatgatgaatgcgctggggcaggaaggcgacggtccggcagtggccgccgtgtgcgccgagattgcagctgatccacagatccgctgcgccattctgacgggggctggccgggcgttttccgctggtggcgacgtgaaggccatgaaggaaaagacgggcgctttcggtggaagtccggcagacattcgtgagggctatcgccgcaacattcacatgatcgtccgctccctgtacaatatggaaacaccgctcatctcagccatcaatggcccggccattggccttggctgcgatgtagcgtgcatggccgacatccgcattgcgtccgagacggcaaagatgggggttacgttcctaaagcttggtctgatccccggcgatggcggcgcctggctgttgccgcggttgatcggctcctcgcgcgccgccgaactcttgttcaccggggacgtgatcgacgcgaagacggcggccgaatgggggcttgtcagcaaggtggtccccgctgacaagctgatggatgaggcaatggcgatggcggagaagattgccggccagccgccgcaggcactcaggctcgccaagacgctaatgcgccacggaacgaacgcctcctatgatacgatcatggaactttcggcggcgtcgcaggcgctgatgcatgagaccgaggatcatgtcgaaggcgtcaacgcaattcttgagaagcggacgcccgttttcaaaggcaagtaa

SEQ ID NO: 29035 - protein, 265 aa, Hyphomonas neptunium ATCC 15444
MSILLLEKRGPIAVMTLNRPEMMNALGQEGDGPAVAAVCAEIAADPQIRCAILTGAGRAFSAGGDVKAMKEKTGAFGGSPADIREGYRRNIHMIVRSLYNMETPLISAINGPAIGLGCDVACMADIRIASETAKMGVTFLKLGLIPGDGGAWLLPRLIGSSRAAELLFTGDVIDAKTAAEWGLVSKVVPADKLMDEAMAMAEKIAGQPPQALRLAKTLMRHGTNASYDTIMELSAASQALMHETEDHVEGVNAILEKRTPVFKGK

SEQ ID NO: 29036 - DNA, 777 bp, Hyphomonas neptunium ATCC 15444
  CDS (1)..(777): transl_table=11
atgaccgattacaagacgattacgtttgagcagaagggccgcgtagccctggtgaccctcaatcgccctgacgcgctcaatgcactgaacgctgaagttatgcaggaagtggtggattgtttcgctgcgattgatcgcaacaaggacattgccgtcagcgtcctgaccggggccgggcgggcgtttgccgctggcgctgacatcaaggaaatgcagccgcaatctttctctgacatgtatgtggaagactatttcgcaggctgggaccgttttgcggcttcgcgcaagccggttattgctgcggttaatggcttcgcgctgggcggcggatgcgaactcgcgatgatgtgtgacctgatcattgcgtctgataaagccaagttcggtcagcccgaaatcaagctcggcgtgacaccgggtatgggcggctccatccgtctgacgaaagctgtcggcaaggccaaggctatggatctcgtactcacagggcggatgattgacggcactgaagccgaccggatcggccttgtttcccgcgttgtgcctcatgatacgttgatggaggttgcactggcggcggcagaagagatcgcggcattctccgtgccttcgttgatggcggccaaggaaatggttgcccgcgcgctagaacttccgacaacggaaggggtgaaattcgaacgccgcctgttccagggcctgtttggcactgccgaccagaaagaaggcatgagcgcattcagtgagaagcgccctgcaaagtttgaggacaagtaa

SEQ ID NO: 29037 - protein, 258 aa, Hyphomonas neptunium ATCC 15444
MTDYKTITFEQKGRVALVTLNRPDALNALNAEVMQEVVDCFAAIDRNKDIAVSVLTGAGRAFAAGADIKEMQPQSFSDMYVEDYFAGWDRFAASRKPVIAAVNGFALGGGCELAMMCDLIIASDKAKFGQPEIKLGVTPGMGGSIRLTKAVGKAKAMDLVLTGRMIDGTEADRIGLVSRVVPHDTLMEVALAAAEEIAAFSVPSLMAAKEMVARALELPTTEGVKFERRLFQGLFGTADQKEGMSAFSEKRPAKFEDK

SEQ ID NO: 29038 - DNA, 774 bp, Rhizobium leguminosarum bv. viciae 3841
  CDS (1)..(774): transl_table=11
atggcctatgagaccctgatcgtcgaaacccgaggtaatgtcggcctcgtcacgctgaaccgcccgcaggcgctgaatgcgctgaattccaccgtcctgaaggaactgaaagaggcctatgccgccttccacgccgacgagacggtcggggcgatcgtgctgaccggttccgagcgcgccttcgctgccggcgcagatatcaaggagatgcagccgcttcagttcgccgatatctataagagtgatttcatcagtggctgggatgaggtcgccaaggcacgcaagccggtgatcgctgccgtcagcggctttgcgctcggcggcggctgcgagctcgccatgatgtgcgatttcatcatcgcctcggagacggcgaagttcggccagccggaaatcaccctcggcgtcattcccggcatgggcggttcgcagcggctgacgcgcgccgtcggcaaggcgaaggcgatggatcttatcctgaccggccgcatgatggatgcggcggaagccgaacgatcgggactcgtttcgcgtgtggtggcgcccgaacgtctgctcgacgaggcttttgccgcagccgaaaagatcgcttcgctgtcgcgcccctcggtgatgatggccaaggaggcggtcaaccgcgcattcgagacgacgatggaggagggattgcgtttcgagcgccgcctgtttcacagtctctttgccacggacgaccagaaggaaggcatggcggccttcgtcgagaagcgcaaacctgcttttacgcaccgttga

SEQ ID NO: 29039 - protein, 257 aa, Rhizobium leguminosarum bv. viciae 3841
MAYETLIVETRGNVGLVTLNRPQALNALNSTVLKELKEAYAAFHADETVGAIVLTGSERAFAAGADIKEMQPLQFADIYKSDFISGWDEVAKARKPVIAAVSGFALGGGCELAMMCDFIIASETAKFGQPEITLGVIPGMGGSQRLTRAVGKAKAMDLILTGRMMDAAEAERSGLVSRVVAPERLLDEAFAAAEKIASLSRPSVMMAKEAVNRAFETTMEEGLRFERRLFHSLFATDDQKEGMAAFVEKRKPAFTHR

SEQ ID NO: 29040 - DNA, 786 bp, Pseudomonas aeruginosa UCBPP-PA14
  CDS (1)..(786): transl_table=11
atgtccgccgatccttcgcccgtggttctgctcgaatttcccgcagccgatatcgccctgcttcgcctcaatcgtccgcaagccaggaacgcgctgaacgacgaagtgcgccagcgcctcgccagccacttccagacgctcggcgcggatccggcgatccgcgtcatcgtgctcaccggcgactcgcgctgctttgcagctggcgccgatctccgcgatctctcgacgagcacggcgatcggcctgtacggccgccacagcgagcgctactgggaagccatcgcgcgctgcccgaagccggtgatcgccgcggtcaacggcttcgccctgggcggcggctgcgaactggcgatgcattgcgacctgatcgtcgccggcgagtcggcacagttcgcccagccggagatcaaggtcggggtgatgccgggtgccggcggcacccagcgcctggtacgggcggtgggcaagttccaggcgctgcgcatgctgttcaccggctgcctggtgaaggctccgcaagcgctggccatgggcctggtcagcgaagtggtggcggacgagtcgacgctggcgcgcgccctggaactggccacggagatcgcccgcctgccccctctggcgctggcgcagatcaaggaggtggtcctggccggtgccgacctgccgctggacagtgccctggccctggaacgcaaggcgttccagttgctgttcgactcgcaggaccagaaggaaggcatgcacgccttcctggagaaacgcccgccgaactaccaggggaaatag

SEQ ID NO: 29041 - protein, 261 aa, Pseudomonas aeruginosa UCBPP-PA14
MSADPSPVVLLEFPAADIALLRLNRPQARNALNDEVRQRLASHFQTLGADPAIRVIVLTGDSRCFAAGADLRDLSTSTAIGLYGRHSERYWEAIARCPKPVIAAVNGFALGGGCELAMHCDLIVAGESAQFAQPEIKVGVMPGAGGTQRLVRAVGKFQALRMLFTGCLVKAPQALAMGLVSEVVADESTLARALELATEIARLPPLALAQIKEVVLAGADLPLDSALALERKAFQLLFDSQDQKEGMHAFLEKRPPNYQGK

SEQ ID NO: 29042 - DNA, 786 bp, Solibacter usitatus Ellin6076
  CDS (1)..(786): transl_table=11
atgccttacagccagatcctgttcgacgtgtccgaggccggggttgcgctgatcacgatcaatcgtccggagaagctgaatgccctctcgagcgcggtgatcggcgaactggcgcaggcgttcgcgcaggtggccggcgacccgggcattcgcggcgcgattctgacaggagccggcgagaaggccttcgtggccggcgcggacatcagtgaactggcgtcgctgacggcgtatgaagcgcgcggattcgcgctgcgcggccagggtgtgttccgcgagctggaaacctgcggcaagccctccgtggcggctgtgaatggcttcgccctgggcggcggcttggaactggcgatggcgtgtacggtgcgcttcgcgagcgagaacgcgaagctggggcagccggaagtgaagctcggaatcatcccgggctacggcggcacgcagcggctgccgcgcctggtgggccgggggcgcgcgctcgagctgctgttggccggcgacccgattccggcggcggaggcctaccgcatcggcctggtgaacgcggtgaccccgcaggcggaactgctggagtacagccggggatggctggcgaaggtgctggccaacggtccactggcgctcggtctggtgatggacgcggtggataccgggatgagctgcgggttggacgaggggctgcggcttgaggccgaggcgttcggcgtcagcgcggccaccgaagaccgccgcgaaggaacgcgcgcgtttctggagaagcgccgcgcggtatttacaggaaagtga

SEQ ID NO: 29043 - protein, 261 aa, Solibacter usitatus Ellin6076
MPYSQILFDVSEAGVALITINRPEKLNALSSAVIGELAQAFAQVAGDPGIRGAILTGAGEKAFVAGADISELASLTAYEARGFALRGQGVFRELETCGKPSVAAVNGFALGGGLELAMACTVRFASENAKLGQPEVKLGIIPGYGGTQRLPRLVGRGRALELLLAGDPIPAAEAYRIGLVNAVTPQAELLEYSRGWLAKVLANGPLALGLVMDAVDTGMSCGLDEGLRLEAEAFGVSAATEDRREGTRAFLEKRRAVFTGK

SEQ ID NO: 29044 - DNA, 792 bp, Mycobacterium avium 104
  CDS (1)..(792): transl_table=11
atgaccgacagcaccgaccgcaccttcgaaaccatcctcgtcgagcgcgaggagcgcgtcggcatcatcaccctgaaccggcccaaggcgctcaacgcgctcaacacccaggtgatgaacgaggtcaccaccgcggcaacggatttcgacgccgaccccggcatcggcgcgatcatcatcaccggatcggccaaggcgttcgccgcgggcgcggacatcaaggagatggccgagctgaccttcgccgacgcctacggcgccgacttcttcgccccctggggcaagctcgccgcgctgcgcaccccgacgatcgccgcggtggccgggcacgccctcggcggcggctgcgagctggccatgatgtgcgacgtgctgatcgccgccgacacggcgaaattcggccagcccgagatcaaactcggggtgctgcccggcatgggcggatcgcagcggctgacccgcgccatcggcaaggccaaggcgatggacctgatcctgaccggccgcaccatcgacgccgcggaagccgaacgcagcggcctggtttcgcgcgtggtgcccgccgacgacctgctgaccgaggcgaagaaggtcgccaccacgatttcgcagatgtcgcggtcggcggcccggatggccaaggaggccgtcaaccgcgctttcgaaactaccctggccgaggggctgctctacgaacgccggttgttccattcgactttcgccaccgccgaccagtccgaggggatggcggccttcgtcgagaagcgcgcgccgaacttcacccaccgctag

SEQ ID NO: 29045 - protein, 263 aa, Mycobacterium avium 104
MTDSTDRTFETILVEREERVGIITLNRPKALNALNTQVMNEVTTAATDFDADPGIGAIIITGSAKAFAAGADIKEMAELTFADAYGADFFAPWGKLAALRTPTIAAVAGHALGGGCELAMMCDVLIAADTAKFGQPEIKLGVLPGMGGSQRLTRAIGKAKAMDLILTGRTIDAAEAERSGLVSRVVPADDLLTEAKKVATTISQMSRSAARMAKEAVNRAFETTLAEGLLYERRLFHSTFATADQSEGMAAFVEKRAPNFTHR

SEQ ID NO: 29046 - DNA, 777 bp, Mycobacterium smegmatis str. MC2 155
  CDS (1)..(777): transl_table=11
atgagcgacttcgagacgatcctggtgacccgcaccgaccgggtcgccaccatccagctgaaccggcccaaggcgctcaacgcgctcaacagccaggtgatgacggaagtgaccgcggccgcagccgaactcgacaaggatccgggcgtcggcgcgatcatcgtcacgggcaacgagaaggccttcgccgcgggtgcggacatcaaggagatggcggacctgtcgttcgccgaggtcttcgaggcggacttcttcgaactgtggtccaagttcgccgccacccgcacgcccaccatcgccgcggtcgccgggtacgccctcggcggcggctgcgagctcgcgatgatgtgtgacatcctgatcgccgccgacaccgcgaaattcgggcagcccgagatcaagctcggcgtgctccccggaatgggcggttcgcaacggctcacccgcgcgatcggcaaggccaaggccatggacctcatcctcaccggacgcaccatcgacgccgccgaggccgaacgggccgggctggtctcgcgtctggtgcccgcggacacgctgatcgacgaggcgctcgcggtggcgcagaccatcgccgggatgtcgctgtcggcgtcgcgcatggccaaggaagccgtcaaccgcgcgttcgagaccagcctcaccgagggtctgctctacgagcgcaggctgttccactccgctttcgccaccgccgaccagaaagagggcatggccgcgtttgccgagaagcgcgccgccaacttcacgcatcgctaa

SEQ ID NO: 29047 - protein, 258 aa, Mycobacterium smegmatis str. MC2 155
MSDFETILVTRTDRVATIQLNRPKALNALNSQVMTEVTAAAAELDKDPGVGAIIVTGNEKAFAAGADIKEMADLSFAEVFEADFFELWSKFAATRTPTIAAVAGYALGGGCELAMMCDILIAADTAKFGQPEIKLGVLPGMGGSQRLTRAIGKAKAMDLILTGRTIDAAEAERAGLVSRLVPADTLIDEALAVAQTIAGMSLSASRMAKEAVNRAFETSLTEGLLYERRLFHSAFATADQKEGMAAFAEKRAANFTHR

SEQ ID NO: 29048 - DNA, 780 bp, Mycobacterium smegmatis str. MC2 155
  CDS (1)..(780): transl_table=11
atgaccacctacacaacgatcgcaaccagccggccggtggccggggtgggcctcatccgcctcgaccggccggacgcgctcaacgcgctcaaccagacgctcgaggccgaggtcctcgatgccgcgcgtgatttcgacgccgacctcgagatcggcgccatcgtggtgaccggttctgagcgtgcgttcgcggccggcgccgacatcgccgagatggtcaccctcaccccgcaccaggcgcgggagcgaaacctgttgtcgggctgggactctctgacgcaggtccgaaaaccgatcgtcgcggcggtcgccggctacgccctgggcggtggctgcgaactcgccatgctgtgcgacctggtcatcgcggccgacacggccagattcggccagcccgagatcaccctcggcatcctgccgggtctcggtgggacgcaacggctcacgcgggcggtcgggaaggccaaggccatggacctgtgcctgacggggcgcagcctgaccgccgaagaagccgagagggtcggcctggtcagccgcatcgtcccggccgccgatctgctcgacgaagccctcgccgtcgcgcagcgcatcgcgcgtatgtcgcgccccgcaggccgtgcggtcaaggatgccatcaacgaggcgttcgaacggccgctgtccgcgggcatgcgatacgagcgtgacgccttctacgccatgttcgacacccacgaccagaccgagggcatgaccgcgttcctggagaaacgcacgccagagttcaccgaccgctga

SEQ ID NO: 29049 - protein, 259 aa, Mycobacterium smegmatis str. MC2 155
MTTYTTIATSRPVAGVGLIRLDRPDALNALNQTLEAEVLDAARDFDADLEIGAIVVTGSERAFAAGADIAEMVTLTPHQARERNLLSGWDSLTQVRKPIVAAVAGYALGGGCELAMLCDLVIAADTARFGQPEITLGILPGLGGTQRLTRAVGKAKAMDLCLTGRSLTAEEAERVGLVSRIVPAADLLDEALAVAQRIARMSRPAGRAVKDAINEAFERPLSAGMRYERDAFYAMFDTHDQTEGMTAFLEKRTPEFTDR

SEQ ID NO: 29050 - DNA, 867 bp, Nocardioides sp. JS614
  CDS (1)..(867): transl_table=11
ttgttcccgatgacggcacaatgccggggagcgaccatcgagatcggcgaccgattcggcaaccaggacagagaggcgggtcacggcatgggtgagttcgtacgactggaggtggccgacggcgtcggcacgatccggctggaccggccgaagatgaacgccctgaacgtgcaggtgcaggaggagatccgcgcggcggccgtcgaggccaccgagcgcgacgacgtgaaggccgtggtggtgtacggcggcgagcgggtcttcgccgcgggcgccgatatcaaggagatggccgacatgtcgtacaccgacatggtcaagcgctccggcccactccagtccgcgctcggcgcggtggcccggatcccgaagcccgtggtcgccgcgatcaccggctacgcgctcggcggcggctgcgagctggcgctgtgcgcggatgtccggttcgccgccgaggacgcggtcctcggccagcccgaggtgctgctcggcatcatcccgggggccggcggcacccagcggctgacccgactggtcggcccgagcaaggcgaaggacatcgtcttcaccggccggttcgtcaaggccgacgaggcgctggcgatcggcctggtcgaccgggtcttcccggccgcgtcggtctacgacgaggcgctcgcgtgggcgggccggttcgccggggcggcgtcgtacgcactgcgggccgcgaaggagagcatcgaccgcggcatcgaggtcgacctggagacgggcctggagatcgagcggcagcagttcgcggcgctgttcgcgaccgaggaccgctcgatcggtatgcgatccttcgtcgagaacggaccgggcaaggcgcagttcgagggcaggtga

SEQ ID NO: 29051 - protein, 288 aa, Nocardioides sp. JS614
MFPMTAQCRGATIEIGDRFGNQDREAGHGMGEFVRLEVADGVGTIRLDRPKMNALNVQVQEEIRAAAVEATERDDVKAVVVYGGERVFAAGADIKEMADMSYTDMVKRSGPLQSALGAVARIPKPVVAAITGYALGGGCELALCADVRFAAEDAVLGQPEVLLGIIPGAGGTQRLTRLVGPSKAKDIVFTGRFVKADEALAIGLVDRVFPAASVYDEALAWAGRFAGAASYALRAAKESIDRGIEVDLETGLEIERQQFAALFATEDRSIGMRSFVENGPGKAQFEGR

SEQ ID NO: 29052 - DNA, 777 bp, Azoarcus sp. BH72
  CDS (1)..(777): transl_table=11
atgagcttcgagaacatcctcaccgagacccgcggccgcgtcgggctcatcaccctcaaccggccgaaggcgctcaacgcgctcaatgacgccctggtggacgaagtcggccaggcgctggacgccttcgaggccgacgagaacatcggcgcaatcgtcatcaccggttcggagaaggccttcgccgcgggcgccgacatcggcgccatggcgaccttctcgtacatggacgcctacaagggcgactacatcacccgcaactgggaacgcgtgaagacctgccgcaagccggtgatcgccgcggtggccggtttcgccctcggcggcggctgcgaactggcgatgatgtgcgacatcatcatcgccgccgacaccgcgaagttcggacaacccgaagtcaagctcggcatcctgccgggtgccggcggaacccagcgcctcccgcgcgcagtgggcaaggccaaggcgatggacatgtgcctgaccgcccgcttcatggacgccaccgaagcggaacgcgccggcctggtgtctcgcgtcgtcccggccgacacgctcgtcgatgaggcgctctcggcggctgaagccatcgccagctactcgctgccggtcgtcatgatgatcaaggaatcggtcaaccgggcattcgaaagcagcctcaacgaaggcctgctgttcgagcgccgcgtgttccacgccgccttcgcgctcaatgaccagaaagaaggcatggcggccttcgtcgccaagcgcaaagccaacttcagtcacgactga

SEQ ID NO: 29053 - protein, 258 aa, Azoarcus sp. BH72
MSFENILTETRGRVGLITLNRPKALNALNDALVDEVGQALDAFEADENIGAIVITGSEKAFAAGADIGAMATFSYMDAYKGDYITRNWERVKTCRKPVIAAVAGFALGGGCELAMMCDIIIAADTAKFGQPEVKLGILPGAGGTQRLPRAVGKAKAMDMCLTARFMDATEAERAGLVSRVVPADTLVDEALSAAEAIASYSLPVVMMIKESVNRAFESSLNEGLLFERRVFHAAFALNDQKEGMAAFVAKRKANFSHD

SEQ ID NO: 29054 - DNA, 795 bp, Azoarcus sp. BH72
  CDS (1)..(795): transl_table=11
atgacagacaaggcttacctgcccggtgagggcgtgatcgtggccggccccgatgccggcgtactcgaaatccggctggatcgtccgcaggcgaagaacgcattgtcgacgccgctgctgcgcagcatcgtcgcgctgctggagcaggcggaacacgacgacgcggtgcgctgcatcgtgctcaccggcggtgatcaggtgttcgccgccggcgccgacctggccgagatggccgccaaggacatgcaggcggtgctgctggaagagcggccccggctgttcggcgcgatcgcgcgctttcccaagcccatcatcgccgccgtgtgcggctatgcgctgggcggcggttgcgagctggtgatgcatgccgacatcgtcatcgccggcgagtcggcgcagttcggtcagcccgaaatcaatctcggcatcatccccggcgccggcggcacccagcgcctgacccgcgcggtcggcaagtcggtggcgatgaagctggtgctggcgggcgagttcatcccggcgcaggaagcgcgcgccgccgggctggtggcggaagtggtggccgacgaggcctgcatcgcacgcgcccacgagctggccggcaagatcgccaagaaggcaccgctggcggtgcggctggccaaggattcggtgctgcaggccttcgagacgccgctcgccgccgggctggcgatcgagcgccgcaacttcgtggtgctcgccggcaccgaggaccgcaacgagggcgtcaaatccttcctggaaaagcgcaagccggtctggaagggccgctga

SEQ ID NO: 29055 - protein, 264 aa, Azoarcus sp. BH72
MTDKAYLPGEGVIVAGPDAGVLEIRLDRPQAKNALSTPLLRSIVALLEQAEHDDAVRCIVLTGGDQVFAAGADLAEMAAKDMQAVLLEERPRLFGAIARFPKPIIAAVCGYALGGGCELVMHADIVIAGESAQFGQPEINLGIIPGAGGTQRLTRAVGKSVAMKLVLAGEFIPAQEARAAGLVAEVVADEACIARAHELAGKIAKKAPLAVRLAKDSVLQAFETPLAAGLAIERRNFVVLAGTEDRNEGVKSFLEKRKPVWKGR

SEQ ID NO: 29056 - DNA, 834 bp, Acidovorax sp. JS42
  CDS (1)..(834): transl_table=11
atgaaggcttgggtatattcccggcatcccacccactacaaacaggagatcaccttggcctacgaatgcatcgaagtccgcaccgaagcggacaaggtcggcatcatcacgctcgcccgtcccaagcagctcaacgcgctcaacgaccagctcatgaccgagctgggcgaggccctcaaggcgttcgacgccgacgagaagatcggctgcatcatcctgacgggcagcgagaaggccttcgccgcgggcgccgacatcggcgccatggccaagtacagctttgccgatgcgtacaagggcgactacatcacgcgcaactgggagcagatccgcagcatccgcaagcccgtcatcgcggcggtgagcggctacgccttgggcggcggctgcgagctggcgatgatgtgcgacttcatcatcgcggccgacaatgccaagttcggacagcccgaaatcaagctgggcgtgatccccggcgccggcggcacgcagcgcctgccgcgcgccgtgggcaaggccaaggccatggacatggccctcaccggccgcatgatggacgccacggaagccgagcgctccggcctcgtcagccgcgtggtgccgctggacaagctgatggaagaagccctgggcgcggccctcgtcatcagcggtttctcgcagatcgccgtgatggccgccaaggaatcggtgaaccgcgccttcgaagggactttgagcgatggcgtgatgttcgagcgccgcctgttccatgcgctgttcgccacccaggaccagaaggaaggcatggacgccttcgtgaacaagcgcgcagcagtcttcacgcaccaataa

SEQ ID NO: 29057 - protein, 277 aa, Acidovorax sp. JS42
MKAWVYSRHPTHYKQEITLAYECIEVRTEADKVGIITLARPKQLNALNDQLMTELGEALKAFDADEKIGCIILTGSEKAFAAGADIGAMAKYSFADAYKGDYITRNWEQIRSIRKPVIAAVSGYALGGGCELAMMCDFIIAADNAKFGQPEIKLGVIPGAGGTQRLPRAVGKAKAMDMALTGRMMDATEAERSGLVSRVVPLDKLMEEALGAALVISGFSQIAVMAAKESVNRAFEGTLSDGVMFERRLFHALFATQDQKEGMDAFVNKRAAVFTHQ

SEQ ID NO: 29058 - DNA, 777 bp, Exiguobacterium sibiricum 255-15
  CDS (1)..(777): transl_table=11
atgctgacgccacagtacgttaaggcgagtatcgacggtcggatcggccggatccggctgaaccgtccggagcgttacaatgccttaaaccgggcgatgatccgggaaatcgtcgaagcgatggagcggttcgatcaggatgaaacggttgcggtcatcgtcctgaacggtgaaggaaaatccttttccgccggagccgacatcgaggagatggtcgacgcaaccccggtttcgatggaattgcttgatccgtttgcggattgggaccgaatcagccggctgcataaaccgttgattgcggccgttcatggctttgtgctcggcggagggtttgaactggctctcgcctgcgacttaatctatgcgacacccgagacgcagtttgcgtttccggaggtcggactcggcgtcatgccgggagccggcgggacacaacggttgacgaaacggatcggtcggacacgggcactggaatggttgtggacgggagaccggatgccggcatcggaagcacagcaactcgggatcatcaaccggatcgtggaagcggatcagcttgaagcacatgtgttgacagtggccgagcggattgcagcgcaaccggtgatgtccgtgcgtctgattaaagatgcggttgataaagcagggaatctgtcgttgcaagacggcatggatcatgaacgacgaaatttctacttactattcgggacgaacgatcaaacggaaggcatgcaagctttcgttgaaaaacgccaaccgacattcaaaggaaactaa

SEQ ID NO: 29059 - protein, 258 aa, Exiguobacterium sibiricum 255-15
MLTPQYVKASIDGRIGRIRLNRPERYNALNRAMIREIVEAMERFDQDETVAVIVLNGEGKSFSAGADIEEMVDATPVSMELLDPFADWDRISRLHKPLIAAVHGFVLGGGFELALACDLIYATPETQFAFPEVGLGVMPGAGGTQRLTKRIGRTRALEWLWTGDRMPASEAQQLGIINRIVEADQLEAHVLTVAERIAAQPVMSVRLIKDAVDKAGNLSLQDGMDHERRNFYLLFGTNDQTEGMQAFVEKRQPTFKGN

SEQ ID NO: 29060 - DNA, 783 bp, Croceibacter atlanticus HTCC2559
  CDS (1)..(783): transl_table=11
atgaattacgaaaatattacagtagagtttaaaaataacattacctacattactataaacagacctaaaaagcttaacgcacttaatagagatactatacaagaacttcacgaagcatttactgaagcagatgaagacaaagacactaaagttgttattattacaggatctggtgataaagcttttgttgctggagcggatattagtgagtttgcagatttttctattgaaaaaggaaaagagttggctgcaaaaggacaagaacttctttttaatgtagtcgctaacttaggaacaccagttattgcagccgtaaatggatttgcacttggtggcggtttagagctagctatggcagcacactttagaatagcaagcgacaatgctaaaatgggattgccagaagtaagtttaggtgttatacctggttatggtggcacacaacgcttaccacaattggtaggaaaagggcgcgccatggaaatgattatgacagctggcatggtagatgctaaccaagcattacagtacggtcttgtaaatcatgtaacaacagcagaagagttaatgccacttgcagaaaagcttgctggcaaaatcatgaaaaactcaaccgtagccattaaagcagcaattgcagctgttaatgccaattacgaagatggtgtaaatggctttaatgtagaagtagagcaatttggaaaaagctttggaacagaagattttactgaaggaactactgcattcttaaacaaaagaaaacctgagtttccaggtaaataa

SEQ ID NO: 29061 - protein, 260 aa, Croceibacter atlanticus HTCC2559
MNYENITVEFKNNITYITINRPKKLNALNRDTIQELHEAFTEADEDKDTKVVIITGSGDKAFVAGADISEFADFSIEKGKELAAKGQELLFNVVANLGTPVIAAVNGFALGGGLELAMAAHFRIASDNAKMGLPEVSLGVIPGYGGTQRLPQLVGKGRAMEMIMTAGMVDANQALQYGLVNHVTTAEELMPLAEKLAGKIMKNSTVAIKAAIAAVNANYEDGVNGFNVEVEQFGKSFGTEDFTEGTTAFLNKRKPEFPGK

SEQ ID NO: 29062 - DNA, 780 bp, Sulfitobacter sp. EE-36
  CDS (1)..(780): transl_table=11
atgagctatcaatatatcaccaccgaaaagaagggtcacatccttgttgtgaccatgaaccgccccgaggtgtacaatgccgtgcacgtcgacatgcataatgaaatggccgattgctgggacgcttttgcagcggatcaggatctttgggtcgcggttctgaccggcgcgggggacaaggcgttctccgcggggaacgacctgaaagccaccgctgccggcgggtccaaggcgacgatgcccgccagcggctttgccggtctgtcctcgcgtttcgatctggaaaagcccatcgtcgcggccgtcaacggtttcgccatgggcggcggatttgaaacggcgctgtcatgcgacattatcctcgcctccgatcaggcgaaattcgccctgcccgaggtcaaggtcggcttctttgccgcggcttccggcgtgcagcgcctgtcgcgctatatcgggcggcttgccgcgcaagagatgatgttcaccggccgcaccatcatggccgatgaggcgctgtcgatgggctgcgtcaacgcggtctaccctgccgaccagctgatggcgaaagcgatggaaaaggccgaagagctgtgcgccgtgtcgccgtcggcggtcaaggccacgaaacgcgtcctgaacgacatgtacaagcgcgacgggatgcaggaaagcatcgcctattcgcgcgaggtgatcgcggacctcagcaaaaccgaagatttcaaggaaggcgtgaacgcctttgtcgaaaaacgcaaacccaactgggtcaataaataa

SEQ ID NO: 29063 - protein, 259 aa, Sulfitobacter sp. EE-36
MSYQYITTEKKGHILVVTMNRPEVYNAVHVDMHNEMADCWDAFAADQDLWVAVLTGAGDKAFSAGNDLKATAAGGSKATMPASGFAGLSSRFDLEKPIVAAVNGFAMGGGFETALSCDIILASDQAKFALPEVKVGFFAAASGVQRLSRYIGRLAAQEMMFTGRTIMADEALSMGCVNAVYPADQLMAKAMEKAEELCAVSPSAVKATKRVLNDMYKRDGMQESIAYSREVIADLSKTEDFKEGVNAFVEKRKPNWVNK

SEQ ID NO: 29064 - DNA, 777 bp, Roseovarius nubinhibens ISM
  CDS (1)..(777): transl_table=11
atggcctatgagacgatcatcgtcgaagtagaagaccacgtcgccctcatcaccctgaaccgccctgacgcattgaacgctctcaacgatcagttgctgagcgagctggtcaaggcgctcgaggacgcacagaacaatgacaaggtgcgctgcatcgtgatcaccggctcggaaaaggcattcgccgccggggccgacatcaagatgatgagcgagaagagctttgtcgatgtcttcgctggcgatcttttcggccccgaggccgaaggcattatgcgcatccgcaaaccgatcatcgcggccgtctccggctatgcgctgggcggcggctgcgaactggcgatgatgtgcgactttatcatctgctcggacaccgcgaaattcggccagcccgagatcaacctcggcgtcatcgccgggatgggcggcagccagcggctgacccgcttcatcggcaaatcgaaatccatggacatgaacctcaccggtcgcttcatggatgccgaagaggccgaacgctcgggtctggtgagccgcgtcgtgcccgccaagaagctgatggaagagaccatgacggcggcccagaagatcgccgagaaatccatgattgccgtgatggcggtcaaggaggcggtgaaccgctcctacgaggtgccgctgcgcgaaggtcttcttttcgagcgccgcgtcttccagtcgctctttgccaccgaagaccagaaagagggcatgtccgccttcgccgaaaaacgcgaggcccagttccgcgacaagtga

SEQ ID NO: 29065 - protein, 258 aa, Roseovarius nubinhibens ISM
MAYETIIVEVEDHVALITLNRPDALNALNDQLLSELVKALEDAQNNDKVRCIVITGSEKAFAAGADIKMMSEKSFVDVFAGDLFGPEAEGIMRIRKPIIAAVSGYALGGGCELAMMCDFIICSDTAKFGQPEINLGVIAGMGGSQRLTRFIGKSKSMDMNLTGRFMDAEEAERSGLVSRVVPAKKLMEETMTAAQKIAEKSMIAVMAVKEAVNRSYEVPLREGLLFERRVFQSLFATEDQKEGMSAFAEKREAQFRDK

SEQ ID NO: 29066 - DNA, 777 bp, Oceanicola batsensis HTCC2597
  CDS (1)..(777): transl_table=11
atggcatacgagacgattgtcgtcgaagtcgaagatcatatcgcgctggtgaaattgaaccgcccggacgcgatgaacgccctgaacaacgaccttctgggggaactggccgacgcgctcaccgcggcgcagtcgaacgacaaggtccgttgcatcgtcatcaccggaaccgagaaattcttcgcggccggcgcggatatcaagatgatgtccgacaagagctttgtcgacgttttcgccggcgatctcttcacccgcgagaccggcgcgatcctgcgggtccgcaagccgatcatcgcggcggtctgcggctatgccctgggcggcggctgcgaactggccatgatgtgcgatttcatcatcgcgggcgacaacgccaagttcggccagcccgagatcaacctcggcgtcatcgcgggcatcggcggcacccagcggctgacccgcttcgtcggcaagtccaaggcgatggacatgaacctgaccggtcgcttcatggatgccgaagaggccgagcgctccggcctcgtctcgcgcgtggtgccctgcaagaagctcatggacgaggccatgggcgccgccgccaagatcgccgagaaatcgatgatttcggtcatggcggtgaaggaagcggtgaaccgctcctacgagacgccgctggccgagggcctgctcttcgagcgccgggtcttcaattcgctcttcgcgaccgaggaccaggccgaggggatgagcgcgttcctggaaaaacgcgagccgcaattccgcgaccgctga

SEQ ID NO: 29067 - protein, 258 aa, Oceanicola batsensis HTCC2597
MAYETIVVEVEDHIALVKLNRPDAMNALNNDLLGELADALTAAQSNDKVRCIVITGTEKFFAAGADIKMMSDKSFVDVFAGDLFTRETGAILRVRKPIIAAVCGYALGGGCELAMMCDFIIAGDNAKFGQPEINLGVIAGIGGTQRLTRFVGKSKAMDMNLTGRFMDAEEAERSGLVSRVVPCKKLMDEAMGAAAKIAEKSMISVMAVKEAVNRSYETPLAEGLLFERRVFNSLFATEDQAEGMSAFLEKREPQFRDR

SEQ ID NO: 29068 - DNA, 807 bp, Erythrobacter sp. NAP1
  CDS (1)..(807): transl_table=11
atgactgagacccaaggctacgaaacgatccagattgagactaacgcccatggcaccaagggcgtcacgctgatcacgctcgatcgtcccaaggcactcaacgcgctcaattccaaggtgcttgatgagcttatgtgcgcctttgccggttatcaggcggacgatagccagctttgtgccgttatcactggctcgggcgacaaagcatttgcagcaggcgctgacatcaaggaaatgtcagaaaagcccgcttccgacttctatctcgacgacttcttctcgccgtggacctccgaaatcgtaaagaagactcgcaagccttggattgccgcggtcaacgggtttgcacttggcggcgggtgcgagcttgcgatgatggcagacttcatcatcgcttcggacaacgccaagttcggacagcccgaaatcaagctcggagttgctccgggcatgggcggctcacagcgtcttacccgcgcaatcggcaagtccaagtccatggaaatgtgcctgaccggccgcatgatgagcgcggaggaagcagagcgtgcaaacctcgtcgtgcgcgtggtgtctcaggctgatttgctcgccgagacgctcaagacggcagcaacaatcgccagcatgccgcctatggcagccatcgcgaacaaagagatggtgaatgccgcgtttgaaacgacgctcgaccagggcctgatcatggagcgccgcatcttccagatcctcaccgcaagcgaggataaggcagaaggcatggcagctttcatcgaaaagcgcgaaggaaactggaaagggcgctaa

SEQ ID NO: 29069 - protein, 268 aa, Erythrobacter sp. NAP1
MTETQGYETIQIETNAHGTKGVTLITLDRPKALNALNSKVLDELMCAFAGYQADDSQLCAVITGSGDKAFAAGADIKEMSEKPASDFYLDDFFSPWTSEIVKKTRKPWIAAVNGFALGGGCELAMMADFIIASDNAKFGQPEIKLGVAPGMGGSQRLTRAIGKSKSMEMCLTGRMMSAEEAERANLVVRVVSQADLLAETLKTAATIASMPPMAAIANKEMVNAAFETTLDQGLIMERRIFQILTASEDKAEGMAAFIEKREGNWKGR

SEQ ID NO: 29070 - DNA, 780 bp, Oceanospirillum sp. MED92
  CDS (1)..(780): transl_table=11
atgagcactccaacaaaccttaaggtgagtgaacctactaagggtgtgttaactattaccctgcaccgccctgaagcattaaatgcactgaatacgaaactgctggaagaactggcagaccttcttgatgagatccagagcaacccggaagtgggtgctgtggttattaccggttccagcaaagcatttgcagccggcgctgatgttcgtgagatggcgaccctggatgccgttggcgtactacgcgacccacgtgttgatcattggaaacgaattaccgcttttaaaaagccattgattgctgccgttaacggcttctgcctgggcggcggctgtgaactggcgatgcacgcagacattatcatcgcgggtgaagaagccaaatttggtcagcctgaaatcaaactaggcatcatgccaggtgccggcggcactcagcgcttgcttcgcgctgttggtaagtcgatggcgatgcagatggtgctaaccggcgagcctatctcagcccaacaggcgatgggcttcggtctgatctctgaaatcactattcctgaaacaactgttgaacgcgctcagaaagttgcacaacagattgctcgccacgcaccgatcgcggtggagatggcaaaagattccgtacttaaagcttttgatactgatctggcttctggcctgctctatgagcgtaaggcatttacgctgctggctgctactgaagaccgtaacgaaggtatcaacgcttttatcgaaaaacgcaaacccgctttcaaaggatgctaa

SEQ ID NO: 29071 - protein, 259 aa, Oceanospirillum sp. MED92
MSTPTNLKVSEPTKGVLTITLHRPEALNALNTKLLEELADLLDEIQSNPEVGAVVITGSSKAFAAGADVREMATLDAVGVLRDPRVDHWKRITAFKKPLIAAVNGFCLGGGCELAMHADIIIAGEEAKFGQPEIKLGIMPGAGGTQRLLRAVGKSMAMQMVLTGEPISAQQAMGFGLISEITIPETTVERAQKVAQQIARHAPIAVEMAKDSVLKAFDTDLASGLLYERKAFTLLAATEDRNEGINAFIEKRKPAFKGC

SEQ ID NO: 29072 - DNA, 768 bp, Flavobacteria bacterium BBFL7
  CDS (1)..(768): transl_table=11
atgaacaatattctagttgctacagcaaataaaattacaaccattaccattaacagacctaataaactcaatgcattaaataaagaaaccattgcagaattaagtcaagctatagatacggctgaagatgatgagaacaccagagtaatcattcttacgggtagtggagagaaagcttttgtcgctggagcagatattgcagagtttgcagatttttctccagagcaaggaaaagagcttgctgctcatggacaagagatactttttaataaggttgaaaactgttctaagcctgttattgctgcagtaaatggatttgccttaggtggtggacttgagttagcaatgtctgctcattttagaattgctagtgataatgctagagtaggattgccagaagtctctctaggagtcataccgggatatggtggtacacagcgtttaccacaattagtaggtaaaggacgtgctatggaaatgattatgactgcaggaatgatagatgctgcgacggcacattcttatggattagtaaatcacgttgtgacacaagatgaattgatttctacttgcgagaaaattgctggtaaaataatgcgtaatagtccagtagcaataggtgctgcgattgacgcggtaaatgctggttatattgatggagtcgatggttatcaggcagaaattgactgctttggtgcatcttttggaacagacgattttaaagaaggaacgactgcgtttttagagaagagaaaagctgagttttag

SEQ ID NO: 29073 - protein, 255 aa, Flavobacteria bacterium BBFL7
MNNILVATANKITTITINRPNKLNALNKETIAELSQAIDTAEDDENTRVIILTGSGEKAFVAGADIAEFADFSPEQGKELAAHGQEILFNKVENCSKPVIAAVNGFALGGGLELAMSAHFRIASDNARVGLPEVSLGVIPGYGGTQRLPQLVGKGRAMEMIMTAGMIDAATAHSYGLVNHVVTQDELISTCEKIAGKIMRNSPVAIGAAIDAVNAGYIDGVDGYQAEIDCFGASFGTDDFKEGTTAFLEKRKAEF

SEQ ID NO: 29074 - DNA, 798 bp, Oceanobacter sp. RED65
  CDS (1)..(798): transl_table=11
atgagcgctatcctacttgaaaagcacgaacatattgccaccctcacactgaatcaacctaaattacgaaactctatttcagaaatcgaggtagtcgatgcctttgtcgatgcattaaatgaggttgagcaagattcagaaattcgatgcctgatcattacaggggcaggctccgctttttctagtggtggtaatatcaaacatatgctcaacaaagagggtatgtttgctggcgacgctaacgatattcgcgaaagctacaaaagggtcatacaacgtattccgcttgccttatataacttcccattaccaaccatcgctgcagtgaacggcccggctattggtgctggatgtgatttggccatgtattgtgatatgcgaattgccagtacccatgcgaaatttgcagagagttttattaaagtcggtctcattcccggcgatggtggtgcttggattttgcctaaaatcgcaggtatatcatgtgccgctgagatggcattcactggtgaatccattgacgcacaaacagcattaaagtgggggttagttagccaagtagtcgaacctgaggcacttatgttagaggctaataatcttgcacaaagagtatcgaataatcctccgcaagcacttaaagccactaagcaattgttacgttcagctcaaaacctgaacctcgaacaaactcttgatttaagtgcagccattcaagctagcttgcatcagaccgaagatcatttggaagctgtacaagcaatgattgaaaagcgggcgccgaagtataaaggacaataa

SEQ ID NO: 29075 - protein, 265 aa, Oceanobacter sp. RED65
MSAILLEKHEHIATLTLNQPKLRNSISEIEVVDAFVDALNEVEQDSEIRCLIITGAGSAFSSGGNIKHMLNKEGMFAGDANDIRESYKRVIQRIPLALYNFPLPTIAAVNGPAIGAGCDLAMYCDMRIASTHAKFAESFIKVGLIPGDGGAWILPKIAGISCAAEMAFTGESIDAQTALKWGLVSQVVEPEALMLEANNLAQRVSNNPPQALKATKQLLRSAQNLNLEQTLDLSAAIQASLHQTEDHLEAVQAMIEKRAPKYKGQ

SEQ ID NO: 29076 - DNA, 783 bp, Desulfitobacterium hafniense DCB-2
  CDS (1)..(783): transl_table=11
atgccggaaaatagggtggtcgagcttaccgtttgtaatggagtaggggttattacaatcaataaaccgcccgtcaatgctctgaccttagaggtaagagggcaattgaaagaaaccttaaatgaagtggaaaagaacacagggattagagtcctggtcattaccggagcagggcccaagtgctttgtggccggtgcggatattaaagattttcccaatcagtttaaagaaggtccccgggaaaatgccaccatctacaaagaaatgttctcctatttggagaatacccccagacccgtgatctgcgctctcaatggccttgctttaggcggaggccttgaactggctttggcttgtgatatcagaatagcggatgaaaaggccaagctgggccttacagaagttctgctcggtctgcttccgggacttgggggcacccaaagactggcccggctggtaggaccggcgaaagcgaaagaacttttattcagcggaaaaattgtcaaagcggatgaggcccttagaatcggcttagtcaatgaagtggtccccgccggtgaatctttgaatgaagcccttaaattagctgagaagttggctaaaggggccggtatcgccatgggttacgataagttgttaatcaataaaggcttggaactcagtttagcggatgctctggaaatggaaatgcactatgtggaaaaggtttttgagacggaggatctccgtgaaggtctcgatgccttcatcaataagcgtgaagcggtatttaaaaatcgttag

SEQ ID NO: 29077 - protein, 260 aa, Desulfitobacterium hafniense DCB-2
MPENRVVELTVCNGVGVITINKPPVNALTLEVRGQLKETLNEVEKNTGIRVLVITGAGPKCFVAGADIKDFPNQFKEGPRENATIYKEMFSYLENTPRPVICALNGLALGGGLELALACDIRIADEKAKLGLTEVLLGLLPGLGGTQRLARLVGPAKAKELLFSGKIVKADEALRIGLVNEVVPAGESLNEALKLAEKLAKGAGIAMGYDKLLINKGLELSLADALEMEMHYVEKVFETEDLREGLDAFINKREAVFKNR

SEQ ID NO: 29078 - DNA, 786 bp, Alteromonadales bacterium TW-7
  CDS (1)..(786): transl_table=11
atgtctgaatcaaaaccaagtattgagttaaccacccaaggccatgttgctattttaactatgtctaacccgccagcgaatacctggacaaaagacaccttaatagatttaaaaaataaagttaacgcgcttaataacaataaaaacatttatgccttagtgctaacgggtgaaggcgataagttttttagcgcaggcgccgaccttaatgtatttgccagtggcgataaaggtattgctgcagacatgtcacgtgtatttggcgaagcatttgaagcattgaccaactttagaggtgtgtcggttgcagcaataaacgggtatgccatgggcggcggtttagaggtcgctttagcgtgtgatatacgcattgctgaacaacaagcacaaatggcactccctgaggcaaaagtcggtttattaccgtgtgcaggtggtacgcaaaatttagcatggttagtgggcgagggctgggcaaaacgcatgattttatgtggcgagcgattaaaagccgataaagcgctgcaaattggtctagtagaagacgttgttggccaaggcgaaagctttgatgctgcgcttactcttgcaaaccaagtgagtgagcaaagcccaagttcggtttcggcatgtaaaacattgattcaaaaagggcgccaccaacccatggcgagcgttttaccattagaacgcgaactatttgttggtttatttgatactgacgatcaaaaagaaggcgtaaatgcctttttagaaaagcgtaaagcaaaatgggtaaatggctaa

SEQ ID NO: 29079 - protein, 261 aa, Alteromonadales bacterium TW-7
MSESKPSIELTTQGHVAILTMSNPPANTWTKDTLIDLKNKVNALNNNKNIYALVLTGEGDKFFSAGADLNVFASGDKGIAADMSRVFGEAFEALTNFRGVSVAAINGYAMGGGLEVALACDIRIAEQQAQMALPEAKVGLLPCAGGTQNLAWLVGEGWAKRMILCGERLKADKALQIGLVEDVVGQGESFDAALTLANQVSEQSPSSVSACKTLIQKGRHQPMASVLPLERELFVGLFDTDDQKEGVNAFLEKRKAKWVNG

SEQ ID NO: 29080 - DNA, 777 bp, marine gamma proteobacterium HTCC2143
  CDS (1)..(777): transl_table=11
atgtcatacgaatattgttctgttgaacgtgaaggcaacctaacgattgtcacattaaatcgcccagaggtgatgaatgccgttcatgctttaatgagtaacgaattggataaagtctggaatgactttgaaaatgatcctgaacagtgggtcgctattgtgaccggagcaggagaacgagccttctcagcgggcaatgatcttaaatacacggcagcgggtggtggtgtaaaaggtcctgacagtggttttgcaggaataacgaatcgcttcagtatgaataaacctgtgatagctgcggttaatggcgtggcaatgggtggtggttttgaaattgctctggcagcggatattattattgcggcagaaaacgcgaagtttgcactgcctgagccccgcgtaggattggctgcgctggctggtggtatgcatcggttaccgcgaatgattccctatcaacaagcgatgggcatgatgatgacaggccgccatgttcccgcagaagagggtttgcgaatgggctttgtgaccgccgttgttgcagagggacaggcgttagcagaagctagaaaatgggcggcgcaaatactggaatgctcgcccatgtctattcgtgcaactaaggaatcggttgttgaagggcttaaacagaaagatgttgagtcggcaatggcggttacttatccggcggttaaggccttgtatggtagtgaggacttgcaggaaggtcccaaagcttttgcagaaaaacgtaagccaaactggaaaggttgttag

SEQ ID NO: 29081 - protein, 258 aa, marine gamma proteobacterium HTCC2143
MSYEYCSVEREGNLTIVTLNRPEVMNAVHALMSNELDKVWNDFENDPEQWVAIVTGAGERAFSAGNDLKYTAAGGGVKGPDSGFAGITNRFSMNKPVIAAVNGVAMGGGFEIALAADIIIAAENAKFALPEPRVGLAALAGGMHRLPRMIPYQQAMGMMMTGRHVPAEEGLRMGFVTAVVAEGQALAEARKWAAQILECSPMSIRATKESVVEGLKQKDVESAMAVTYPAVKALYGSEDLQEGPKAFAEKRKPNWKGC

SEQ ID NO: 29082 - DNA, 789 bp, marine gamma proteobacterium HTCC2080
  CDS (1)..(789): transl_table=11
gtgattacgagcccctcggataaaataaaagtaagtgttgacggacacgtagcgactctgaccatcgacaaccctgccgctaacacctgggacactgagagtctcccagctctgggcgcgattgttgaagcgcttaacgcggatgaccagatctatgcactggtgctcactggggctggtgaaaagtttttctctgcgggtgcagacctgaaattgtttgccgatggtgaccccgaaacggcgcgggttatgggcgaagccttcggagcggcctttgaggcgctatcagatttccgcggtgtctcggttgccgctattaacggctttgcgatgggaggcggcctcgaggtcgcgatggcttgtgacattcgtgtggtcgagacccaagccaaactggctttgcccgaggctaccgttggcttactaccctgtgccggcggcactcagcgcctcacccaattggtgggccaagggtgggctaaacgcatgattttatgcggtgagcgaatcagtgccgacaaagcgttggctattggattggtagaagaagttgttgcgacgggcgaagcccttgcggtagcaacccgcttggccacgagtgcgggtgcccaaagccctacctctgtcactgcctgcaagcgacttattcatgcggctcgggatatcaccattgctggcgggttagctgcggagcgaactgaatttgtcgcattgtttagcaccgaggaccaaagagagggggtgaatgcgtttttagaaaagcgtaagcccgactggaaaaatcgttag

SEQ ID NO: 29083 - protein, 262 aa, marine gamma proteobacterium HTCC2080
MITSPSDKIKVSVDGHVATLTIDNPAANTWDTESLPALGAIVEALNADDQIYALVLTGAGEKFFSAGADLKLFADGDPETARVMGEAFGAAFEALSDFRGVSVAAINGFAMGGGLEVAMACDIRVVETQAKLALPEATVGLLPCAGGTQRLTQLVGQGWAKRMILCGERISADKALAIGLVEEVVATGEALAVATRLATSAGAQSPTSVTACKRLIHAARDITIAGGLAAERTEFVALFSTEDQREGVNAFLEKRKPDWKNR

SEQ ID NO: 29084 - DNA, 792 bp, Pseudomonas putida GB-1
  CDS (1)..(792): transl_table=11
atgactttccagcacatcctgttttccatcgaggacggcgttgccctcctttcattgaaccgccccgagcaactgaacagctttaacaccgccatgcacatggaggtgcgcgaagcactcaagcaagtacgccagagcagtgaagcgcgggtgctgttgcttacggctgaaggccggggcttctgcgccggccaggacctgtccgaccgcaacgttgcccccggcgccgaaataccggacctgggcgagtcgatcgacaagttctacaacccgctggtgcgcaccctgcgcgacctgccgctgccagtgatctgtgcggtcaacggcgtggctgccggcgctggcgcaaatatcccgctggcctgcgatctggtgctggccgcccgctccgccagcttcatccaggccttctgcaagatcggcctggtgccggactctggcggcacctggctgctgccgcgcctggttggcatggcgcgggccaaggccctggccatgctgggtgagcgccttggcgccgagcaggcccagcaatgggggctgatccaccgggtggtggatgatgctgcactgcgagacgaagccctcgccctcgcccgccagctcgccacccagcccacctacggcctggccctgatcaagcgcagcctcaatgccagtttcgataatgggtttgacgagcagctggagctggagcgcgacctgcagcgcctggccgggcgcagcgaggactaccgcgaaggcgtgagtgccttcatgaacaagcgcacgccagttttcaaggggcgctga

SEQ ID NO: 29085 - protein, 263 aa, Pseudomonas putida GB-1
MTFQHILFSIEDGVALLSLNRPEQLNSFNTAMHMEVREALKQVRQSSEARVLLLTAEGRGFCAGQDLSDRNVAPGAEIPDLGESIDKFYNPLVRTLRDLPLPVICAVNGVAAGAGANIPLACDLVLAARSASFIQAFCKIGLVPDSGGTWLLPRLVGMARAKALAMLGERLGAEQAQQWGLIHRVVDDAALRDEALALARQLATQPTYGLALIKRSLNASFDNGFDEQLELERDLQRLAGRSEDYREGVSAFMNKRTPVFKGR

SEQ ID NO: 29086 - DNA, 774 bp, Pseudomonas putida GB-1
  CDS (1)..(774): transl_table=11
atgccgcgatatctcgctgtgcaggcgcccgaacacggcgttcagctcattaccttgcaacggcccgaggccttgaatgccctgtgcaccgagctactggcagaactggctgctgcgttacaggcagccgctggcgacgaacagatcggcgctgttgtgattaccggcagcgccaaggcattcgctgcaggtgccgacatccgggaaatggccgagcgcgacctggtcggcatactcaatgatccgcgcgtagcccactggcaaagcatcgcggcattcaccaagccattgattgccgctgtcaatggttacgccttgggtggcggttgcgaactggtgatgtgcgccgacatcgtcatcgctggcaccgatgcccgcttcggccagccagaaatcaacctcggcatcattcccggtgccggcggcacccagcgcctgttgcgtgccgtcggtaagccgctggccatgcagatggttctgaccggtgaagcaatcaccgctcgccacgcccagcaggcgggccttgtcagcgaaatttcccagcccgaacttaccgtcgagcgcgccatgcgggtcgcccgcagcatcgctgccaaggcgccgcttgccgtgcgcctggccaaggaggcgctactgaaggccggtgataccgacctggccagtggcctgcgcttcgaacgccatgcgttcaccttgctggccggtaccgccgaccgggacgaaggcatccgggcctttcaggaaaagcgccaggctcgtttccagggccgctaa

SEQ ID NO: 29087 - protein, 257 aa, Pseudomonas putida GB-1
MPRYLAVQAPEHGVQLITLQRPEALNALCTELLAELAAALQAAAGDEQIGAVVITGSAKAFAAGADIREMAERDLVGILNDPRVAHWQSIAAFTKPLIAAVNGYALGGGCELVMCADIVIAGTDARFGQPEINLGIIPGAGGTQRLLRAVGKPLAMQMVLTGEAITARHAQQAGLVSEISQPELTVERAMRVARSIAAKAPLAVRLAKEALLKAGDTDLASGLRFERHAFTLLAGTADRDEGIRAFQEKRQARFQGR

SEQ ID NO: 29088 - DNA, 774 bp, Pseudomonas putida GB-1
  CDS (1)..(774): transl_table=11
atggcattcgaaaccatcctgttggacatccacggcaaggtcggcctgatcaccctcaaccgcccgcaagccctcaatgcgctgaacgcgcagattgtcggcgagatcaaccaggcccttgaccagctcgagcgtgacccgaatatcggttgcgtggtgctgacaggttcggccaaggcctttgccgctggcgccgacatcaaggaaatggccgaactgcaatacccgcagatctacgtcgacgacctgttcagcgatgctgaccgcattgccaaccggcgcaagccgatcatcgcggcggtctccggcttcgcgctgggcggcggctgcgagttggcgatgatgtgtgactttatcctcgccgccgacaacgccaagttcggtcaaccggaaatcaaccttggcgtgttgccgggcatgggcggtacccagcgtctgacccgtgccgtgggtaaggccaaggccatggaactgtgcctgactggccgcctgatgggggctgaagaggctgagagggctggcttggtggcgcgaatcgtgccgcaggcggagttgctggaagaggcgcttaaggtggctgcgaccattgccagcaaatcgatcccggtgagcatgatggtcaaggagagcgttaaccgagcgtttgaagttaccctcagcgagggcgtgcgctttgaacgccgggtcttccatgcggctttctccactgaagaccaaaaagaaggcatggccgccttcatcgccaagcgcgaggcgcagttcaaggatcgttga

SEQ ID NO: 29089 - protein, 257 aa, Pseudomonas putida GB-1
MAFETILLDIHGKVGLITLNRPQALNALNAQIVGEINQALDQLERDPNIGCVVLTGSAKAFAAGADIKEMAELQYPQIYVDDLFSDADRIANRRKPIIAAVSGFALGGGCELAMMCDFILAADNAKFGQPEINLGVLPGMGGTQRLTRAVGKAKAMELCLTGRLMGAEEAERAGLVARIVPQAELLEEALKVAATIASKSIPVSMMVKESVNRAFEVTLSEGVRFERRVFHAAFSTEDQKEGMAAFIAKREAQFKDR

SEQ ID NO: 29090 - DNA, 795 bp, Pseudomonas putida GB-1
  CDS (1)..(795): transl_table=11
atgaccaccccgtcgtcgtcactgttgagcaacgtcgaagccggcgttgcctggatcaccctcaaccgccccgagcagcgcaacgcgctggatatcccaaccctcaagcaactgcatgccttgctcgacagccataacggcgacccggcggtacgcgtggtggtactcaccggcagcgggcgcagtttctgcgccggcgccgatctggccgaatgggctgccgccgaagccgcaggcaccctggaaagctacggctggaccgaaaccgcccatgctctgatgttgcgcctgcacagcctcgccaaacccaccatcgccgccatcaacggcaccgccgtgggcggtggcatggacctcagcctgtgctgcgacctgcgcatcgccgccgcctcggcgcgtttcaaggccggctacaccagcatgggctacagccccgatgccggcgccagctggcacctgccacggctgatcggcagcgagcaggccaagcgtttgttgttcctcgatgaactgtggggcgccgagcgcgccctggcggctgggctggtcagtgaagtctgtgccgacgagcaactgcccgccgtggccgccgagttggccgggcgcctggcctgcggcccgaccttcgcctttgcgcagaccaagcaactgatgcgtgacggcgcccggcgcaccctggccgagcagctggaagccgagcgccacgccggcctgttgtgcggccgcagccaggatggcgtcgaggcgctgcaagcctcggttgaacgccgcgccccccgtttcatcggccagtaa

SEQ ID NO: 29091 - protein, 264 aa, Pseudomonas putida GB-1
MTTPSSSLLSNVEAGVAWITLNRPEQRNALDIPTLKQLHALLDSHNGDPAVRVVVLTGSGRSFCAGADLAEWAAAEAAGTLESYGWTETAHALMLRLHSLAKPTIAAINGTAVGGGMDLSLCCDLRIAAASARFKAGYTSMGYSPDAGASWHLPRLIGSEQAKRLLFLDELWGAERALAAGLVSEVCADEQLPAVAAELAGRLACGPTFAFAQTKQLMRDGARRTLAEQLEAERHAGLLCGRSQDGVEALQASVERRAPRFIGQ

SEQ ID NO: 29092 - DNA, 843 bp, Pseudomonas putida GB-1
  CDS (1)..(843): transl_table=11
atgaacctttcacccgcaggagtgccgcccgtgaccgagtacagtgcattcaaggtcgaactgaccgacaacatcgcccacgttcagatcaaccgcccggaaaaggtcaacgcgatgaacgcggccttctgggatgagatcgtcgaaatcttccagtggatcgacgacaccgatgccgtgcgcgccgtggtagtcagcggtgccggcaagcacttctctgccggtatcgacctgatgatgctggcgtccctggccgggcagatgggcaaggacgtgggccgcaatgcgcgtttcctgcgcaagaccatccagcgcctgcaggcctcgttcactgccgtggacaagtgccgcaagccagtactggccgccgtgcagggctattgcatcggcggcgctatcgaccttgtctcggcctgcgacatgcgttactgcagcgttgatgcgcagttttcgatcaaggaaatcgacatgggcatggcggccgatgtcggtacactgcaacgtttgccacgtatcatcggcgacggcatgatgcgtgagctggccttcaccgggcgcaatgtggcggccgacgaggcgctgcgcataggcctggtcaaccgggtttatgatgatcaggccgcactgatggacggtgtctttgccatcgcccgcgaaattgccgcaaaatcgccaatcgccgtggccggcaccaaggaaatgctcagctacatgcgtgaccatcgcatcgacgatggcctggactacatcgccacctggaacgccgcgatgctgcaatccgaagacttgcgcgtggccgtggcggcgcacatgagcaaacaaaaaccgacgttcgccgactga

SEQ ID NO: 29093 - protein, 280 aa, Pseudomonas putida GB-1
MNLSPAGVPPVTEYSAFKVELTDNIAHVQINRPEKVNAMNAAFWDEIVEIFQWIDDTDAVRAVVVSGAGKHFSAGIDLMMLASLAGQMGKDVGRNARFLRKTIQRLQASFTAVDKCRKPVLAAVQGYCIGGAIDLVSACDMRYCSVDAQFSIKEIDMGMAADVGTLQRLPRIIGDGMMRELAFTGRNVAADEALRIGLVNRVYDDQAALMDGVFAIAREIAAKSPIAVAGTKEMLSYMRDHRIDDGLDYIATWNAAMLQSEDLRVAVAAHMSKQKPTFAD

SEQ ID NO: 29094 - DNA, 777 bp, Marinobacter sp. ELB17
  CDS (1)..(777): transl_table=11
atgatgccgcagatactgctatcagaagggccaactaacggcgttcgccttctaacgcttaatcgtcccgaagctctcaacgcactcaataccgcactgctcgaggcgctgagcgaacaactcgatattgcagaaaccgaccctgaaaccaaagccgtcgttattaccgggagtgagcgcgcgtttgccgccggtgccgatatcaacgagatggcctcccgcgatgttgttggaatgctggaagaccctcgtgtccaacactgggcgcgcatagaccgctttgttaaaccgctgattatcgccgtgaacgggttctgcttgggcggcggctgtgagctcgcaatgcggggtgacattcttattgccggcaccaacgcccagtttggccaacctgaaatcaacctcggcattatgcccggcgccggcgggacccagcgcctggtgcgagcggtggggcaatcattggcgatgcagatggttctcaccggggaagctatcggcgcccaaagagcactcgcagccggtttaatcaccgaaatctgccaaccggaacttacggttgaacgcgccatggcgatcgccaccacgattgcatccaaaggccctattgccgtgcagctagcgcgcgagtcggtgcgccggggtgcggatatggaccttgctgccggcctgcgatttgagcgtcacgcgtttaccattctggccgcaacagaagaccgccgcgaaggtctggatgcgtttcgcaacaagcgcaagccccagttcagcggacgctga

SEQ ID NO: 29095 - protein, 258 aa, Marinobacter sp. ELB17
MMPQILLSEGPTNGVRLLTLNRPEALNALNTALLEALSEQLDIAETDPETKAVVITGSERAFAAGADINEMASRDVVGMLEDPRVQHWARIDRFVKPLIIAVNGFCLGGGCELAMRGDILIAGTNAQFGQPEINLGIMPGAGGTQRLVRAVGQSLAMQMVLTGEAIGAQRALAAGLITEICQPELTVERAMAIATTIASKGPIAVQLARESVRRGADMDLAAGLRFERHAFTILAATEDRREGLDAFRNKRKPQFSGR

SEQ ID NO: 29096 - DNA, 798 bp, Erythrobacter sp. SD-21
  CDS (1)..(798): transl_table=11
atgagcccagaacccgcaagctacgaaaccatcaccgtcgaacagcgtgacgcggttacgctgatcaccttgaaccgccccaaggcgctcaacgcactcaattcgaaagtgctcgaggaattgatcgaggctttggccgcctaccaggccgacagcagccagctgtgcgcagtgcttaccggctcgggcgacaaggcctttgccgccggcgccgacatcaaggaaatgagcgagaaggacgcggccgacttctatctcgacgatttctttgcgccctggaccagcgagatcgtgaaaaagacccgcaagccatggatcgctgcggtcaacggcttcgcgctcggcggcgggtgcgaacttgcgatgatgtcggacttcatcatcgcttcggaaaacgccaagttcggtcagcccgaaatcaagctaggcgttgcgccgggcatgggcggatcgcagcgcctcaccaaggccatcggcaaatcgaaagccatggaaatgtgcctgacgggccgcatgatgggcgccgaggaagccgaacgcagtaacctcgtcgcgcgcgtggtgccgcatgacgatttgctcgaagacgccctgaagaccgcggcccagattgcttcgatgccaccgatggccgccatcgcgaacaaggagatggtcaacgccgccttcgaaaccagtctcgaccagggcctgatcatcgaacgccgcatcttccaaatcctcaccacgagcgaggacaagaaggaagggatggccgccttcgtcgaaaagcgcgagggcaagtggactgggaggtaa

SEQ ID NO: 29097 - protein, 265 aa, Erythrobacter sp. SD-21
MSPEPASYETITVEQRDAVTLITLNRPKALNALNSKVLEELIEALAAYQADSSQLCAVLTGSGDKAFAAGADIKEMSEKDAADFYLDDFFAPWTSEIVKKTRKPWIAAVNGFALGGGCELAMMSDFIIASENAKFGQPEIKLGVAPGMGGSQRLTKAIGKSKAMEMCLTGRMMGAEEAERSNLVARVVPHDDLLEDALKTAAQIASMPPMAAIANKEMVNAAFETSLDQGLIIERRIFQILTTSEDKKEGMAAFVEKREGKWTGR

SEQ ID NO: 29098 - DNA, 783 bp, unidentified eubacterium SCB49
  CDS (1)..(783): transl_table=11
atgagtttttcaaatattctaagtacatctactaacggaatcgcaaccatcacgattaacagaccttctaagttaaacgctttaaatagtgtcacgattaaagagttgcacgatgcttttgacgcggcagatgaagatcaaagcgttaaagtgattattattacaggtagtggtgagaaagcttttgttgcaggagcagacatcagtgagtttgcagattttagcgaagcagaaggcggaaaactagcggcgcaagggcaagctttattgtttgattttgtcgcaaatttaagcactccagttattgcagccgtaaacggttttgcattgggtggtggtcttgagttagcaatgtcagcacattttagagtagccagtgataacgcaaaaatgggattgccagaagtgtctctaggagtgattcctggatatggaggtacacaacgcttaccacaattagtaggtaaagggcgtgctatggaaatgataatgaccgcaggaatgattgatgcaaacaaagcattagattatggcttagtaaaccacgtaactacactagaagaacttatcccttttgtagaaaaaatagcaagtaaaattatgcgcaactcgccagttgctataagtgccgctatttctgcaattaacgcaggctttgaaaatggcgtagatggttttaaagccgaaataacagcgtttggtaactgttttggtaccgaagactttgcagaaggaacacaagcatttttaaacaaaagaaaagcagaatttcctggaaaatag

SEQ ID NO: 29099 - protein, 260 aa, unidentified eubacterium SCB49
MSFSNILSTSTNGIATITINRPSKLNALNSVTIKELHDAFDAADEDQSVKVIIITGSGEKAFVAGADISEFADFSEAEGGKLAAQGQALLFDFVANLSTPVIAAVNGFALGGGLELAMSAHFRVASDNAKMGLPEVSLGVIPGYGGTQRLPQLVGKGRAMEMIMTAGMIDANKALDYGLVNHVTTLEELIPFVEKIASKIMRNSPVAISAAISAINAGFENGVDGFKAEITAFGNCFGTEDFAEGTQAFLNKRKAEFPGK

SEQ ID NO: 29100 - DNA, 792 bp, butyrate
  CDS (1)..(792): transl_table=11
atggaattcgtaacatatgaacaggacggatttgttggtgttatcactattaatcgtccaaaggcattaaacgcattaaacagcacagttcttgaagaactggatgcaacattcaaagctgttgacctgaatacaacaagatgtcttgtacttaccggtgcaggagagaaatcatttgtagcaggtgcagatatcggagagatgtcaacacttacaaaggctgaaggcgaagctttcggtaaaaagggtaatgacgtattccgcatgatcgagacattcccaatccctgtaatcgcagccgtaaatggatttgcacttggtggtggatgtgagatctccatgagctgtgatatcagaatctgttctgagaacgcagtatttggtcagcctgaagttggccttggaatcacacctggatttggcggaacccagagacttgcccgtcttgtaggtgcaggaatggcaaagcagctgatctacacagcaagaaatatcaaagctgatgaagcatacagaatcggtcttgtaaatgctgtatatccattagaggagttattaccggcagctaagaagatggcttctatcatcgcagcaaatgctccgatcgcagttcgtaactgtaagaaagcaatcaatgatggattacaggttgatatggatcaggcaatcgttgtagaagagaaattattcggcgattgcttcgagacagaggatcagaaggcaggaatgggcaacttccttgagaaagataaggaaaagaaattaaaggttgttcctttccagaataaataa

SEQ ID NO: 29101 - protein, 263 aa, butyrate
MEFVTYEQDGFVGVITINRPKALNALNSTVLEELDATFKAVDLNTTRCLVLTGAGEKSFVAGADIGEMSTLTKAEGEAFGKKGNDVFRMIETFPIPVIAAVNGFALGGGCEISMSCDIRICSENAVFGQPEVGLGITPGFGGTQRLARLVGAGMAKQLIYTARNIKADEAYRIGLVNAVYPLEELLPAAKKMASIIAANAPIAVRNCKKAINDGLQVDMDQAIVVEEKLFGDCFETEDQKAGMGNFLEKDKEKKLKVVPFQNK

SEQ ID NO: 29102 - DNA, 786 bp, Medicago truncatula
  CDS (1)..(786)
atgtcatcgcagaagctgatactcgtcaaccgcgaaccaaaaggaatcgcggtggtgactattaaccgtcctgattctcttaactcgctaactcgtgcaatgaacgtggacctggctcaagcttttaagagtctagaccgggacgaatcggttcgggtgattatattaaccggaactggtagatcgttctgttctggcgttgacctcacggcagcggaggatgttttcaagggtgatgtgaaggatccggaaagtgacccggttgtgcaaatggagcggtgtcataaaccgataattggagcgattaaaggatttgctgttaccgctggatttgagattgcacttgcttgtgatattttggttgctgctaaaggcgccaaattcatggatactcacgctagatttgggatatttccttcatggggattgtctcagaagctttcacgcattataggagtaaataaagcccgtgaggtatcacttacggccacgcctttgactgcagaggtagctgaaaagttgggtttggtgaaccatcttgttgaagatggtgaactgatgaagaaaagcagagaaattgcggaagccattgcgaaaaatagtcaagacatggttttgaggtacaagtcagtgataaatgatggcatcaagctggatcttggccgtgctctttccctcgaaaaggagaggggccatgcctattataatggaatgacgaaggagcaattcaagaaaatgcaggaattcatagcaggaagaagttccaagaaacagtccaaactatag

SEQ ID NO: 29103 - protein, 261 aa, Medicago truncatula
MSSQKLILVNREPKGIAVVTINRPDSLNSLTRAMNVDLAQAFKSLDRDESVRVIILTGTGRSFCSGVDLTAAEDVFKGDVKDPESDPVVQMERCHKPIIGAIKGFAVTAGFEIALACDILVAAKGAKFMDTHARFGIFPSWGLSQKLSRIIGVNKAREVSLTATPLTAEVAEKLGLVNHLVEDGELMKKSREIAEAIAKNSQDMVLRYKSVINDGIKLDLGRALSLEKERGHAYYNGMTKEQFKKMQEFIAGRSSKKQSKL

SEQ ID NO: 29104 - DNA, 777 bp, Magnetospirillum gryphiswaldense
  CDS (1)..(777): transl_table=11
atgccctacgaaaatatcatcgtcgaaacccgcggccaggtcggcctgatcaccttgaaccgccccaaggcgctgaacgccttgtgcgccgcgctgatcaaggaattgggccaggcgcttgacgccttcgaggccgatggcgaaatcggcgccgtggtgctgaccggctcggaaaaggccttcgccgccggggccgacatcaaggaaatgcagtccaagacctatatggacgcctatctggccgatttcatcaccaatggctgggaacgcatcaccacctgccgcaagccgatcatcgccgccgtcgccggctatgccctgggcggcggctgtgaagtgtcgatgatgtgcgatttcatcctggccgccgacaatgccaagttcggtcagccggaaatcaccatcggcaccattcctggtgccggcggcacccagcgcctgacccgcgccgtcggcaaggccaaggccatggaaatgtgcctgaccgggcgcatgatggacgccgccgaggccgagcgcgccggtctggtcagccgcgtcattcccgccgccgacctgcttgacgaagccttgaaggtggccgaccgcatcgcgtcgatgtcccgtccggtggtcatgctggccaaggaatcggtcaacgccgccttcgagaccaccctggcccagggcatcaagttcgagcgccgtctgttccattccaccttcgcctgcgaagaccagaaggaaggcatggccgctttcgccgaaaagcgcagcccggtgttcaagaaccgctga

SEQ ID NO: 29105 - protein, 258 aa, Magnetospirillum gryphiswaldense
MPYENIIVETRGQVGLITLNRPKALNALCAALIKELGQALDAFEADGEIGAVVLTGSEKAFAAGADIKEMQSKTYMDAYLADFITNGWERITTCRKPIIAAVAGYALGGGCEVSMMCDFILAADNAKFGQPEITIGTIPGAGGTQRLTRAVGKAKAMEMCLTGRMMDAAEAERAGLVSRVIPAADLLDEALKVADRIASMSRPVVMLAKESVNAAFETTLAQGIKFERRLFHSTFACEDQKEGMAAFAEKRSPVFKNR

SEQ ID NO: 29106 - DNA, 780 bp, Magnetospirillum gryphiswaldense
  CDS (1)..(780): transl_table=11
atgaccgcttacgaaaacatcctagtggaaacccatggaaaagtcggcctgatccggctgaaccgcccgcaggcgctgaacgccctgtccaccccgctgttcattgatctggcccaggccctggatgcgttccaggctgacgacggcatcggctgcatcgtcctgaccggctcgcccaaggccttcgccgccggggcggatatcaaggaaatgaaggatctgtccttcatggacgtctatttccaggatttctgcaacaccggctggacccatgtgaccactatcaggaagccggtgatcgcggcggtggccggctatgccctgggtggcggttgcgagttggcgatgatgtgcgatttcatcatcgccgccgacaacgccaaattcggtcagccggaaatcaatctgggcaccatgcccggtgccggcggctcgcagcgcctgacccgcgccgtcggcaaggccaaggccatggagatgtgcctgaccggtcggcagatggatgccgccgaggccgagcgggccggtctggtcagccgcatcgtgcccctggccgatctggaggcggaagccctgaaggcagcggaaaagatcgcgtcgctgtcgctgccggtgaccatgatggtcaaagaggcggtcaatgccgcctttgaaaccactctggccgaaggcgtgcgctttgagcgccgtttgttccattccaccttcgccatccttgaccgcaaggaaggcatggccgctttcgccgaaaagcgaccggccaatttcatcaatcgctga

SEQ ID NO: 29107 - protein, 259 aa, Magnetospirillum gryphiswaldense
MTAYENILVETHGKVGLIRLNRPQALNALSTPLFIDLAQALDAFQADDGIGCIVLTGSPKAFAAGADIKEMKDLSFMDVYFQDFCNTGWTHVTTIRKPVIAAVAGYALGGGCELAMMCDFIIAADNAKFGQPEINLGTMPGAGGSQRLTRAVGKAKAMEMCLTGRQMDAAEAERAGLVSRIVPLADLEAEALKAAEKIASLSLPVTMMVKEAVNAAFETTLAEGVRFERRLFHSTFAILDRKEGMAAFAEKRPANFINR

SEQ ID NO: 29108 - DNA, 915 bp, Vitis vinifera
  CDS (1)..(915)
  misc_feature (804)..(804): r is g or a
atgggtgtgttcgctatatctctctatcaccactgccgcagaaatttctcattcaactaccattaccagagttgtagaactctcatattgcagtctgcttttgaatcagttagagtccagagactttcccacgacgattctgaaatccaatctgattcaactaccgaactgagtatttttccaggtattgttgaggttcacttggatcggcctgaagccaagaatgccattgggaaggagatgctgagaggcttgcaaaacatttttgaagctattaacagagacgcgtctgctaatgttgtcatgctaagtagttcagttcccagggtattctgtgcaggtgctgatttgaaggggctttacaggtgtaaagaatgggcctttcttcgtgaggaaattgtagaaactagaaaggcactccatgttcctactattgctgttattgaaggagcagcactgggtggtgggctagaaatggctctatcatgtgatcttcggatttgtggagaagatgcggtattgggcttaccagaaacaggacttgctataattcctggggctggtggaactcaaagactttcaagattggttggaaaatcaattgcaaaggaactcatattcactggtcggaaagttggtggcagggatgcaatgtcagtaggattagtcaattactgtgttcctgctggtgaagctcatttgaaggcacttgaaattgctcagcatataaatcagaagggtccattagcattgcggatggcaaaacgagctatcaatgaggggctcgagttagatatggaatcrgctttggcattggaagaagagtgttatgaacaacttctgaacacaaaagatcgcttagaaggtttggcagcctttgccgagaagcggaagcccagatataatggtgaataa

SEQ ID NO: 29109 - protein, 304 aa, Vitis vinifera
MGVFAISLYHHCRRNFSFNYHYQSCRTLILQSAFESVRVQRLSHDDSEIQSDSTTELSIFPGIVEVHLDRPEAKNAIGKEMLRGLQNIFEAINRDASANVVMLSSSVPRVFCAGADLKGLYRCKEWAFLREEIVETRKALHVPTIAVIEGAALGGGLEMALSCDLRICGEDAVLGLPETGLAIIPGAGGTQRLSRLVGKSIAKELIFTGRKVGGRDAMSVGLVNYCVPAGEAHLKALEIAQHINQKGPLALRMAKRAINEGLELDMESALALEEECYEQLLNTKDRLEGLAAFAEKRKPRYNGE

SEQ ID NO: 29110 - DNA, 1011 bp, Vitis vinifera
  CDS (1)..(1011)
  misc_feature (195)..(195): w is a or t
  misc_feature (643)..(643): k is g or t
atggcccaaattgccaacaaggacctcaacgccaacgcccgcagaagactcgcttctgtcgcccaccacctcactccgcttcattccactactcccaattgctcttcgcttgggttccataccacctccgccccagacagctaccgccgtgtacacggtgaggtccccactcacgacgttacttggaatcccgcwtgcgatgagtccggcaaggcgttcaccgacattatctacgagaaagcggtcggagaagccattgccaagattacgattaaccggccagagagaagaaatgccttcagacccaatacggtaaaggagctcattcgcgcattcaatgatgccagagatgatagttcagtgggagtcatcatctttactgggaaggggaccaaggcattttgtagtggtggggatcaagcatttagaggcagagacggctatgctgatcatgatgattttggtcgcctcaatgttctagatttacagatgcagattcggcgtcttccaaaacccgtcattgcaatggtagcaggttatgccgttggagggggacatgtgttgcacatggtctgtgatctcacaattgctgcagataatgccatttttggtcagactggtcctaaggttggaagctttgatkctgggtatggaagttccatcatgtcccgtttgattgggcctaagaaagcacgtgaaatgtggtttacggcaaggttctacacagcttcagaggcagagaaaatgggtcttgtcaatattgttgtaccattggagaatttagaaaaagagacagttaaatggtgtagggagattctcaggaacagcccaactgcaatccgggtgctgaaatcagctcttaatgcagttgatgatggccatgctggactccaggagcttggtggaaatgctaccttcatattttatggcaccgaggaaggtaacgaggggaagacagcatacttggaacgacggcccccagacttctcaaaatttccccgacgaccttga

SEQ ID NO: 29111 - protein, 336 aa, Vitis vinifera
  misc_feature (215)..(215): The Xaa at location 215 stands for Ala, or Ser.
MAQIANKDLNANARRRLASVAHHLTPLHSTTPNCSSLGFHTTSAPDSYRRVHGEVPTHDVTWNPACDESGKAFTDIIYEKAVGEAIAKITINRPERRNAFRPNTVKELIRAFNDARDDSSVGVIIFTGKGTKAFCSGGDQAFRGRDGYADHDDFGRLNVLDLQMQIRRLPKPVIAMVAGYAVGGGHVLHMVCDLTIAADNAIFGQTGPKVGSFDXGYGSSIMSRLIGPKKAREMWFTARFYTASEAEKMGLVNIVVPLENLEKETVKWCREILRNSPTAIRVLKSALNAVDDGHAGLQELGGNATFIFYGTEEGNEGKTAYLERRPPDFSKFPRRP

SEQ ID NO: 29112 - DNA, 804 bp, Amycolatopsis orientalis
  CDS (1)..(804): transl_table=11
atgagctacacccgggtgcggtacgagaagaaggatcacgtcgcctgcgtgacgatggaccggcccgacgtgctgaacgcgatggaccggcggatgcacacggagctcgccgagatctgggatgacgtcgaggccgatgacgacatcagggcggttgtactgaccggcgcgggaaatcgcgcgttcaccgtcggccaggacctcaaggaacgcgcgcaacgcaacgacgcgggcgaggaagagtcgacgttcggcagccggggccaggcaggccatccccggctgaccgaccgtttcacgctctccaagcccgtggttgcccgggtacacggctacgcgctgggcggcggcttcgagctcgtgctcgcctgcgacatcgtgatcgcctcagaggaggcgatattcggcctgccggaggtccaactcggcctgatccccggggcgggcggcgtgttccggctgccgcggcagctgccgcagaaggtcgcgatgggctacctgctgaccgggcgacggatggatgcggcgacagcgcttcgatacggactggtgaacgaggtcgtgccgctggatgagctggatcagtgcgtcgccggatggaccgacagcctcgtgcgcgccgcgccgctctcggttcgcgcgatcaaacaggccgcgttgcggtcgctcgacctcccactcgaggaggcattcaccgcctcgtatccgtgggaggagcgtcgcaggcgaagcgaggacgcgatcgagggcgtccgggccttcactgaaaaacgggatccggtttggacagggcattacatgtga

SEQ ID NO: 29113 - protein, 267 aa, Amycolatopsis orientalis
MSYTRVRYEKKDHVACVTMDRPDVLNAMDRRMHTELAEIWDDVEADDDIRAVVLTGAGNRAFTVGQDLKERAQRNDAGEEESTFGSRGQAGHPRLTDRFTLSKPVVARVHGYALGGGFELVLACDIVIASEEAIFGLPEVQLGLIPGAGGVFRLPRQLPQKVAMGYLLTGRRMDAATALRYGLVNEVVPLDELDQCVAGWTDSLVRAAPLSVRAIKQAALRSLDLPLEEAFTASYPWEERRRRSEDAIEGVRAFTEKRDPVWTGHYM

SEQ ID NO: 29114 - DNA, 774 bp, Pseudomonas putida
  CDS (1)..(774): transl_table=11
atgccgcgatatctcgacgtgcaggcgccggaaaacggcgttcagctcattaccctgcaacggcccgaggcactgaatgccctgtgtaccgagttactggcagagctggccactgcgctcgacgcagccgcccgggatgaccagataggcgttgttgtgctcaccggcagccgcaaggcgttcgccgcaggcgctgacatccgtgaaatggccgagcgcgacctggtcggcatcctcaacgaccctcgagtagcccactggcaacgcatcgccgcctttgccaagccgctgattgctgcggtcaacggctacgccctgggtggcggttgcgaattggtgatgtgtgccgacatcgtcatcgccggcagcgacgcccgcttcggccagccggagatcaacctcggcatcatccccggtgctggcggcacacagcgcctgttgcgtgccgtcggcaagccgctggccatgcagatggtgctgaccggcgaagccatcaccgcccgtcacgcccagcaagccggcctggtcagcgaaataacccagcccgaattcaccgtagaacgcgccatgcagatcgcccgcaacatcgccgccaaggcgccgctggcagtgcgcctggcaaaagaggcgctgctcaaggccggtgataccgacctggccagtggcctgcgcttcgaacgccatgcattcaccctgctggccggcaccgccgaccgtgacgaaggcattcaggcctttcaggaaaagcgcccggcgcgcttccaaggccgctga

SEQ ID NO: 29115 - protein, 257 aa, Pseudomonas putida
MPRYLDVQAPENGVQLITLQRPEALNALCTELLAELATALDAAARDDQIGVVVLTGSRKAFAAGADIREMAERDLVGILNDPRVAHWQRIAAFAKPLIAAVNGYALGGGCELVMCADIVIAGSDARFGQPEINLGIIPGAGGTQRLLRAVGKPLAMQMVLTGEAITARHAQQAGLVSEITQPEFTVERAMQIARNIAAKAPLAVRLAKEALLKAGDTDLASGLRFERHAFTLLAGTADRDEGIQAFQEKRPARFQGR

SEQ ID NO: 29116 - DNA, 792 bp, Pseudomonas putida
  CDS (1)..(792): transl_table=11
atgactttccagcacatcctgttttccatcgaggacggcgtggccttcctctccttgaaccgccccgagcagctgaacagcttcaacgccgccatgcaccttgaagtgcgcgaagccctcaagcaagttcgccagagcagtgatgcacgggtgctgttgctgacggctgagggccgcggcttttgcgccggccaggacctgtccgaccgtaacgtcgctccagacgccgaggtgccagacctgggcgaatcgatcgacaagttctacaacccgttggtgcgcaccctgcgcgacctgccgctgccggtgatctgtgcggtaaatggtgtggccgccggcgccggtgccaacatcccactggcctgcgacctggtgctggccgggcgatcggccagcttcattcaggcattttgcaagatcggcctggtgccggactctggtggtacctggttgctgccgcgcctggtcggcatggcgcgggctaaagcactggccatgctgggcgagcggcttggtgccgaacaggcccagcaatgggggctgatccaccgcgtggtggacgatgccgccctgcgcgacgaagccctcaccctcgctcgccagctcgccagccagcccacctatggcctcgcgctgatcaagcgcagcctcaatgccagtttcgacaacggcttcgatgaacaactggaactcgagcgcgacctgcaacgcttggccgggcgcagcgaggactaccgtgaaggcgtgagcgccttcatgaacaagcgcacacccgcattcaaggggcgctga

SEQ ID NO: 29117 - protein, 263 aa, Pseudomonas putida
MTFQHILFSIEDGVAFLSLNRPEQLNSFNAAMHLEVREALKQVRQSSDARVLLLTAEGRGFCAGQDLSDRNVAPDAEVPDLGESIDKFYNPLVRTLRDLPLPVICAVNGVAAGAGANIPLACDLVLAGRSASFIQAFCKIGLVPDSGGTWLLPRLVGMARAKALAMLGERLGAEQAQQWGLIHRVVDDAALRDEALTLARQLASQPTYGLALIKRSLNASFDNGFDEQLELERDLQRLAGRSEDYREGVSAFMNKRTPAFKGR

SEQ ID NO: 29118 - DNA, 894 bp, Streptomyces griseus subsp
  CDS (1)..(894): transl_table=11
atgaaccaggaagcattccgggcgggccaggaacccccggccgagtgggcgggggcggcgaccgagtcgttcgcggacttcgccgaccgggtggacggcaaggaggtcgtaccgctgcgggcctcgcttgcgggcggggtcgccaccctgacgctggaccggccgcaccgccgcaacagcctcgacctgacgctctcccgccatctgctgctcggcctgatgtgcgcgggcgacgacccccgggtgcgtacggtcgtgatcaccgggaacggcggggcgttctgcgcgggcgacgacgtcgggagcgtacggcggtggcggctgggcgaccgggcggacacccccttcgacccgatcacctcggacgcccactacctgcgggtctgcgaggcgatcctgcatctgccgaagccggtggtcgtggggctgaccggggcggcggcgggcgccggggcggagatcgcctgcgccgccgacttccggctggcggacacccgtgcctcgatcggcagttgcctggccggggtcgggcatgtggggaacgtggtcctgatgtcccggctgaccggtccggcgcgggcgacggagatctacctcaccgggcggatggtctccggggacgaggcggtgcgcctggggctgttcgaccggctctgcgaaccggaggatttcgaccgcgaactggccgatctggcgggccggttcgcggcactgccgaccgcttcggtggggctgttcaaggagttgcgggagcggagctgggggcagccggccgagtacgggctgcggctccaggacacgtaccacctgaagacgcacgcgacggtggccgacgcccgggaggggatggccgcgttcacggagaagcggccgccccgcttcaccggcgcctga

SEQ ID NO: 29119 - protein, 297 aa, Streptomyces griseus subsp
MNQEAFRAGQEPPAEWAGAATESFADFADRVDGKEVVPLRASLAGGVATLTLDRPHRRNSLDLTLSRHLLLGLMCAGDDPRVRTVVITGNGGAFCAGDDVGSVRRWRLGDRADTPFDPITSDAHYLRVCEAILHLPKPVVVGLTGAAAGAGAEIACAADFRLADTRASIGSCLAGVGHVGNVVLMSRLTGPARATEIYLTGRMVSGDEAVRLGLFDRLCEPEDFDRELADLAGRFAALPTASVGLFKELRERSWGQPAEYGLRLQDTYHLKTHATVADAREGMAAFTEKRPPRFTGA

SEQ ID NO: 29120 - DNA, 777 bp, Pseudomonas fluorescens
  CDS (1)..(777): transl_table=11
atgcctcatacccttagcgtcgacgcgcccgaacagggcgtacgcctgatcaccctgcagcgtcccgaagcgctcaatgccctcaatacccagttgctcgacgagctggccgccgaactggccctggccgaacaggatgccgagatccgcaccgtggtgttgaccggcagccgccagggccttcgccgccgggcgccgacatcaaggaaaatgtccgagcgcgacctggtcggcatcctcgaagacccgcgcgtcgcccactggcaacgcatcgccgccttctccaaaccactgatcgccgcggtcaacggcttctgcctcggcggcggctgcgagctggcgatgcacgccgacatcctcatcgccggcgaggacgcccgtttcggccagccggagatcaacctcggcatcatgcccggcgccggcggcacccagcgcctgctgcgcgcggtaggcaagagcctggccatgcagatggtgctcagcggccaggccatcgatgcccgccacgcccagcgcgccggcctggtcagcgaagtgacccagccggaactcaccgtcgagcgcgccctggccatcgcccgcgtcatcgcgcagaaggcgccgctggccgtgcgcctggccaaggaggcgctgctcaaggccgaggacaccgacctggccagcggcctgcgtttcgagcgccacgccttcaccgtgctggccggcaccgccgaccgcgccgaaggcatccgcgccttccaggaaaagcgtcgccccgaattcaccggccggtag

SEQ ID NO: 29121 - protein, 258 aa, Pseudomonas fluorescens
MPHTLSVDAPEQGVRLITLQRPEALNALNTQLLDELAAELALAEQDAEIRTVVLTGSRQGLRRRAPTSRKMSERDLVGILEDPRVAHWQRIAAFSKPLIAAVNGFCLGGGCELAMHADILIAGEDARFGQPEINLGIMPGAGGTQRLLRAVGKSLAMQMVLSGQAIDARHAQRAGLVSEVTQPELTVERALAIARVIAQKAPLAVRLAKEALLKAEDTDLASGLRFERHAFTVLAGTADRAEGIRAFQEKRRPEFTGR

SEQ ID NO: 29122 - DNA, 750 bp, Rhizobium meliloti
  CDS (1)..(750): transl_table=11
ctggtaaccatcaatcgccccgacgcaataaatgcgctcgatgtcaagcatgaccaggcgctggcaagggtgtggcgcgaggtagaggcagacccgttaatccgtgtttcgattttgactggtgcaggcggtcgggcattctgctccggcggagacttgaagacctatatgccgtggcggcgacagcttgcccaggaaggcaacgagagcacgatcagcttcgggggcatgacgctcccgcacgaaattaccaagccggttattgcggccatccaaggatattgtattgccggtggcctcgaacttgcgatggcgtgtgatatccggctcagcaccgcagattccaagtttggactcgcggaggttcgctggggcgtgctgccggggggagggggaacacaacggcttccgcggctcgtccccgtgggatacgctctggaaatgatcctgacgggagaatcgatcacagcccagcgggcggaacagatcggcctcgtcaaccggatcgtcgaagcgggcgatttgctagacaccgcgtttaaagtggcccagcgcattgtggagaatggcccgttggctgttcaagcagccaagaaagctgtccagcaggggttaagcgcggcgcttcaggatggtctgactctggaggcagctttgcaacggcaactactccaatcagaagacgcacaagaggggttgaaggctttcgcggaaaggcgctcgcccgtgttcaagggtgtagcgtcgtaa

SEQ ID NO: 29123 - protein, 249 aa, Rhizobium meliloti
MVTINRPDAINALDVKHDQALARVWREVEADPLIRVSILTGAGGRAFCSGGDLKTYMPWRRQLAQEGNESTISFGGMTLPHEITKPVIAAIQGYCIAGGLELAMACDIRLSTADSKFGLAEVRWGVLPGGGGTQRLPRLVPVGYALEMILTGESITAQRAEQIGLVNRIVEAGDLLDTAFKVAQRIVENGPLAVQAAKKAVQQGLSAALQDGLTLEAALQRQLLQSEDAQEGLKAFAERRSPVFKGVAS

SEQ ID NO: 29124 - DNA, 843 bp, Rhodococcus sp
  CDS (1)..(843): transl_table=11
gtgccggaaaccggtacccacgatgcaataatactcgagcggcacggggagatcgcggttgtgcgattgaaccgtccccaccagctcaatgcgttcaccaacgcaatgtgctatcggctcatcgaaatcttcgacgagaccgacgcagacgacgaggtccgtgcggtagtcatcaccggaacgggacgggccttctgtgcgggagccgatctcgcagccggcggcgacaccttcgtgcgggatgacgacccggagaccggaggcgcaccggccgacacgggcggtcaggtctcgctgagaatctaccgttccctcaagccggtaatcgccgcgatcaacggaccggccgcgggtgtcggcgtcaccatgaccctgccggccgatattcgcatcgcgtcggaaaccgcgaagttcgggttcgtgttcacgcgtcgcggactggtccccgaggcctgctcgacctggttccttccgcgggccgtcggtatctcgacggccgtcgagtggacagtgggtggcaagatggtctcggcagtcgaagcgctcgaacgaggactcgtccgtgaactcgtacccgccgatcaagtgctcgagcgggcactcgacatcgcgcgggaactcgtctccggtacctcaccggtgtcggcagctctgacccgacagctgatgtggcggatgcttggtgcgtccgaccctgaggtagcacatcgggccgagtcgatcggcatctacgtccgcggcaccgcggacgacgtgcgtgaaggtgtcgacgcatttctcgagaagcgcgagccgaagttcccgaaccgggttacggatggattgccgaacctgttcgagtag

SEQ ID NO: 29125 - protein, 280 aa, Rhodococcus sp
MPETGTHDAIILERHGEIAVVRLNRPHQLNAFTNAMCYRLIEIFDETDADDEVRAVVITGTGRAFCAGADLAAGGDTFVRDDDPETGGAPADTGGQVSLRIYRSLKPVIAAINGPAAGVGVTMTLPADIRIASETAKFGFVFTRRGLVPEACSTWFLPRAVGISTAVEWTVGGKMVSAVEALERGLVRELVPADQVLERALDIARELVSGTSPVSAALTRQLMWRMLGASDPEVAHRAESIGIYVRGTADDVREGVDAFLEKREPKFPNRVTDGLPNLFE

SEQ ID NO: 29126 - DNA, 786 bp, Rhodococcus sp
  CDS (1)..(786): transl_table=11
atgtcggaaaccgcaacgcccgcagtcgtgtggagcgacgtcgaggccggggtcatgacgatcacgttgcaacgcaggccggcgaacgctctcgggttgccgatcatcgacggtctgaacgcggcactcgatgcagcggacgccgacggctccgtgaaggtggtcgtcgtccgctcggatattcccggcttcttcgcggccggcgccgacatcaagcacatgtcggccgtcgacgcggaatcctttacggcgtatggcgatcggcttcggagtgcactcgaccggctcgcatcggccgaccgaatctcgatcgccgcggtggacggcctcgcgctcggcggcggcctcgaactcgcgatggcctgcacgctgcgggtcggtggtgcggacgccaagttcggattgcccgaggtgaagctggggctgattcccggagcgggtgggacgcagcgccttccgcgtctggtcggtcgcggccatgccctcgacatcatgctgagcgcccgccaggtgctcgctcccgaggcgcacgcgatcggcttgatcgatcgcctcgtcgaggcaggcgccgccacggaggccgcgctggctctcgccaccgagttgtgcacgatgtcgctgcccgcgcagcgcgccgtcatccgcacggtcgacgcatcgttcgacacgccactcgaggagggcttccggttcgaggtggcccaggagcaggatctgttcgagaacggagaggcgaaggaaggcatcacggccttcctggagaagcgcgctccgcgcttctcctga

SEQ ID NO: 29127 - protein, 261 aa, Rhodococcus sp
MSETATPAVVWSDVEAGVMTITLQRRPANALGLPIIDGLNAALDAADADGSVKVVVVRSDIPGFFAAGADIKHMSAVDAESFTAYGDRLRSALDRLASADRISIAAVDGLALGGGLELAMACTLRVGGADAKFGLPEVKLGLIPGAGGTQRLPRLVGRGHALDIMLSARQVLAPEAHAIGLIDRLVEAGAATEAALALATELCTMSLPAQRAVIRTVDASFDTPLEEGFRFEVAQEQDLFENGEAKEGITAFLEKRAPRFS

SEQ ID NO: 29128 - DNA, 816 bp, Aspergillus oryzae
  CDS (1)..(816)
atgtcgatagagatgcagcatccaccagtccagggctgtctagtctcattccctgctccaaacattctcctcctcacactcaaccggccaaagcagcgcaattccataccgctcgctacgagcgccgagatacagcgactatgggattggttcgatcaggagtctactctccaggtggcaataattacaggaacgggagaatccttttgcgccggagctgatctcaaagaatggaacgaactcaatgcgcgcggtgaaacgaatgaaatgacagcacccggactggccgggctccctcgccggcgaggaggaaagccaattatcgccgccgtcaacggatactgtctcggaggcggatttgagatgatagtcaattgcgatattgtcgtcgccagtgagcgagcttccttcgggcttcccgaagtacaacgaggaattgctgctgttgcaggctctctgcctcggttggttcgggtgctgggcaaacagcgagctgcggagattgcactgagtggtctgactttccctgcatcgcagctagagcgttgggggttggtgaatcgcgtggtggagcatggtcagctagtagccacggcagtggagatcgcaagcgccattgcgaagaatagcccggacagcatccgcgttacgatggagggtctccattacgcgtgggagattgccagtgtggaagaaggtagtaccgccttggtagaccggtggtaccctaagctcatggctggggagaattttcacgaaggcgtgagagcatttgtggagaaacggaaaccgaagtggagagcttctaacttgtaa

SEQ ID NO: 29129 - protein, 271 aa, Aspergillus oryzae
MSIEMQHPPVQGCLVSFPAPNILLLTLNRPKQRNSIPLATSAEIQRLWDWFDQESTLQVAIITGTGESFCAGADLKEWNELNARGETNEMTAPGLAGLPRRRGGKPIIAAVNGYCLGGGFEMIVNCDIVVASERASFGLPEVQRGIAAVAGSLPRLVRVLGKQRAAEIALSGLTFPASQLERWGLVNRVVEHGQLVATAVEIASAIAKNSPDSIRVTMEGLHYAWEIASVEEGSTALVDRWYPKLMAGENFHEGVRAFVEKRKPKWRASNL

SEQ ID NO: 29130 - DNA, 834 bp, Aspergillus oryzae
  CDS (1)..(834)
atgactttcaaaaccccacccccaaccccccaacacgccaaagtgaccttcccaaccccacacgtcctacaagtgacgctctcacgacccaaggacctaaactgcataaacacagcgggtcacaatgagctacacgcgctctgggaatggatggacgaggagccgagtatcagggttggggtgttgacgggggaagggagggcgttttgtgccggggcggatctaaaggaatggaacaaccaagtgaacagcgccgagggatccaaacgacaacagccgtcgtcgggattcgggggtctttcccgacggagcggaaagaagcctattatttgcgcggtgaatgggatctgtctgggtggtggatgtgagatgattgtcaatgcggacatggtgattgcgtgtgagaaggcatttttcgggtttcccgaagttcagcgcggagtggtcgcgattgcgggggcgttgccgcgggtggtccggacgattgggcgacagcgggcgatggagatggtcttgacggggcggcgggtgacggcagtcgaggcggagaagtggggatttgtcaatgaggtgttgcccacgcccgaagaagtggtgacgcgggcattggagatcgcgggtcagatcgcggcgaatagtcccgatgcggtgatcgtcagtcgcgagggggtcaagttgggttgggagggtgttggagctgaggagggcagtcgctggttgatcgacgggtggcagaagaggttaaacgagggcgagaatatcaaagagggattgagggcgtttgtggagaagaggcaaccaaagtgggtggataactcgtatgcgctgcactaa

SEQ ID NO: 29131 - protein, 277 aa, Aspergillus oryzae
MTFKTPPPTPQHAKVTFPTPHVLQVTLSRPKDLNCINTAGHNELHALWEWMDEEPSIRVGVLTGEGRAFCAGADLKEWNNQVNSAEGSKRQQPSSGFGGLSRRSGKKPIICAVNGICLGGGCEMIVNADMVIACEKAFFGFPEVQRGVVAIAGALPRVVRTIGRQRAMEMVLTGRRVTAVEAEKWGFVNEVLPTPEEVVTRALEIAGQIAANSPDAVIVSREGVKLGWEGVGAEEGSRWLIDGWQKRLNEGENIKEGLRAFVEKRQPKWVDNSYALH

SEQ ID NO: 29132 - DNA, 888 bp, Aspergillus oryzae
  CDS (1)..(888)
atggaagcaaactcattcaagacgatactctacgaaaagtccccagacggcaagatcgcatatataactctgaaccgtcccgaccgattcaatgccatcgacggccacctcccaagggatctccgagacgctgtgaaactagccaacgcagacccaactgtgcactgcatcatcctgaaagggaacggacctggcttttgcgggggctatgacctcgacatctactcccagaacgcggtacgcggagagacggctggatcacaggatctctccaagggatacgatcccttgatcgattacaccatgatgaaagagaataccgactgcttctcagagctatttcatagccacaagccgacaattgcacaggtccatggtgccgcagtggcgggcggaagtgacatcgccctatgctgcgatctggttatcatggcaaccgatgctcgcatcggctatcctccgagtcgggtctggggttgtccgactactgcgatgtgggcttttcggattggagttgaaaaggctaagcggatgctcttcacgggtgacttgatcagtggagctgaggcggcggatatgggactcgttcttaaagcggtgcccgaggaggagttggaggaaacagtgttgctgttggcaaatcgcattgcgtcggtcccgcaaaatcaactgtggatgcagaaacaggtgatcaatggtcttatcgaggggcctctgcttagaagccagaaattatctacgatattcgatggtatcacccgcaactcgcctgaaggtgttgcatttcaggaactgagtaaagagaaaggattcaaagctgccattcacgaacgtgatagcccggcgagatcggagagatatgggaaggtgtggaagagtgtgctatag

SEQ ID NO: 29133 - protein, 295 aa, Aspergillus oryzae
MEANSFKTILYEKSPDGKIAYITLNRPDRFNAIDGHLPRDLRDAVKLANADPTVHCIILKGNGPGFCGGYDLDIYSQNAVRGETAGSQDLSKGYDPLIDYTMMKENTDCFSELFHSHKPTIAQVHGAAVAGGSDIALCCDLVIMATDARIGYPPSRVWGCPTTAMWAFRIGVEKAKRMLFTGDLISGAEAADMGLVLKAVPEEELEETVLLLANRIASVPQNQLWMQKQVINGLIEGPLLRSQKLSTIFDGITRNSPEGVAFQELSKEKGFKAAIHERDSPARSERYGKVWKSVL

SEQ ID NO: 29134 - DNA, 846 bp, Aspergillus oryzae
  CDS (1)..(846)
atgtctccatcgtttcagtctgaaccacccaagactacacactaccgtgtgtcattccccgaaccccatatcatgttagtcaccatagatcgtgagaaacaacgaaactccctaccctcctacgcgcactgggaagcacatgagctcttcacctggttcgaccatgagccatctttacttgtcgccgttgtcaccggggccgggaacaaggccttctgtgcagggcaggacctccaagaacaaaacaaaaaacgagggaatgagaaaacggcatctcaaaaggctctacttacccatcccccgacagggttcatgggactaagtcagaggaaaggtgtgaagcccgtcctggcagccgtgaatgggtttgctttgggtggagggtttgaaatttgtctcaattgtgacgtggtcgttgcatcctcaacggcagagtttgggcttccagaggctcaggtcggcttgtttgcggcagctggcggtttgccccggttggttcgaacatgtggtatgcaagtagccacggagctcgctttgacgtgcagaaggatctctgcgcaggaagctctgagtctacgattgattaataggatctctaagactcctgagtcacttgtagaagagtgcctggcgattgcatcccggattgtgcagttgtctcccgacgcgatcttggcgacgcgacaggggctcagggcagcttgggacaatccaagtgtacagcatgcaacatcgcaaatccgtgagatgtatgctgatcgggtggttaaaggggagaattttaaaattggcgtggaggcatttgtaaagaagactaagccacaatgggtgatgcctaagatttaa

SEQ ID NO: 29135 - protein, 281 aa, Aspergillus oryzae
MSPSFQSEPPKTTHYRVSFPEPHIMLVTIDREKQRNSLPSYAHWEAHELFTWFDHEPSLLVAVVTGAGNKAFCAGQDLQEQNKKRGNEKTASQKALLTHPPTGFMGLSQRKGVKPVLAAVNGFALGGGFEICLNCDVVVASSTAEFGLPEAQVGLFAAAGGLPRLVRTCGMQVATELALTCRRISAQEALSLRLINRISKTPESLVEECLAIASRIVQLSPDAILATRQGLRAAWDNPSVQHATSQIREMYADRVVKGENFKIGVEAFVKKTKPQWVMPKI

SEQ ID NO: 29136 - DNA, 801 bp, Rhodococcus aetherivorans
  CDS (1)..(801): transl_table=11
atggccgacgagtccaccgttaccgaacctgccgcacagtacgagcggcgtggcggcatcgccgtcatcacgctcaaccgcccccgggcgctcaacgccgtgaacgcagcgctggcgacggcggtcggcacgctgctcgagcaggcggaggcggacgacgacgtgcgcgtcgtggtgctcaccggtgcgggccgcgcgttctgcgcgggcgccgacctcaaggccctggccacgggcgagagcatcgccgccgacgggcaccctgaatggggtttcgccggctatgcccagcactggatcagcaagccgaccatcgccgcggtcaacgggttcgccctcggcggcggcaccgagctggtgctcgcgtccgacctcgccgtcgtcgacgaggaggcccagctgggcctgcccgaggtcaagcgaggtctcttcgccgccgcgggcggggtgatccggctccaacagcagatcccccgcaaggtcgcgctggaactggcgctgaccggtgagccgatctccgctgcgcagggcaaggaactgggcctggtcaaccgggtcgcaccgcacggcacggcgctcgagatggcgctcgggctggccgagaccatcgccgcgaacgctccgctctcggtacgcgaatcgaagtcgatgatccaccggaccgcgcacggcgccgactgggagccgggtgtgtgggaggccaacgccgccgcggtgaaggtggtgttcaccagcgacgacgccaaggaaggcccgaccgcgttcgcacagaagcggcagccggtctggaagggtcgctga

SEQ ID NO: 29137 - protein, 266 aa, Rhodococcus aetherivorans
MADESTVTEPAAQYERRGGIAVITLNRPRALNAVNAALATAVGTLLEQAEADDDVRVVVLTGAGRAFCAGADLKALATGESIAADGHPEWGFAGYAQHWISKPTIAAVNGFALGGGTELVLASDLAVVDEEAQLGLPEVKRGLFAAAGGVIRLQQQIPRKVALELALTGEPISAAQGKELGLVNRVAPHGTALEMALGLAETIAANAPLSVRESKSMIHRTAHGADWEPGVWEANAAAVKVVFTSDDAKEGPTAFAQKRQPVWKGR

SEQ ID NO: 29138 - DNA, 768 bp, Klebsiella sp
  CDS (1)..(768): transl_table=11
atgagcgaactgttaattgctcgccacgcgcgcgtcctccagctgacgcttaatcgccctcaggcgcgcaacgcgctgaataacgcgctgctgacgcaaattgccgacgtgctcgacgcggcggcgctggacccgacggtcggcgtctgcgtcattagcggtaatcaacgcttttttgccgcaggggctgacctgaacgaaatggcggaaaaagatctgcctgccaccctcgatgatattcgaccgcggctgtgggcgcgtatcgacgccttcaccaaaccgctgatcgcctcggtaaacggctatgccctcggcgccggatgcgaactggcgctgctctgcgacctgatagtcgccggcgataacgcccgttttggcctgccggaaatcaccctcggtattatgccgggcgcgggcgggacccagcgcctgatccgcagcgtcggtaaagcgctggccagccggatgatattgagcggcgaaagcatcgatgccaggcaggcgctgcgggcggggctggtaagcgaggtttatccgccagcgctcaccgatgaatatgcactcgctttggcagcaaccgtggcccgccactcgccgctggcgctgcgcgcggctaaacaggccttacggttgtcgcaggaggtcagcctgcaggccgggattcagcaggaacgccagttatttactttgctgagcgcgactgaagaccgtcgcgaaggcatcgacgcctttctccataaacgtactgcggaatttaaaggacgctaa

SEQ ID NO: 29139 - protein, 255 aa, Klebsiella sp
MSELLIARHARVLQLTLNRPQARNALNNALLTQIADVLDAAALDPTVGVCVISGNQRFFAAGADLNEMAEKDLPATLDDIRPRLWARIDAFTKPLIASVNGYALGAGCELALLCDLIVAGDNARFGLPEITLGIMPGAGGTQRLIRSVGKALASRMILSGESIDARQALRAGLVSEVYPPALTDEYALALAATVARHSPLALRAAKQALRLSQEVSLQAGIQQERQLFTLLSATEDRREGIDAFLHKRTAEFKGR

SEQ ID NO: 29140 - DNA, 891 bp, Alternaria alternata
  CDS (1)..(891)
atgcttaatcgattctcttattcgtcaaatgcgtggcacaaccttcgtgtggacggtcctgacgcagacggtattgcggtgatagtccttgcgcgttcccagtcccgcaatgcacttacgttgccaatgctcacggacatggtgcaacttctcagcgcaatggatgcagacgattcggtcaagtgtattgtttttactggcgagggacagttcttctgctctggcgtagacctgaccgagggcttcggcgaaatcggcaaaacacgggacacacaccgcgatgcggggggaaaactggctctcgcgatccacaactgccgtaaaccaactatcgcagccatcaacggcaccgctgtcggcgttggtattacgatgaccttgccaatgagtatccgtatcgctgcagagagtgcaaagatctcgtttccttttgttagaagaggaatcgtcgccgatgccgcttctagcttctatctcccgcgactgatagggtatggccgcgcattacacctctttaccactggcgccttgtatccggccgaatcaggcctgttgcatggacttttctcagagacggtcaaccctgcctcatcaaccctgccgcgtgcattagaagtagcgcgggacattgctgtcaatgcatcccaggtaggtgtttatctaactcgagacctgatttatcgatcactacgaagcccggagcaagcgcaccttctggaatctgcaacactctacacgagataccagtcacaggacttcgaggagggcgtgaagtctttccttgaaaagagaaggcctcggtttcaggacaccatgcatgagcagtcgggcgagggcgtgcttgaacggggagactgtgtagttagcctggcttccaagccaaagctttga

SEQ ID NO: 29141 - protein, 296 aa, Alternaria alternata
MLNRFSYSSNAWHNLRVDGPDADGIAVIVLARSQSRNALTLPMLTDMVQLLSAMDADDSVKCIVFTGEGQFFCSGVDLTEGFGEIGKTRDTHRDAGGKLALAIHNCRKPTIAAINGTAVGVGITMTLPMSIRIAAESAKISFPFVRRGIVADAASSFYLPRLIGYGRALHLFTTGALYPAESGLLHGLFSETVNPASSTLPRALEVARDIAVNASQVGVYLTRDLIYRSLRSPEQAHLLESATLYTRYQSQDFEEGVKSFLEKRRPRFQDTMHEQSGEGVLERGDCVVSLASKPKL

SEQ ID NO: 29142 - DNA, 771 bp, Azoarcus sp
  CDS (1)..(771): transl_table=11
atgccggtaacgctggaagtaaagaatcacgtcgcctacgtcaccctgaaccgtccggaagcgatgaactcgctcgacccggaatcgacctgcgatctcgccgaaatctgggcgcgcgtgcgtaccgaccccgacatccgcgtggccgtgttgtccggtgcgggcgaaaaggcgttctgcacaggcacggacatgaagaaggcaccgccgcccaccgagtgcatggcagcgacctatctgcgcgagggccagccgatcctgccgcacatgaagatgtggaagccgatcatcgccgcgatcaacggctacgcggtgggtggcgggctcgagatggcgcttgcgtgcgacatgcggatcgcctcgtcgaatgccaagttcgggctgaccgaagtgaaggtcgcgagcctcgccggcctcaacggcacgcaggcgctgccgcgcgcgatcccgcaggcggtggcgatgaagatgctgctgacgggcgagatgatctctgcggaggaggcgctgcgctacgggcttgtcagcgacgtggtcgagccgtcggcgctcgcggacctggcgcgaacgtacgcggagaagatcgccagcgcggcgccgctgagcgtgcaggcgaccaagcaagccgcagtgctcggcaaggacatgccgctcgagcacggcatcctttactcgcatctgctgtggggcgtgttgcgtgacaccgaggaccgcaaggagggcttcaaggccttcggcgagcggcgcgcgccggagtttcgcggcgcctga

SEQ ID NO: 29143 - protein, 256 aa, Azoarcus sp
MPVTLEVKNHVAYVTLNRPEAMNSLDPESTCDLAEIWARVRTDPDIRVAVLSGAGEKAFCTGTDMKKAPPPTECMAATYLREGQPILPHMKMWKPIIAAINGYAVGGGLEMALACDMRIASSNAKFGLTEVKVASLAGLNGTQALPRAIPQAVAMKMLLTGEMISAEEALRYGLVSDVVEPSALADLARTYAEKIASAAPLSVQATKQAAVLGKDMPLEHGILYSHLLWGVLRDTEDRKEGFKAFGERRAPEFRGA

SEQ ID NO: 29144 - DNA, 795 bp, uncultured archaeon GZfos27B6
  CDS (1)..(795): transl_table=11
atgcaggaagagaacaaatacgaaaacattttgtgcgctaagaaagaaaaagtcgcgaccataacactcaacaggcaaaaatcgctgaatgcgttgaacacggctttattgacggagctgcgagatgcgctggacgatgcggaaacggatgcagcggtgcgtgcaatagtaataaccgggtcgggggaaaaggctttctgtgctggggcagacataaccgagctgggtgagaaaagtcccgaagaagcgagcgaatggtcgagctgggctcaggggataacaacatacatggaaaagctgagtaagccgataatagcaaagataaacggattctgtttgggcggcggcttggaacttgcgatggcgtgtgatttcaggattgcatcagaaaaagcgatatttggtctgccggagataaatctggcaattatcccgggtggcggcggcacacaacgactaccgagattgatagggaagacaatagcgatggaaatgctgatgtgcggagagcatataaatgcagcagaagcttttcgactaacacttgtgaataaaactgttcctgcggatgaacttgacggtgaggttgatgaacttatcaagaaactgctttcaaaaagtgctgttacgctcggaatattaaaggatgcggtgaatagtggactggaaatggatttggagcatgcattgcagtatgaagcggaatgctttgggtctgcacttgcaactgaggatgcgagagaagggttaaaagggtttttggaaaagcggaagcctgagtacaaaagccggtga

SEQ ID NO: 29145 - protein, 264 aa, uncultured archaeon GZfos27B6
MQEENKYENILCAKKEKVATITLNRQKSLNALNTALLTELRDALDDAETDAAVRAIVITGSGEKAFCAGADITELGEKSPEEASEWSSWAQGITTYMEKLSKPIIAKINGFCLGGGLELAMACDFRIASEKAIFGLPEINLAIIPGGGGTQRLPRLIGKTIAMEMLMCGEHINAAEAFRLTLVNKTVPADELDGEVDELIKKLLSKSAVTLGILKDAVNSGLEMDLEHALQYEAECFGSALATEDAREGLKGFLEKRKPEYKSR

SEQ ID NO: 29146 - DNA, 795 bp, Butyrivibrio fibrisolvens
  CDS (1)..(795): transl_table=11
atgagttttgttttatatgaacagaaagataagatcgctgttgtaactatcaaccgtccggaagcacttaatgctcttaactcagcagttctcgatgagcttaatgaagttctcgataacgttgatcttaatacagttagagcactcgttcttaccggtgctggagataagtcttttgtagctggtgctgatattggagagatgtccacacttacaaaggctgaaggtgaagcttttggtaagaagggtaacgatgtattccgtaagcttgagacacttcctatccctgtaattgcagctgttaacggctttgcacttggcggcggatgtgagatctctatgagctgcgatatccgtatctgctcagacaacgctatgttcggtcagcctgaagttggtcttggaattactcctggattcggcggaacacagagacttgcaagaacagttggtgttggtatggctaaacagcttatctacacagctcgtaatatcaaagctgacgaagcacttcgtatcggccttgtaaacgctgtatacactcaggaagagcttcttcctgcagctgagaagcttgcaacaacaatcgctggtaacgctcctatagctgttcgtgcttgtaagaaagctatcaacgatggtcttcagactgatatcgacagcgcacttgtaatcgaagaaaagctctttggttcatgcttcgagtcagaagatcaggtagaaggaatggctaacttccttcgtaagaaagatgatcctaagaaggttaagcacgtagatttcaagaatgcttaa

SEQ ID NO: 29147 - protein, 264 aa, Butyrivibrio fibrisolvens
MSFVLYEQKDKIAVVTINRPEALNALNSAVLDELNEVLDNVDLNTVRALVLTGAGDKSFVAGADIGEMSTLTKAEGEAFGKKGNDVFRKLETLPIPVIAAVNGFALGGGCEISMSCDIRICSDNAMFGQPEVGLGITPGFGGTQRLARTVGVGMAKQLIYTARNIKADEALRIGLVNAVYTQEELLPAAEKLATTIAGNAPIAVRACKKAINDGLQTDIDSALVIEEKLFGSCFESEDQVEGMANFLRKKDDPKKVKHVDFKNA

SEQ ID NO: 29148 - DNA, 771 bp, Pseudomonas sp
  CDS (1)..(771): transl_table=11
atgccgaacacccttgtggtgcaggcgcatcaggccacgcgcctgatcaccctgcatcgtccacatgcactgaacgccctgaccaccgagctgctgggcgaactggcggacgaactgcaacgctgcgccgacgacccggacgtgcgcgccgtggtcatcaccggcagccgcaaggcgttcgccgccggtgccgacctcaacgaaatggccgagcgcgacctggtaggcatgctcgacgacccgcgccagggctactggcagcgcatcacccagttccccaaacccctgatcgctgccgtcaacggctacgccctgggcggcggctgcgagctggcgatgcacgccgacattcttatcgccggtgaagacgcccagttcggccagccggaaatcaacctcggcatcatgcccggcgcaggcggcacccagcgtctgctgcgggcggtaggcaaatcgctggcgatgcagatggtcctggccggtgaatccatcagcgcccgccgcgccctcgacgcaggcctggtcagcgaaatcacccagcccgaactcaccgtcgaacgcgccctgcagatcgcccagcgcatcgccgccaaggcgccgctggcggtgcgcctggccaaggaagcactgctcaaggcccaggacctggacctggccagcggcctgcgcttcgaacgtcacgcattcaccctgctggccggcaccgccgaccgcgacgaaggcatccgcgccttccaggaaaaacgtcaggccgacttcaagggctgctaa

SEQ ID NO: 29149 - protein, 256 aa, Pseudomonas sp
MPNTLVVQAHQATRLITLHRPHALNALTTELLGELADELQRCADDPDVRAVVITGSRKAFAAGADLNEMAERDLVGMLDDPRQGYWQRITQFPKPLIAAVNGYALGGGCELAMHADILIAGEDAQFGQPEINLGIMPGAGGTQRLLRAVGKSLAMQMVLAGESISARRALDAGLVSEITQPELTVERALQIAQRIAAKAPLAVRLAKEALLKAQDLDLASGLRFERHAFTLLAGTADRDEGIRAFQEKRQADFKGC

SEQ ID NO: 29150 - DNA, 774 bp, Pseudomonas sp
  CDS (1)..(774): transl_table=11
atgcctcatacccttagcgtcgacgcgcccgaacagggcgtacgcctgatcaccctgcagcgtcccgaagcgctcaatgccctcaatacccagttgctcgacgagctggccgccgaactggccctggccgaacaggatgccgagacccgcgccgtggtgctgaccggcagccgcaaggccttcgccgccggcgccgacatcaaggaaatggccgagcgcgatctggtcggtatcctcgaagacccgcgcgtcgcccactggcaacgcatcgccgccttctccaaaccactgatcgccgcggtcaacggcttctgcctcggcggcggctgcgagctggcgatgcacgccgacatcctcatcgccggcgaggacgcccgtttcggccagccggagatcaacctcggcatcatgcccggcgccggcggcacccagcgcctgctgcgcgcggtaggcaagagcctggccatgcagatggtgctcagcggccaggccatcgatgcccgccacgcccagcgcgcgggcctggtcagcgaagtgaccttgcccgagctcaccatcgagcgcgccctggccatcgcccgcgtcatcgcgcagaaggcgccgctggccgtgcgcctggccaaggaggcgctgctcaaggccgaggacaccgacctggccagcggcctgcgtttcgagcgccacgccttcaccgtgctggccggcaccgccgaccgcgccgaaggcatccgtgcctttcaggaaaagcgtcgccccgaattcaccggccggtag

SEQ ID NO: 29151 - protein, 257 aa, Pseudomonas sp
MPHTLSVDAPEQGVRLITLQRPEALNALNTQLLDELAAELALAEQDAETRAVVLTGSRKAFAAGADIKEMAERDLVGILEDPRVAHWQRIAAFSKPLIAAVNGFCLGGGCELAMHADILIAGEDARFGQPEINLGIMPGAGGTQRLLRAVGKSLAMQMVLSGQAIDARHAQRAGLVSEVTLPELTIERALAIARVIAQKAPLAVRLAKEALLKAEDTDLASGLRFERHAFTVLAGTADRAEGIRAFQEKRRPEFTGR

SEQ ID NO: 29152 - DNA, 804 bp, Streptomyces toyocaensis
  CDS (1)..(804): transl_table=11
atgaccggcgaccgtacgcgggtgcgctacgagaagaagcagcacgtcgcccgtatcacgctcgaccgtcccgacgtgctcaacgcgatggatctgcgcatgcacgaggagctcgccgagatctgggacgacgtcgaggccgacgacgacatcagggtcgccgtgctgaccggagcgggtgaccgtgccttctccgtcggccaggacctcaaggagcgggcccgcctggaccgtcagggcgtcgctccgacgaccttcggcagccgcgggcagccgggctggccccggctcaccgaccgcttcacgctgtacaaaccggtgctcgcacgggtccacggttacgccctgggcggcggtttcgaactcgccctggcctgcgacctgatcatcgcctcggaccaggcggtcttcgccctgcccgaggcgcggctcggtctcgtgcccggtgcgggcggtgcgttccggctggccaggcagctgccggagaagatcgccatggggtacctgctcaccggtcgtcggctgagcgccgcgacggccctgcgccacgggctcgtcaacgaggtggtcccggccgaccggttggacgcctgcgtccaggagtggaccgacgacctggtccgcagcgccccgctctcggtccgggccatcaaggaagccgctgcgaaatccgtcgacatgcccctcgagcaggcgttcaccgccgagtacggctgggaggagcgccgcaggcgcagcagcgacgcggtcgaaggagtccgggccttcgcggacaggcgcgatcccgtctggaccggccgctga

SEQ ID NO: 29153 - protein, 267 aa, Streptomyces toyocaensis
MTGDRTRVRYEKKQHVARITLDRPDVLNAMDLRMHEELAEIWDDVEADDDIRVAVLTGAGDRAFSVGQDLKERARLDRQGVAPTTFGSRGQPGWPRLTDRFTLYKPVLARVHGYALGGGFELALACDLIIASDQAVFALPEARLGLVPGAGGAFRLARQLPEKIAMGYLLTGRRLSAATALRHGLVNEVVPADRLDACVQEWTDDLVRSAPLSVRAIKEAAAKSVDMPLEQAFTAEYGWEERRRRSSDAVEGVRAFADRRDPVWTGR

SEQ ID NO: 29154 - DNA, 840 bp, Pseudonocardia autotrophica
  CDS (1)..(840): transl_table=11
gtgagtgctcagctggtcctcgtcgaccacccggagcccgacatcgctcgggtgaccctgaaccggccggagcggcgcaacgcccagaacccggcgctgctctacgagctcgacgccgcgctgagcgccgccgccacggaccggcaggtcaaggtgatcgtcctggcggccaacggccccgacttctccgccggccacgacctcaccgaggccgacgtcccgatccccgggccaccggtcgccacgatggagggggccttcgacgccgacggagtgcaaggcaggcatgccttcgagtgcgaacgctacctggggctctgccgacggtggagggacctgcccaaaccgacgatcgccgccgcgcagggccgctccatagccggcggcctgatgctgctgtggccgatggatctcatcgtcgccgccgagtcggccaccttctccgacccggtcgcagccttcggcctcaacggcatggagtacttcacccacgcctgggaggtcggagcacgcaaggccaaggagatgctgttcaccgggcagccgataaccgcctccgatgcacacaggctggggatggtcaaccacgtcgtgtccgacgaccggctcaccgagttcaccctggacctggctcgacgcatcgccgtgatgcccgcgtacgcgctgcgcctggccaaggccggcgtcaacggctcgctcgccgcccagggacaggacgtcgcaacggactcggccttcgcactccacatcgccggccacgccaacgcactcgcccggcacggcgacatcatcgatccagccggtatcgagaggatcagggcgctgtcccgtcgacggtag

SEQ ID NO: 29155 - protein, 279 aa, Pseudonocardia autotrophica
MSAQLVLVDHPEPDIARVTLNRPERRNAQNPALLYELDAALSAAATDRQVKVIVLAANGPDFSAGHDLTEADVPIPGPPVATMEGAFDADGVQGRHAFECERYLGLCRRWRDLPKPTIAAAQGRSIAGGLMLLWPMDLIVAAESATFSDPVAAFGLNGMEYFTHAWEVGARKAKEMLFTGQPITASDAHRLGMVNHVVSDDRLTEFTLDLARRIAVMPAYALRLAKAGVNGSLAAQGQDVATDSAFALHIAGHANALARHGDIIDPAGIERIRALSRRR

SEQ ID NO: 29156 - DNA, 840 bp, Comamonas acidovorans
  CDS (1)..(840): transl_table=11
atgagcaccgaacgtaccgaagaacagaccgtgtcctgcaccgtcacaggccgcgtggcctgggtgaaattcaaccgccctgaaaagcgcaacgccatgagcccccagctcaaccgccagatgatgcgtgtgctcgacgacctggagttccgtgacgacgtgggcgtggtcgtgcttgcaggcgaaggcacggcctggacggccggcatggacctgaaggaatacttccgcgagaccgaggccaccggcctggccggaacccgcaaggcccagcgcgagagctatggctggtggcgccgcctgcgctggttccagaagccgaccattgccatggtcaacggctggtgcttcggcggcggctacggcccgctgttcgcctgcgacctggcctttgcctcggatgacgccaagttcggcctgtccgaaatcaactggggcatcctgcccggtggcggcgcctccaaggtggcggtggaactgctgtccttccgccgtgccatgtaccacgccatgctgggcgagaacatcgacggccgcacggccgccgagtggggcctggtcaacgagtcgctgccggccgatcgcctgcagacccgcgtcaccgaagtggccgaggccctgctgcagaagaaccccagcgccctgaaggccaccaaggacgccatccgccgcgtgcgcgacatgagctacgacaacgccgaggactacctggtgcgcgcccaggaagccgccaacagctacgacaacgaaggccgcaaggaaggcatgcgccagttcctcgacgacaagacctacaagcccggcctgggcacctacgacctctcgaagcaaaagtcctga

SEQ ID NO: 29157 - protein, 279 aa, Comamonas acidovorans
MSTERTEEQTVSCTVTGRVAWVKFNRPEKRNAMSPQLNRQMMRVLDDLEFRDDVGVVVLAGEGTAWTAGMDLKEYFRETEATGLAGTRKAQRESYGWWRRLRWFQKPTIAMVNGWCFGGGYGPLFACDLAFASDDAKFGLSEINWGILPGGGASKVAVELLSFRRAMYHAMLGENIDGRTAAEWGLVNESLPADRLQTRVTEVAEALLQKNPSALKATKDAIRRVRDMSYDNAEDYLVRAQEAANSYDNEGRKEGMRQFLDDKTYKPGLGTYDLSKQKS

SEQ ID NO: 29158 - DNA, 807 bp, Brucella abortus
  CDS (1)..(807): transl_table=11
atgtgggacggcatggggaacaaaatgagcgaagctactgatgttgtgatagaaactcgtccggctgacggtgttgccctcctggaactcaaccgccctgatgcattgaatgccgtgaacatggatgtgcgccagaaactggctgcatcagccgacagtctcgttgaggatccggacatccgggtgatcgtcattgccggacgtggcggaaatttcgccgcgggttcagatgtcaaggtttttgcgcaaaccggggcgggtagtctgcttgcacagcgcatgcaccgctattgggaaagcctcgcccattgccccaagccggttatcgcggccgtagagggatatgccctaggtggcgggtgcgagctggcaatgcacgccgacattattgtagctgcaagaaccgccagtttcggccagccagaaataaagctcggactgatgcctggagcaggcggcacgcagcgccttttgcgcgcgatcggcaagtacaagactatgctgctcgcattgacgggcgaaatgctgcctgcaacggaagctgaaaaatacggacttgtaagcaggctctcggaagaaggtgaagcgcttgaagaagccttgaaactggcgcggaaaatcgcgcttatgcccgcgttggctgctgaacagataaaggaggcggtcatgtacggcgaggatgcgccgctggaaaccgcactccgcctggagcgcaaggcatttcagctcctgttcgatacggaagacaagcgtgaaggcatcgatgcatttttgaccaagcgcaagccggcattcaaagggcgctga

SEQ ID NO: 29159 - protein, 268 aa, Brucella abortus
MWDGMGNKMSEATDVVIETRPADGVALLELNRPDALNAVNMDVRQKLAASADSLVEDPDIRVIVIAGRGGNFAAGSDVKVFAQTGAGSLLAQRMHRYWESLAHCPKPVIAAVEGYALGGGCELAMHADIIVAARTASFGQPEIKLGLMPGAGGTQRLLRAIGKYKTMLLALTGEMLPATEAEKYGLVSRLSEEGEALEEALKLARKIALMPALAAEQIKEAVMYGEDAPLETALRLERKAFQLLFDTEDKREGIDAFLTKRKPAFKGR

SEQ ID NO: 29160 - DNA, 888 bp, Oryza sativa
  CDS (1)..(888)
atggcggcagatggcgccgtcgaggcgccatctgccacatcagcttggagggcggcaggcatgcgcatcctccgtggaatcctcgccgtctccggccacctcgccggccgccgcgcgccggcgaacaacgtccacctggcactcttctcccgcgccctccaaatcctcgcccagcaggagcccgtccgcctccagaagctctcggcgcccgactccgggatcgtggagatgaggctggagcggccggaggccaggaacgccatcgggagggagatgctccaggggttgcggagcgcgatcgagaaggtgaaggctgacgcgacggcgaacgtcgtgctgctggcgagctccgtcccgaaggttttctgcgctggcgctgatctcaaggcattgtcaattcctacaattgccattgttgagggagctgcttttggcggtgggttagaattggctctttcttgtgatctccgtatatgtggggaaaatgcaacatttagcttgccagaaactggccttgctattattcctggagctgggggaacgcagcgtcttcctaggattgttggaaagtccagagcaaaggaattaatattcactggtcgtagattcgatgcagtagaagctgtaaccatgggagtagtaaactactgtgttcccgctggggaggcttataaaagggctcttgaacttgcccaggagataaatcagaaaggtccgttagcgataagaatggctaagaaggccatcaatcaaggcatggaggtagatctgtccgccggattggctgtcgaagaagaatgctacgagcaagttctgcacactcaagatcgtcttgaaggtctagctgcatttgctgagaaaaggaaacctgtatacacagggaaataa

SEQ ID NO: 29161 - protein, 295 aa, Oryza sativa
MAADGAVEAPSATSAWRAAGMRILRGILAVSGHLAGRRAPANNVHLALFSRALQILAQQEPVRLQKLSAPDSGIVEMRLERPEARNAIGREMLQGLRSAIEKVKADATANVVLLASSVPKVFCAGADLKALSIPTIAIVEGAAFGGGLELALSCDLRICGENATFSLPETGLAIIPGAGGTQRLPRIVGKSRAKELIFTGRRFDAVEAVTMGVVNYCVPAGEAYKRALELAQEINQKGPLAIRMAKKAINQGMEVDLSAGLAVEEECYEQVLHTQDRLEGLAAFAEKRKPVYTGK

SEQ ID NO: 29162 - DNA, 774 bp, Pseudomonas putida
  CDS (1)..(774): transl_table=11
atggcattcgaaaccatcctgttggacattcacggcaaggtcgggctgattaccctcaaccgcccgcaggcactgaatgcgctgaacgcgcagattgttggcgagatcaaccaggccctggaccagctcgagcgtgatccgagcatcggttgtgtggtgctcacgggttcggccaaggcctttgccgctggcgctgacataaaggaaatggccgacctgcaatacccgcagatctacgtcgatgacctgttcagcgatgctgatcgcattgccaaccggcgcaagccgatcattgctgcggtatccggtttcgccttgggtggcggttgcgagctggcgatgatgtgtgactttatccttgccgcggacaacgccaagtttggtcagccggaaatcaaccttggcgtgctgccgggcatgggcggcacccagcggctcacccgtgcggtgggcaaggccaaggccatggaactgtgcctgaccggtcgcctgatgggggccgaagaggctgagcgtgctggcctggtggcgcgcatcgtgccgcaggcagagttggtggaagaggcgctgaaagtagcggcgaccattgccagcaagtcgattccggtgagcatgatggtcaaggagagcgtcaatcgcgcgttcgaagttacccttagcgagggcgtgcgctttgagcgtcgggtgttccatgcggcgttctctaccgaagaccagaaagaaggcatggccgccttcatcgccaagcgcgaggcgcagttcaagaatcgctga

SEQ ID NO: 29163 - protein, 257 aa, Pseudomonas putida
MAFETILLDIHGKVGLITLNRPQALNALNAQIVGEINQALDQLERDPSIGCVVLTGSAKAFAAGADIKEMADLQYPQIYVDDLFSDADRIANRRKPIIAAVSGFALGGGCELAMMCDFILAADNAKFGQPEINLGVLPGMGGTQRLTRAVGKAKAMELCLTGRLMGAEEAERAGLVARIVPQAELVEEALKVAATIASKSIPVSMMVKESVNRAFEVTLSEGVRFERRVFHAAFSTEDQKEGMAAFIAKREAQFKNR

SEQ ID NO: 29164 - DNA, 777 bp, Acinetobacter sp
  CDS (1)..(777): transl_table=11
atggaaaatgaaatattgaatttagatattcaaagtaatggtgtggccattgttgaactacatcgtccagatactagaaatgcattgaatctggaactgcgccaacagctcgcagcaatgtttgagcagctcgctgcatctgatacagtccgcgcaattgtcattactggtggtgaaaaagtatttgcagcaggtgcggatatccgggacttcaccactgcaaaaaccgtagacatgtatttacgccatacggaacagtactggcgggccattattgattgccctaaaccgattgtggctgctgtgaatggatatgcattgggtggtgggtgtgaacttgcaatgcatgcagacatcattattgccggaaaatcagcccagtttggtcagcctgaagtcaaattggggctgatgccaggtgctggtggtacccaacgcttactgcgtgcggtagggaagtttaaagccatgcaaatagtgttaacaggaaagatcttttctgcagaagaagctgacaaaatggggttggtttccgaagtggttgaggatgatcaaacccttgctaaagcggttgaaattgcgacacagattgcccaactctcaccgattgccgttgaacagatcaaagaagtcacaacactaggtgccaatatgccactcgatggtgctttggcattagagcgtaaagccttccaaattttatttgatacacaagatcaaaaagaaggcgtcaatgcctttttcgaaaagcgaagccctcaatatcaaggaaaataa

SEQ ID NO: 29165 - protein, 258 aa, Acinetobacter sp
MENEILNLDIQSNGVAIVELHRPDTRNALNLELRQQLAAMFEQLAASDTVRAIVITGGEKVFAAGADIRDFTTAKTVDMYLRHTEQYWRAIIDCPKPIVAAVNGYALGGGCELAMHADIIIAGKSAQFGQPEVKLGLMPGAGGTQRLLRAVGKFKAMQIVLTGKIFSAEEADKMGLVSEVVEDDQTLAKAVEIATQIAQLSPIAVEQIKEVTTLGANMPLDGALALERKAFQILFDTQDQKEGVNAFFEKRSPQYQGK

SEQ ID NO: 29166 - DNA, 789 bp, Streptomyces griseus subsp
  CDS (1)..(789): transl_table=11
atgaccccacaggagacggcgcccgagggggagccgagccccctgctggtcgagcggcacgggcgggtggccaccctcaccctgaaccggccgcaccgccgcaacgcgatgtccaccgcgatgctggcccgactcgaccacgcgttggggaagctgacggatcagggcggggaggcgccgggggcgctggtgctcaccggcgccggcgggaccttctccagcggcgcggacacccgcgagcccgactggcgcgacctgtcgcgccgcgcggtgcggcgggcccatttccgtacggtgttcgcgatgttgcacgaggcccccttcccggtggtcgcggccgtcgaggggtacgcgctcggcggcggcctcgaactggccctggcctgcgacctggtggtggcgggcgagggtgcgctgttcggccttcccgagctgggggtcggcgccgttccgggcggcggcgcggtccactcactggtgcgccgggccggtcgcggagtggccgcccggatgctgctgatccccggggagcgcgtgcgggcggacgaactcgcccgactgggcgcggtggagcgcaccgtgcccgacggcggtgcgctcgccgaggcgcaggcgctggcggcttccgtggccgccggggatccggcgctcctggaggcgggcgtccggctgttgcgggactccgggcacctggaccgcacggcggcgctcggcgtggagaacggctactggtggcaggccgcgtccgccgcgaaccgggacccctcgccctcctccggacgaccctag

SEQ ID NO: 29167 - protein, 262 aa, Streptomyces griseus subsp
MTPQETAPEGEPSPLLVERHGRVATLTLNRPHRRNAMSTAMLARLDHALGKLTDQGGEAPGALVLTGAGGTFSSGADTREPDWRDLSRRAVRRAHFRTVFAMLHEAPFPVVAAVEGYALGGGLELALACDLVVAGEGALFGLPELGVGAVPGGGAVHSLVRRAGRGVAARMLLIPGERVRADELARLGAVERTVPDGGALAEAQALAASVAAGDPALLEAGVRLLRDSGHLDRTAALGVENGYWWQAASAANRDPSPSSGRP

SEQ ID NO: 29168 - DNA, 783 bp, Bacillus subtilis
  CDS (1)..(783): transl_table=11
atgggagaatctattcttttcactgcaaaaacagaacatattactgtcatcacccttaacaggccccatgcggcaaatgccctttcggcagaaatgcttagagacctgcaatccactctccaagaagtcgaattcaacacgaaaatccgctgcgtcatcctgacaggcgccggtgaaaaagcattctgtgcgggagcagacttgaaagaaagaataaaaatgaaacaagatcaggttctcaaaagtgtttccctcattcacagaaccgctgctttactcgaagccttgccgcagccggtgatagcagccataaacggaagtgctttagggggcgggcttgaattggcattggcatgcgacatccgaatagcagccgagaacgctacgttaggccttccggaaacggctttagccattatcccgggcgcaggagggacacaaagacttccgcgtctgatcggcagaggaaaagcaaaagaactcatttatacaggcagacgcataaccgcacatgaagccaaagagataaaccttgtagagcatgttacggcttcttgtgagcttatggcgaaagcagaggaactggcagaagccatttcagctaacggaccaattgccgtccgccaggctaaattcgcgatcaataaaggattggaaacaaaccttgcaacgggattatcaattgaacaaaaagcatatgaacacacgatcccgacaaaggacaggacagagggacttcaagcctttcaagaaaaaagacgtgccgtatacacgggagaataa

SEQ ID NO: 29169 - protein, 260 aa, Bacillus subtilis
MGESILFTAKTEHITVITLNRPHAANALSAEMLRDLQSTLQEVEFNTKIRCVILTGAGEKAFCAGADLKERIKMKQDQVLKSVSLIHRTAALLEALPQPVIAAINGSALGGGLELALACDIRIAAENATLGLPETALAIIPGAGGTQRLPRLIGRGKAKELIYTGRRITAHEAKEINLVEHVTASCELMAKAEELAEAISANGPIAVRQAKFAINKGLETNLATGLSIEQKAYEHTIPTKDRTEGLQAFQEKRRAVYTGE

SEQ ID NO: 29170 - DNA, 828 bp, Rhodococcus fascians
  CDS (1)..(828): transl_table=11
atgcgttggtcgggccggcgtttgcgtgcacagccacatcaagcagattggaagtccttacacatgagcgattgcgttttgacagagttcgcgggcggcattgccgtcatcactattaatcggccagcctcacgcaacgcggtcaaccgcgaggtagctgaacagattgccgcagcaatcgacgaactggattcacgcgatgatctcgtggtcggaatcttgaccggtgcgggcggatcattctgcgcgggaatggatctgaaagcgttcgtcgacgggaatgtgccgtccgtcgccggccgtggtttcggcggcctggttgaacgacccccgataaagccactgatcgcggctgttgaagggtgggctttggctggcggttgtgagatcgcgctcagcgccgacctcatcgtagcttcccgggaggcgaagttcggcctccctgaggtcaaacgaggccttgtcgccgccggaggaggactgctgcgcctgccgcgggcgattccctaccagatcgccatggaggcggtactgaccggtgacccgatcaccgctgagcgggctcaccacttcggtctgattaacacgctgaccgaacccggtgaggcattggccggggctcgcgaacttgctgcgagaattgccgcaaacgggccacttgcggttcgagtcagcaagaagatcctctcggaggccgtcggctggacggactccgaggggtttgagcgccaaacagcggacactgacggaatcttcgcttccgacgatgcgcaggaaggtgctcgcgcgtttactgagaagcgtgtgcccgtgtggagtgggcgctga

SEQ ID NO: 29171 - protein, 275 aa, Rhodococcus fascians
MRWSGRRLRAQPHQADWKSLHMSDCVLTEFAGGIAVITINRPASRNAVNREVAEQIAAAIDELDSRDDLVVGILTGAGGSFCAGMDLKAFVDGNVPSVAGRGFGGLVERPPIKPLIAAVEGWALAGGCEIALSADLIVASREAKFGLPEVKRGLVAAGGGLLRLPRAIPYQIAMEAVLTGDPITAERAHHFGLINTLTEPGEALAGARELAARIAANGPLAVRVSKKILSEAVGWTDSEGFERQTADTDGIFASDDAQEGARAFTEKRVPVWSGR

SEQ ID NO: 29172 - DNA, 894 bp, Escherichia coli; identical to SEQ ID NO: 28784
  CDS (109)..(894): transl_table=11

SEQ ID NO: 29173 - protein, 261 aa, Escherichia coli
MSESLHLTRNGSILEITLDRPKANAIDAKTSFEMGEVFLNFRDDPQLRVAIITGAGEKFFSAGWDLKAAAEGEAPDADFGPGGFAGLTEIFNLDKPVIAAVNGYAFGGGFELALAADFIVCADNASFALPEAKLGIVPDSGGVLRLPKILPPAIVNEMVMTGRRMGAEEALRWGIVNRVVSQAELMDNARELAQQLVNSAPLAIAALKEIYRTTSEMPVEEAYRYIRSGVLKHYPSVLHSEDAIEGPLAFAEKRDPVWKGR

SEQ ID NO: 29174 - DNA, 786 bp, Proteus sp
  CDS (1)..(786): transl_table=11
atgagccaatcattacatctaacaacacgtggttcagtgcttgagattatattagatagaccgaaagccaatgcaattgatgccaaaaccagccatgaaatgggtgaggtatttatgcgttttcgtgatgatcctagtttacgcgttgccattattacaggtgctggcgaacgattcttttgtgccggctgggatttgaaagccgcagctgaaggagaagcccctgatgcagactttggtgctggtggctttgcgggcttaacggaattatttgatcttaataaacctgtcattgctgccattaacggctatgcttttgggggtggctttgaattagcactggcagccgacatgataatttgttcagacaatgcttcttttgccttgccagaagcacaattaggtattgtccctgacagtggcggtgttttacgtttacctaaacgcttacctcctgcaattgtcaatgaaatgctcatgactggccgtcgtatgaatgcacaagaggcgctacgctggggcattgctaaccgcgttgtcagtgcgactgaactgatggatagcgcccgtgaattagccgatcagatcgccaacagtgcgccacttgcagtcgctgcattaaaagagatctaccgtgccactagcgagctttcgattgaagaaggctacaaattaatgcgcagtggtgttctaaaatattacccacgtgttttacattcagaagatgcactcgaaggcccgctagcctttgccgaaaaacgctcacctgaatggaaaggacggtaa

SEQ ID NO: 29175 - protein, 261 aa, Proteus sp
MSQSLHLTTRGSVLEIILDRPKANAIDAKTSHEMGEVFMRFRDDPSLRVAIITGAGERFFCAGWDLKAAAEGEAPDADFGAGGFAGLTELFDLNKPVIAAINGYAFGGGFELALAADMIICSDNASFALPEAQLGIVPDSGGVLRLPKRLPPAIVNEMLMTGRRMNAQEALRWGIANRVVSATELMDSARELADQIANSAPLAVAALKEIYRATSELSIEEGYKLMRSGVLKYYPRVLHSEDALEGPLAFAEKRSPEWKGR

SEQ ID NO: 29176 - DNA, 786 bp, Salmonella typhi
  CDS (1)..(786): transl_table=11
atgagtgagtcattacatctgacccgtaacggcccgatcctggaaattaccctcgaccgacctaaagcgaatgccattgatgcgaaaaccagttttgcgatgggtgaagcttttcttaatttccgtgacgacccggaattacgcgtagcaatcattaccggcggcggggagaaattcttttctgcgggctgggacttaaaagcggcagcggaaggtgaagcgccggatgccgattttggtcccggcggctttgccggtttaaccgaaatatttgacctcgataagccggttatcgccgcggtgaacggctacgcatttggtggcggttttgagctggcgctggcggcagactttattgtctgcgccgaaaacgccagcttcgcgctgccggaagccaagctcggcatcgtgcctgacagcggcggcgtattgcgtctgcctaagctgctgccaccggctatcgtcaacgaaatggtaatgaccggcagacgaatgagcgccgaagaagcgctgcgttgggggatcgtgaaccgcgttgtcagccagagcgaactgatggagagcgcgcgcgaactggcgcaacaactggtcaatagcgctccgctggctatcgcggcgctgaaagagatttatcgcgcgaccagtgaaatgccggttgaagaaggctaccgctacatccgcagcggcgtgctgaaacattatccgtcggtactgcattcagaagatgcgctcgaaggaccgcaggcatttgccgaaaaacgcgctccggtgtggaaaggtcgttaa

SEQ ID NO: 29177 - protein, 261 aa, Salmonella typhi
MSESLHLTRNGPILEITLDRPKANAIDAKTSFAMGEAFLNFRDDPELRVAIITGGGEKFFSAGWDLKAAAEGEAPDADFGPGGFAGLTEIFDLDKPVIAAVNGYAFGGGFELALAADFIVCAENASFALPEAKLGIVPDSGGVLRLPKLLPPAIVNEMVMTGRRMSAEEALRWGIVNRVVSQSELMESARELAQQLVNSAPLAIAALKEIYRATSEMPVEEGYRYIRSGVLKHYPSVLHSEDALEGPQAFAEKRAPVWKGR

SEQ ID NO: 29178 - DNA, 786 bp, Salmonella typhimurium
  CDS (1)..(786): transl_table=11
atgagtgagtcattacatctgacccgtaacggcccgatcctggaaattaccctcgaccgacctaaagcgaatgccattgacgccaaaaccagctttgcaatgggtgaagcttttcttaatttccgtgacgatccggaattacgcgtagcaatcattaccggcggcggggagaaattcttttctgctggctgggacttaaaagcggcagcggaaggtgaagcgccggatgccgattttggtcccggcggctttgccggtttaaccgaaatatttgacctcgataagccggttatcgccgcggtgaacggctacgcgtttggcggcggttttgagctggcgctggcggcggactttattgtctgcgccgaaaacgccagcttcgcgctgccggaagccaagctcggcatcgtgcctgacagcggcggcgtattgcgtctgcctaagctgctgccaccggctatcgtcaacgaaatggtaatgaccggcagacgaatgagcgccgaagaagcgctgcgttggggagtcgtgaaccgcgttgtcagccagagcgaactgatggagagtgcgcgcgaactggcgcaacaactggtcaatagcgccccgctggctatcgcggcgctgaaagagatttatcgcgcgaccagcgaaatgccggtagaagaaggctaccgctacatccgcagcggcgtactgaagcattatccgtcggtgctgcattcagaagatgcgctcgaaggaccgcaggcatttgccgaaaaacgcgatccggtgtggaaaggtcgttaa

SEQ ID NO: 29179 - protein, 261 aa, Salmonella typhimurium
MSESLHLTRNGPILEITLDRPKANAIDAKTSFAMGEAFLNFRDDPELRVAIITGGGEKFFSAGWDLKAAAEGEAPDADFGPGGFAGLTEIFDLDKPVIAAVNGYAFGGGFELALAADFIVCAENASFALPEAKLGIVPDSGGVLRLPKLLPPAIVNEMVMTGRRMSAEEALRWGVVNRVVSQSELMESARELAQQLVNSAPLAIAALKEIYRATSEMPVEEGYRYIRSGVLKHYPSVLHSEDALEGPQAFAEKRDPVWKGR

SEQ ID NO: 29180 - DNA, 894 bp, Shigella flexneri
  CDS (109)..(894): transl_table=11
atgaaacgtcagggaactaccctgccagctaataatcacgccctaaaacaatatgcattttttgcagggatgttgtcgtccctaaaaaagcaaaaatggagaaaaggaatgagtgaatcattacatctgacccgcaatggatcaattctggaaattacccttgatcgcccaaaagcgaatgctattgatgcaaaaaccagctttgaaatgggcgaagtatttctaaatttccgtgacgatccgcaattacgtgtcgccattattaccggtgccggagagaaattcttttccgcgggctgggatttaaaagcggcagcagaaggcgaagcaccggatgctgactttggcccgggtggttttgcgggattaaccgaaattttcaatctcgacaaaccagttatcgcagctgtgaacggctacgcctttggcggcggtttcgaactggcgctggcggcagattttattgtttgtgccgataacgccagcttcgccctgccggaagccaaactgggcatcgttcctgacagcggcggtgtgctgcgtctgccgaagatcctgccgcctaccatcgtcaatgaaatggtgatgacaggcagacgaatgggcgcagaagaggcgctgcgttgggggatagtcaaccgcgtggttagccaggcggaactgatggataacgcccgcgaactggctcagcagctggttaacagcgccccgctggcgattgcggcgctgaaagagatctaccgcaccaccagcgaaatgccggtagaagaagcgtatcgctatattcgcagcggcgtgttgaaacactatccatcggttctgcattcggaagatgccattgaagggccgctggcgtttgccgagaagcgcgatccggtgtggaaaggacgttaa

SEQ ID NO: 29181 - protein, 261 aa, Shigella flexneri
MSESLHLTRNGSILEITLDRPKANAIDAKTSFEMGEVFLNFRDDPQLRVAIITGAGEKFFSAGWDLKAAAEGEAPDADFGPGGFAGLTEIFNLDKPVIAAVNGYAFGGGFELALAADFIVCADNASFALPEAKLGIVPDSGGVLRLPKILPPTIVNEMVMTGRRMGAEEALRWGIVNRVVSQAELMDNARELAQQLVNSAPLAIAALKEIYRTTSEMPVEEAYRYIRSGVLKHYPSVLHSEDAIEGPLAFAEKRDPVWKGR

SEQ ID NO: 29182 - DNA, 774 bp, Mycobacterium bovis
  CDS (1)..(774): transl_table=11
atgacgtacgaaaccatcctggtcgagcgcgatcagcgagttggcattatcacgctgaaccgtccccaggcactgaacgcgctcaacagccaggtgatgaacgaggtcaccagcgctgcaaccgaactggacgatgacccggacattggggcgatcatcatcaccggttcggccaaagcgtttgccgccggagccgacatcaaagaaatggccgacctgacgttcgccgacgcgttcaccgccgacttcttcgccacctggggcaagctggccgccgtgcgcaccccgacgatcgccgcggtggcgggatacgcgctcggcggtggctgcgagctggcgatgatgtgcgacgtgctgatcgccgccgacaccgcgaagttcggacagcccgagataaagctgggcgtgctgccaggcatgggcggctcccagcggctgacccgggctatcggcaaggctaaggcgatggacctcatcctgaccgggcgcaccatggacgccgccgaggccgagcgcagcggtctggtttcacgggtggtgccggccgacgacttgctgaccgaagccagggccactgccacgaccatttcgcagatgtcggcctcggcggcccggatggccaaggaggccgtcaaccgggctttcgaatccagtttgtccgaggggctgctctacgaacgccggcttttccattcggctttcgcgaccgaagaccaatccgaaggtatggcagcgttcatcgagaaacgcgctccccagttcacccaccgatga

SEQ ID NO: 29183 - protein, 257 aa, Mycobacterium bovis
MTYETILVERDQRVGIITLNRPQALNALNSQVMNEVTSAATELDDDPDIGAIIITGSAKAFAAGADIKEMADLTFADAFTADFFATWGKLAAVRTPTIAAVAGYALGGGCELAMMCDVLIAADTAKFGQPEIKLGVLPGMGGSQRLTRAIGKAKAMDLILTGRTMDAAEAERSGLVSRVVPADDLLTEARATATTISQMSASAARMAKEAVNRAFESSLSEGLLYERRLFHSAFATEDQSEGMAAFIEKRAPQFTHR

SEQ ID NO: 29184 - DNA, 774 bp, Mycobacterium leprae
  CDS (1)..(774): transl_table=11
atgaagtacgacacaatcctcgttgacggctaccagcgagttggcatcatcacactgaaccggccacaggctctgaacgcactcaatagccagatgatgaacgaaatcactaatgcagcaaaagaattagacatcgatcccgatgttggggcgatcctcattactggttcacccaaggtttttgctgccggcgccgacatcaaagagatggccagtttaacgttcaccgacgcatttgacgctgattttttctccgcatggggcaagctggccgccgtgcgtaccccaatgatcgccgcggtggccggatatgcactcggtggtggctgcgagttagcgatgatgtgcgatctgcttatcgccgccgacacagcgaaattcggtcagccagaaatcaaactcggcgttctgcccggtatgggaggctcccagcgcctaacccgagcgatcggcaaggccaaagcaatggacctgatcttgaccggacgcaccatcgacgcggccgaagccgaacgcagcggcctggtttcgcgggtggtgctggccgacgatttactgcccgaggccaaggctgtcgctactaccatttcgcagatgtctcggtcggctacccggatggccaaggaagcagtcaatcggtctttcgaatccacgctggctgaaggattgctccacgaacgccggcttttccattcgaccttcgtgacagacgaccagtccgagggcatggcggcattcatcgagaaacgcgctccccagtttacccaccgatga

SEQ ID NO: 29185 - protein, 257 aa, Mycobacterium leprae
MKYDTILVDGYQRVGIITLNRPQALNALNSQMMNEITNAAKELDIDPDVGAILITGSPKVFAAGADIKEMASLTFTDAFDADFFSAWGKLAAVRTPMIAAVAGYALGGGCELAMMCDLLIAADTAKFGQPEIKLGVLPGMGGSQRLTRAIGKAKAMDLILTGRTIDAAEAERSGLVSRVVLADDLLPEAKAVATTISQMSRSATRMAKEAVNRSFESTLAEGLLHERRLFHSTFVTDDQSEGMAAFIEKRAPQFTHR

SEQ ID NO: 29186 - DNA, 774 bp, Rhizobium meliloti
  CDS (1)..(774): transl_table=11
atgagttacgagacgttgctggtcgaaacgcagggccgcgtgggcctgatcacgctcaaccgtccgcaggcgctcaatgcgctgaatgcggtgctgatgcgcgagctcgatgccgcgctgaaggccttcgacgccgacagggccgtcggcgccatcgtccttgccggctccgagaaggcctttgccgccggcgccgacatcaaggagatgcaggggctcgatttcgtcgacggttacctcgccgatttccttggcggctgggagcatgtcgcgaacgcccgcaaaccgatgatcgccgccgtatccggtttcgcgctcggcggtggctgcgagctcgccatgatgtgcgacttcatcatcgcctccgaaacggcgaagttcggccagccggagattacgcttggcgtcattcccggcatgggtggatcgcagcgcctgacccgcgcagtcggcaaggcgaaggccatggacctcattctcaccggccgcatgatggacgcggcggaggcggagcgctccgggctggtttcgcgcgtggtggctccggacaggctcctggaggaggcgctcggcgccgcggagaagatcgcgtcattctcgctgccggcggcgatgatggccaaggaggccgtcaaccgctctctggaactgacgctcgccgagggcctgcgcttcgagcggcggctcttccagtcgcttttcgcaacggaggaccagaaagagggcatggccgccttcgtcgccaagcgcaaagccgaattcaaacacagatga

SEQ ID NO: 29187 - protein, 257 aa, Rhizobium meliloti
MSYETLLVETQGRVGLITLNRPQALNALNAVLMRELDAALKAFDADRAVGAIVLAGSEKAFAAGADIKEMQGLDFVDGYLADFLGGWEHVANARKPMIAAVSGFALGGGCELAMMCDFIIASETAKFGQPEITLGVIPGMGGSQRLTRAVGKAKAMDLILTGRMMDAAEAERSGLVSRVVAPDRLLEEALGAAEKIASFSLPAAMMAKEAVNRSLELTLAEGLRFERRLFQSLFATEDQKEGMAAFVAKRKAEFKHR

SEQ ID NO: 29188 - DNA, 816 bp, Bacillus subtilis
  CDS (1)..(816): transl_table=11
atggctgaatggaaaacaaaacggacatacgatgagatattgtatgaaacgtataatggcattgcaaaaataacaatcaaccgacctgaggtacataatgcgtttacccctaaaacggttgctgaaatgattgatgcgtttgctgacgcaagagacgaccaaaacgttggggttatcgtgcttgccggtgcaggggacaaagcattttgttctggcggagaccaaaaagtgcgcggccacggtggatatgtaggagacgaccagatccctcgtcttaacgtattggatcttcagcgtttaatccgcgtcatcccgaaaccggttgttgcgatggtgtccggatatgcgatcggcggaggccatgtgcttcacatcgtatgtgacttgacaattgctgcggacaacgcaatttttggacaaacaggccctaaagtgggaagcttcgatgcaggttacggttctggctacctggctcgaattgtaggacataaaaaagcacgtgaaatctggtacctatgccgtcagtacaacgcacaggaagcactggacatgggtcttgtcaacacagtcgttcctttggaacagcttgaagaagaaacgattaaatggtgtgaagaaatgcttgaaaaaagcccgaccgcactgcgctttcttaaagctgcgtttaacgcggacacagacggacttgctggaattcagcagtttgcaggggatgctacccttctttactacacaacagatgaagcaaaagaaggccgtgattcctttaaggaaaaacgcaaacctgatttcggacagttccctcgttttccgtga

SEQ ID NO: 29189 - protein, 271 aa, Bacillus subtilis
MAEWKTKRTYDEILYETYNGIAKITINRPEVHNAFTPKTVAEMIDAFADARDDQNVGVIVLAGAGDKAFCSGGDQKVRGHGGYVGDDQIPRLNVLDLQRLIRVIPKPVVAMVSGYAIGGGHVLHIVCDLTIAADNAIFGQTGPKVGSFDAGYGSGYLARIVGHKKAREIWYLCRQYNAQEALDMGLVNTVVPLEQLEEETIKWCEEMLEKSPTALRFLKAAFNADTDGLAGIQQFAGDATLLYYTTDEAKEGRDSFKEKRKPDFGQFPRFP

SEQ ID NO: 29190 - DNA, 786 bp, Escherichia coli
  CDS (1)..(786): transl_table=11
atgtcttatcagtatgttaacgttgtcactatcaacaaagtggcggtcattgagtttaactatggccgaaaacttaatgccttaagtaaagtctttattgatgatcttatgcaggcgttaagcgatctcaaccggccggaaattcgctgtatcattttgcgcgcaccgagtggatccaaagtcttctccgcaggtcacgatattcacgaactgccgtctggcggtcgcgatccgctctcctatgatgatccattgcgtcaaatcacccgcatgatccaaaaattcccgaaaccgatcatttcgatggtggaaggtagtgtttggggtggcgcatttgaaatgatcatgagttccgatctgatcatcgccgccagtacctcaaccttctcaatgacgcctgtaaacctcggcgtcccgtataacctggtcggcattcacaacctgacccgcgacgcgggcttccacattgtcaaagagctgatttttaccgcttcgccaatcaccgcccagcgcgcgctggctgtcggcatcctcaaccatgttgtggaagtggaagaactggaagatttcaccttacaaatggcgcaccacatctctgagaaagcgccgttagccattgccgttatcaaagaagagctgcgtgtactgggcgaagcacacaccatgaactccgatgaatttgaacgtattcaggggatgcgccgcgcggtgtatgacagcgaagattaccaggaagggatgaacgctttcctcgaaaaacgtaaacctaatttcgttggtcattaa

SEQ ID NO: 29191 - protein, 261 aa, Escherichia coli
MSYQYVNVVTINKVAVIEFNYGRKLNALSKVFIDDLMQALSDLNRPEIRCIILRAPSGSKVFSAGHDIHELPSGGRDPLSYDDPLRQITRMIQKFPKPIISMVEGSVWGGAFEMIMSSDLIIAASTSTFSMTPVNLGVPYNLVGIHNLTRDAGFHIVKELIFTASPITAQRALAVGILNHVVEVEELEDFTLQMAHHISEKAPLAIAVIKEELRVLGEAHTMNSDEFERIQGMRRAVYDSEDYQEGMNAFLEKRKPNFVGH

SEQ ID NO: 29192 - DNA, 768 bp, Escherichia coli
  CDS (1)..(768): transl_table=11
atgagcgaactgatcgtcagccgtcagcaacgagtattgttgctgacccttaaccgtcccgccgcacgtaatgcgctaaataatgccctgctgatgcaactggtaaatgaactggaagctgcggctaccgataccagcatttcggtctgtgtgattaccggtaatgcacgcttttttgccgctggggccgatctcaacgaaatggcagaaaaagatctcgcggccaccttaaacgatacacgtccgcagctatgggcgcgattgcaggcctttaataaaccacttatcgcagccgtcaatggttacgcgcttggggcgggttgcgaactggcattgttgtgcgatgtggtggttgccggagagaacgcgcgttttgggttgccggaaatcactctcggcatcatgcctggcgcaggcggaacgcaacgtttaatccgtagtgtcggtaaatcgttagccagcaaaatggtgctgagcggagaaagtatcaccgctcagcaagcacagcaggccgggctggttagcgacgtcttccccagcgatttaaccctcgaatacgccttacagctggcatcgaaaatggcacgtcactcgccgctggccttacaagcggcaaagcaagcgctgcgccagtcgcaggaagtggctttgcaagccggacttgcccaggagcgacagttattcaccttgctggcggcaacagaagatcgtcatgaaggcatctccgctttcttacaaaaacgcacgcccgactttaaaggacgctaa

SEQ ID NO: 29193 - protein, 255 aa, Escherichia coli
MSELIVSRQQRVLLLTLNRPAARNALNNALLMQLVNELEAAATDTSISVCVITGNARFFAAGADLNEMAEKDLAATLNDTRPQLWARLQAFNKPLIAAVNGYALGAGCELALLCDVVVAGENARFGLPEITLGIMPGAGGTQRLIRSVGKSLASKMVLSGESITAQQAQQAGLVSDVFPSDLTLEYALQLASKMARHSPLALQAAKQALRQSQEVALQAGLAQERQLFTLLAATEDRHEGISAFLQKRTPDFKGR

SEQ ID NO: 29194 - DNA, 789 bp, Escherichia coli
  CDS (1)..(789): transl_table=11
atgatggaattcatcctcagtcatgtagaaaagggcgtgatgacactaacgctcaaccgcccggaacgcctgaacagttttaatgatgagatgcacgcacaactggcagagtgcctgaaacaggtcgagcgcgacgacactatccgttgcctgttacttacaggtgccgggcgcggattttgtgctggtcaggatcttaacgatcgtaacgttgatcccacaggccccgcaccggatttagggatgtcagttgaacgtttctataacccactggtacgtcgcctggcaaaactgccaaaaccggtgatctgtgcagtcaatggcgtggcggcaggggcaggcgcaacactggcactggggggcgacatcgttattgctgcccgttcagcaaaattcgtcatggcgtttagtaagttaggcttaatacccgattgcggtggaacctggttactgccacgcgttgccggacgagcgcgcgccatggggctggcactgctggggaatcaactgagtgctgaacaggcgcacgaatgggggatgatctggcaggttgttgatgatgaaacgctggcagataccgcgcaacagctggcacggcatctggcgacacaaccgacatttggtcttggacttatcaagcaagcgataaatagcgctgaaaccaatacgctcgatacgcaactggatctggaacgtgactatcagcgacttgccggacggagcgcagattatcgtgaaggtgtcagtgcgttcctggctaaacgctcaccgcagttcacggggaaatag

SEQ ID NO: 29195 - protein, 262 aa, Escherichia coli
MMEFILSHVEKGVMTLTLNRPERLNSFNDEMHAQLAECLKQVERDDTIRCLLLTGAGRGFCAGQDLNDRNVDPTGPAPDLGMSVERFYNPLVRRLAKLPKPVICAVNGVAAGAGATLALGGDIVIAARSAKFVMAFSKLGLIPDCGGTWLLPRVAGRARAMGLALLGNQLSAEQAHEWGMIWQVVDDETLADTAQQLARHLATQPTFGLGLIKQAINSAETNTLDTQLDLERDYQRLAGRSADYREGVSAFLAKRSPQFTGK

SEQ ID NO: 29196 - DNA, 876 bp, Oryza sativa
  CDS (1)..(876)
atggccggcagcggcggcggcgaccgcggctcgcccgaggcggagctccggcgcgggttcaagacgctcgccgtgacgcggcccgacccgtccgcggcggtctacgaggtccgcctcaaccgccccacccggctcaacgccctcagcccggacgccttcgcggagatcccgcgcgccatggcgctcctcgaccgcgcccccgccgcgcgcgccgtcgtgctctccgccgccggcccgcacttctgcgccggcatcgagctcggctcccccgggagccccgccacggccccctccggcgaccccgcgcccgcggccgccgaggggctccgccgcgccatcctggagatgcaggcggcgctcacggccatcgagcggtgccggaagccggtggtcgcggcggtgcacggcgcctgcgtcggcggcggcgtcgaggtcgtggccgcctgcgacatacggtgctgctccaaggacgccacgttcgtgctcagggaggtggacatggccatcgtcgccgacctcggcgcgctgcagcggcttccgcggatcgtcgggtacgggaacgccgccgacctcgcgctcaccggccgcaagatcaccgccatggaggccaaggagatggggctcgtgaccagggtgttcaattccaagcaagaattggatgctggcgttgcaaagattgcaaaagaaatatctgagaagtcagcatgggcagtgatgggaacaaaggctgttttgctgagaagcagggatataacagtagagcagggcctggagcatgttgcaacatggaacgccgcaatgctgagatctaatgacctggaggaggctatccaagccttcctagagaagcggaagccagtcttctccaaactgtaa

SEQ ID NO: 29197 - protein, 291 aa, Oryza sativa
MAGSGGGDRGSPEAELRRGFKTLAVTRPDPSAAVYEVRLNRPTRLNALSPDAFAEIPRAMALLDRAPAARAVVLSAAGPHFCAGIELGSPGSPATAPSGDPAPAAAEGLRRAILEMQAALTAIERCRKPVVAAVHGACVGGGVEVVAACDIRCCSKDATFVLREVDMAIVADLGALQRLPRIVGYGNAADLALTGRKITAMEAKEMGLVTRVFNSKQELDAGVAKIAKEISEKSAWAVMGTKAVLLRSRDITVEQGLEHVATWNAAMLRSNDLEEAIQAFLEKRKPVFSKL

SEQ ID NO: 29198 - DNA, 903 bp, Oryza sativa
  CDS (1)..(903)
atgcgcatcctccggggaatcctcgccgtctccggccacctcgccggccgccgcgcgccggcgaacaacgcccacctggcactcttctcccgcgccctccaaatcctcgcccagcaggagcccgtccgcctccagaagctctcggcgcccgactccgggatcgtggagatgaggctggagcggccggaggccaggaacgccatcgggagggagatgctccaggggttgcggagcgcgatcgagaaggtgaaggctgacgcgacggcgaaagtcgtgctgctggcgagctccgtcccgaaggttttctgcgctggcgctgatctcaaggaaaggaggttaatgagcccttgcgaagttcgcgaatttgtcaattccctaagatctacattcctgtcctttgaggcattgtcaattcctacaattgccattgttgagggagctgcttttggcggtgggttagaattggctctttcttgtgatctccgtatatgtggggaaaatgcaacatttagcttgccagaaactggccttgctattattcctggagctgggggaacgcagcgtcttcctaggattgttggaaagtccagagcaaaggaattaatattcactggtcgtagattcgatgcagtagaagctgtaaccatgggagtagtaaactactgtgttcccgctggggaggcttataaaagggctcttgaacttgcccaggagataaatcagaaaggtccgttagcgataagaatggctaagaaggccatcaatcaaggcatggaggtagatctgtccgccggattggctgtcgaagaagaatgctacgagcaagttctgcacactcaagatcgtcttgaaggtctagctgcatttgctgagaaaaggaaacctgtatacacagggaaataa

SEQ ID NO: 29199 - protein, 300 aa, Oryza sativa
MRILRGILAVSGHLAGRRAPANNAHLALFSRALQILAQQEPVRLQKLSAPDSGIVEMRLERPEARNAIGREMLQGLRSAIEKVKADATAKVVLLASSVPKVFCAGADLKERRLMSPCEVREFVNSLRSTFLSFEALSIPTIAIVEGAAFGGGLELALSCDLRICGENATFSLPETGLAIIPGAGGTQRLPRIVGKSRAKELIFTGRRFDAVEAVTMGVVNYCVPAGEAYKRALELAQEINQKGPLAIRMAKKAINQGMEVDLSAGLAVEEECYEQVLHTQDRLEGLAAFAEKRKPVYTGK

SEQ ID NO: 29200 - DNA, 807 bp, Oryza sativa
  CDS (1)..(807)
atggccgccacatcgccggactccggcgacctcatcctggtcgagccggccaagccggggtcccgggtcgccgtcgtcaccatcaaccggcccaaagcgctgaacgcgctgacgcggcccatgatggtctcactggccgcggcgttccggcggctggacgccgacgacggggtggcggcggtggtgctcgcggggcgcggccgcgcgttctgctccggcgtggacctgaccgctgcggaggaggtgttcaagggcgacgtgaaggatcccgccgccgaccccgtcgtccagatggagcgctgtcgcaagcccatcgtcggcgccatcgccggattcgccgtcaccgccggatttgagatcgccctcgcctgcgacatcctagtggccggccgctccgctaagttcatcgacacccacgccaagtttgggatattcccttcttggggtctttcacagaagctttctcgtgtcattggaccaaatagagcacgggaagtgtcgttaacttgcatgcctatcacagctgaaatggcggagaagtggggtcttgttaaccacattgtggatgatacccaggtgctgagtaaggcaatagaggtctgtgaggccattgcaaggaacaatcgcaacttggttgtgttgtataaatctgttataaatgacgggctccagctggacttggaacatgctcgagctcttgaaaaggaaagagctcatgactattacaatggtatgacaaaagagcaattcgcaagtatgcagaaatttatacagggccggagttcgaagccaccatcaaagctgtga

SEQ ID NO: 29201 - protein, 268 aa, Oryza sativa
MAATSPDSGDLILVEPAKPGSRVAVVTINRPKALNALTRPMMVSLAAAFRRLDADDGVAAVVLAGRGRAFCSGVDLTAAEEVFKGDVKDPAADPVVQMERCRKPIVGAIAGFAVTAGFEIALACDILVAGRSAKFIDTHAKFGIFPSWGLSQKLSRVIGPNRAREVSLTCMPITAEMAEKWGLVNHIVDDTQVLSKAIEVCEAIARNNRNLVVLYKSVINDGLQLDLEHARALEKERAHDYYNGMTKEQFASMQKFIQGRSSKPPSKL

SEQ ID NO: 29202 - DNA, 1101 bp, Brassica napus
  CDS (1)..(1101)
atggccgtagaatctcactctcagattttagtggaagagaaacctagtgttagaatcttgacactaaacagaccaaagcagctgaatgctctgtctttgaacatggtcactcggttgctgcaactgtttcttgcatttgaggtggactctactgtcaaacttgtcatcctaaagggtcagggaagagctttttgtgccggtggtgatgtttcagctgttgttcgtgacatcggactaggcaaatggagacgcagtgctgatttcatgtcacttgaatatactctcaactacgttatggccacatattgtaaagctcagatttcaattttaaatggtattgtcatgggaggtggagctggtgtctgcgtccacggtcgatttcgtattgcaacagagaacacggtttttgccatgcctgagacagctctagggctatttccagatgtaggcgcctcctacttcttgtcaagactctctggattttttggagagtatgttggcctcacaggagctaggttaaatggtgctgaaatgcttgcttgtggtcttgcaactcattttgtgccttcaacgaggttgactgctttacaagcagatctttgcaaagttggctcaagtgatccagttacctttgcctcaacaattctcgatgcatacactcaacatacacatccggaacgtcagagtgctttctgtaggttagatgttattaataggtgcttctccagaagaacaatcgaagaaattatgtctgcacttgagatagaggccactcataaaccagatgactggatctcagctaccattggagcactgaagaaagcttcaccagcaagccttaaaatcactcttagatcgataagagaaggacgagtgcaaggtgtggggcagtgtcttatccgtgaggatagaatggtgtctcatgtgatgaagggagatataagcaaagattttgtggagtgggagccaaggagactagaggatatgaaggatatcatggtagagcagtacttcaagagagtggaagaagaggatggatgggaggatctaaagcttcctcctaggaaacacttgcctgcttcagcgatcgcaaagctgtaa

SEQ ID NO: 29203 - protein, 366 aa, Brassica napus
MAVESHSQILVEEKPSVRILTLNRPKQLNALSLNMVTRLLQLFLAFEVDSTVKLVILKGQGRAFCAGGDVSAVVRDIGLGKWRRSADFMSLEYTLNYVMATYCKAQISILNGIVMGGGAGVCVHGRFRIATENTVFAMPETALGLFPDVGASYFLSRLSGFFGEYVGLTGARLNGAEMLACGLATHFVPSTRLTALQADLCKVGSSDPVTFASTILDAYTQHTHPERQSAFCRLDVINRCFSRRTIEEIMSALEIEATHKPDDWISATIGALKKASPASLKITLRSIREGRVQGVGQCLIREDRMVSHVMKGDISKDFVEWEPRRLEDMKDIMVEQYFKRVEEEDGWEDLKLPPRKHLPASAIAKL

SEQ ID NO: 29204 - DNA, 831 bp, Brassica napus
  CDS (1)..(831)
atggaatcctacaaaaccctcgaaatcgttcgcaagaacaccgactcctccgtgttccacctcatcctcaacaggccgtcgcagctcaacgccctctccctcgacttcttcgacgaactccccgaagccctatcctccctcgaccaaaacccagacgtctccgtcatcatcctctccggcgccggaaaacacttctgctccggcatcgacctcgcttccctctcctcgatctcggcccaagcctcctcaggcggcgacagagggcgctcgagcgagggtctacgccgcaggatcaaatcgatgcaggcggcgataaccgccgtggaggagtgccggaagcctgtgatcgcagctgtgcacggcgcgtgtatcggagggggagtcgatctcgtcacggcgtgtgacgttaggtactgctccgaggaggctttcttctcgatcaaggaggttgatctagcgatcgtcgcggatctcgggactctccagcggttgccgagaatcgtcgggcacgcgaaggctatggagttggcgttgacggcgaggcgattctcggggagtgaagcgaaggatcttggtcttgtttctcaggtttttggatctaagtcggagcttgataaaggcgtcacgatgatcgctgaaagaatagcagcgaagtctcctttagctgtgtcagggacgaaggctgtgttgttgagaagcagagagatgagtgtagaacaaggtcttgattatgtagcaacttggaactcgggtatgcttatatcgaacgatctcaacgaagctgtctctgcgcagatgatgaaaagacaacctcgtttctctaaactgtga

SEQ ID NO: 29205 - protein, 276 aa, Brassica napus
MESYKTLEIVRKNTDSSVFHLILNRPSQLNALSLDFFDELPEALSSLDQNPDVSVIILSGAGKHFCSGIDLASLSSISAQASSGGDRGRSSEGLRRRIKSMQAAITAVEECRKPVIAAVHGACIGGGVDLVTACDVRYCSEEAFFSIKEVDLAIVADLGTLQRLPRIVGHAKAMELALTARRFSGSEAKDLGLVSQVFGSKSELDKGVTMIAERIAAKSPLAVSGTKAVLLRSREMSVEQGLDYVATWNSGMLISNDLNEAVSAQMMKRQPRFSKL

SEQ ID NO: 29206 - DNA, 1020 bp, Glycine max
  CDS (1)..(1020)
atggcggagaacaacaacaaccaccaccttgaaaccgccaccagaaggcttgcctctgtgaccaaccacctcactccttcttcttatcacaacgcacccggcgaactcgccccgtgcctcacttccggtgggaacaacagcttccgccgcgtccacggagaagttccatcccacgacgtcgtttggaggatcgtcgcctccgaccacgacaactccggcaaggacttcaccgacattgtctacgagaaggccgtcggggaaggaatagccaagataagtattaataggccagagagaaggaatgcgttccgaccccacacggtgaaggagcttatgcgtgctttcactgatgccagggatgatagctctattggggtcgtcattctcactggcaagggaaccgaagcattttgtagtggtggtgaccaggctttgaggactaacgatggctattctgataatggaagtttcagtagccttaatgtgttagacttgcaggtgcagatacgccgcctccctaaaccagtgattgcaatggtagcaggttatgctgttggaggagggcatgtattgcatatggtctgtgatctaactattgcagcagataatgctatctttggccaaactggtcccaaggttggaagctttgatgctggttatggaagttctatcatgtcccgtttggtaggtccaaaaaaagcacgtgaaatgtggtttctcacaaggttctatgatgctgttgaagcagagaaaatgggccttgtcaacactgttgtaccacttgagaatttagagaaggaaacgataaaatggtgtcgggagatactgaggaacagtccaactgctattcgggtactcaagtcagctcttaatgcagtggatgatggacattccggacttcaggaaattggtggaaatgcaacactgatatactatggcactgaggaagctaaagagggcaagactgcatatatgcaacgtagacggcctgatttttctaagttcaatcggcgaccttaa

SEQ ID NO: 29207 - protein, 339 aa, Glycine max
MAENNNNHHLETATRRLASVTNHLTPSSYHNAPGELAPCLTSGGNNSFRRVHGEVPSHDVVWRIVASDHDNSGKDFTDIVYEKAVGEGIAKISINRPERRNAFRPHTVKELMRAFTDARDDSSIGVVILTGKGTEAFCSGGDQALRTNDGYSDNGSFSSLNVLDLQVQIRRLPKPVIAMVAGYAVGGGHVLHMVCDLTIAADNAIFGQTGPKVGSFDAGYGSSIMSRLVGPKKAREMWFLTRFYDAVEAEKMGLVNTVVPLENLEKETIKWCREILRNSPTAIRVLKSALNAVDDGHSGLQEIGGNATLIYYGTEEAKEGKTAYMQRRRPDFSKFNRRP

SEQ ID NO: 29208 - DNA, 780 bp, Brassica napus
  CDS (1)..(780)
atggatctcatccaagtgaacaaggaatcaggcgggatcggaaccatcacgatcaaccgtccgagatctctcaactctctcacgagagcgatgatggtggatctcgcgcgtgcgttcaaggagatggacgccgatgaatcgatccaggtcgtgattttcaccggagccggtaaatctttctgctccggcgtcgatttgaccgcggcggagtcggttttcaagggagacgtgaaggatccggagaccgacccggtaattcatatggagcggttgagaaaaccgatcatcggagcaattaacggcttcgccatcaccgcggggttcgagctcgccttggcctgcgatattctggtcgcgtccagaggagctaagttcatggatactcacgctaggtttgggatattcccttcttggggactgtctcagaagctgtcgaggatcatcggagcaaacaaagctcgtgaagtttctttaacgtcgatgccgttgacagctgacgtggctgagaagttagggtttgtaaaccacgtggttgaagaaggagaagctttgaagaaagccagaggaatcgcagaggctatcatcaagaatgaacaaggcatggttctgcgtattaagtccgtcatcaatgatggactcaagcttgatcttggtcatgctcttacactcgaaaaggagcgagctcacgcgtactacagtgggatgacaaaggaacagttcaagaagatgcaggagttcatagctggacgtggttccaagaaaccttcttccaagttgtag

SEQ ID NO: 29209 - protein, 259 aa, Brassica napus
MDLIQVNKESGGIGTITINRPRSLNSLTRAMMVDLARAFKEMDADESIQVVIFTGAGKSFCSGVDLTAAESVFKGDVKDPETDPVIHMERLRKPIIGAINGFAITAGFELALACDILVASRGAKFMDTHARFGIFPSWGLSQKLSRIIGANKAREVSLTSMPLTADVAEKLGFVNHVVEEGEALKKARGIAEAIIKNEQGMVLRIKSVINDGLKLDLGHALTLEKERAHAYYSGMTKEQFKKMQEFIAGRGSKKPSSKL

SEQ ID NO: 29210 - DNA, 789 bp, Linum usitatissimum
  CDS (1)..(789)
atggatcagtcggatctaatcttggtgacccgagaaccgaacggcgtagccacgatcactatcaaccgtcccaaatcaatgaattccctcaccagagccatgatggcccgcctcgcccgggagttcaacgccctcggccgcgatgaaacggtgaaggtcatcatcttgaccggcgccgggcgatcgttctgctccggcgtcgatctcacggcggcggaggacgttttcaagggggacgtgaaggatgtcgagaccgacctggtggcgcagatggagctgtgcaagaagcctataattggggcgatcaacgggttcgcggtcaccgccggtttcgagatcgcgctcgcctgcgacgttttgatcgcttctcgaggagctaaattcatggacacccacgccaggtttgggatatttccttcatggggtctttcccagaagctgtcacggctaataggggttaacagagctagggaagtgtccttgacagcggggccgataactgcggagcaggctgagaaatgggggctggtgaatcaccttgtagaagaaggagaatcgctaaagaaagcgcatgaagtggcgggagccatattaaagaacaatcaggacttggtgttgaggtacaaagccgtgattaacgacgggcttaaactggatttgggttctgctctttctcttgagaaggaaagggcgcataagtactacgatgggatgacaaaggagcaattcaagaagatgcaggagtttgtagctggccgcagctcgaagaagccttcttctaagttgtaa

SEQ ID NO: 29211 - protein, 262 aa, Linum usitatissimum
MDQSDLILVTREPNGVATITINRPKSMNSLTRAMMARLAREFNALGRDETVKVIILTGAGRSFCSGVDLTAAEDVFKGDVKDVETDLVAQMELCKKPIIGAINGFAVTAGFEIALACDVLIASRGAKFMDTHARFGIFPSWGLSQKLSRLIGVNRAREVSLTAGPITAEQAEKWGLVNHLVEEGESLKKAHEVAGAILKNNQDLVLRYKAVINDGLKLDLGSALSLEKERAHKYYDGMTKEQFKKMQEFVAGRSSKKPSSKL

SEQ ID NO: 29212 - DNA, 810 bp, Zea mays
  CDS (1)..(810)
atgggcaccgcatcaccggactccggcgaccttatcgaggtggggccggcgaggccgggatctccggtagccgtggtgaccatcaaccggccttcggcgctcaacgcgctgacgaagcccatgatgatctccatggcggctgcgttccggcggctgggtgccgacgacgccgtggcagcggtggtgctcgcgggccgcggtcgcgcgttctgctccggggtggacctgacggcggcggcggaggtgttcaagggcgatgtgaaggacgtcgccacggaccccgtcgtgcagatggagctctgccggaagcccatcgtcggcgccatcgccgggttcgccgtcactgccgggttcgagatcgccctcgcctgcgacatcctcgtcgctggacgctccaccaagttcttggacacccacgccaagtttgggatatttccttcctggggtctttcacagaagctttctcgcatcattgggccgaatagagcaagggaagtgtcactaacttgcatgcctgttactgctgaaatggcagagaggtgggggcttgttaaccacgtcgtggatgataatgaggtgctgagtaaggcgatagaggttgctgaggctattgtgaggaacaaccgcaacttagttgtattgtacaaatcggttataaatgatggatttaagctggatttggagcatgctcaagcacttgagaaggaaagaggtcacaactattacaatggaatgacaaaggaacagttcacgaatatgcagaaattcatccagggccggagttctaagaaaacaccatcaaagctgtag

SEQ ID NO: 29213 - protein, 269 aa, Zea mays
MGTASPDSGDLIEVGPARPGSPVAVVTINRPSALNALTKPMMISMAAAFRRLGADDAVAAVVLAGRGRAFCSGVDLTAAAEVFKGDVKDVATDPVVQMELCRKPIVGAIAGFAVTAGFEIALACDILVAGRSTKFLDTHAKFGIFPSWGLSQKLSRIIGPNRAREVSLTCMPVTAEMAERWGLVNHVVDDNEVLSKAIEVAEAIVRNNRNLVVLYKSVINDGFKLDLEHAQALEKERGHNYYNGMTKEQFTNMQKFIQGRSSKKTPSKL

SEQ ID NO: 29214 - DNA, 801 bp, Helianthus annuus
  CDS (1)..(801)
atggataaaccgtcaccggaaaacttaatcgtcgttaaaaaagatcccgacgggatagcttacgtcacaatcaaccgcccaaagtccttaaactcactaacaagaccgatgatggtggatctggcgcgtgctttcaactctctcagctccgacgactccgtgggcgtcatcatactgtccgggtcgggtcgctcgttctgttcgggcgtggatctgacttctgcagaggatgtgttcaaaggagacgtgaaggatgtggaaacggatccggttgctcagatggagcggtgccggaagcccataatcggggcggtttccgggtttgctgttacggcgggttttgagatctcgcttgcttgtgatattttgattgcttctactgatgctaaatttgttgatacgcatgctagatttgggatatttccttcatggggtctgtcgcaaaagctttcacgcataatagggcctaataaagcccgagaagtgtcgctaacagccaccccgttaactgcagagaaagcagagaagtggggattggtgaaccatgtggttgaaagtagtgaattgttaaagaaagcccgtgaagttgcagaggccattatgaaaaacaatcgggatttggtgttgaggtacaaagcggttataaatgatggtggcaagctagatcttcatcatgctcttttactagagaaggagagagcgcatgaatattacaatgggatgacaaaggagcagttcaagaaaatgcaggaatttatagcagctagaagttcttctagaaaacctgcttctaaattatag

SEQ ID NO: 29215 - protein, 266 aa, Helianthus annuus
MDKPSPENLIVVKKDPDGIAYVTINRPKSLNSLTRPMMVDLARAFNSLSSDDSVGVIILSGSGRSFCSGVDLTSAEDVFKGDVKDVETDPVAQMERCRKPIIGAVSGFAVTAGFEISLACDILIASTDAKFVDTHARFGIFPSWGLSQKLSRIIGPNKAREVSLTATPLTAEKAEKWGLVNHVVESSELLKKAREVAEAIMKNNRDLVLRYKAVINDGGKLDLHHALLLEKERAHEYYNGMTKEQFKKMQEFIAARSSSRKPASKL

SEQ ID NO: 29216 - DNA, 1017 bp, Brassica napus
  CDS (1)..(1017)
atggctgactccaaggaactcggcaccgcgagccgccgtatctccgtcttcaccaatcatctcatccccgtggaaacaattccaactcgcgttcactcagtggaactctctactgcctcgtcgatgaatgacaattaccataaggttcacggtgaagtgccgactcaccaagtcgtttggagaaaagctgatctcgtcggtgacgacggagaaacaaaagagtttgttgacattatatatgagaaagccgtcggtgaagatattgccaagatcactataaaccgtccggagaaaagaaacgcgttccggtctcagactgtgaaggagcttatgcgtgcgtttaacgacgccagagacgatagctctgtaggtgtcatcatactcaccggcaagggaacgaaagcgttttgcagtggtggtgatcaagcgttgaggacaccagatggttatgctgatcccaatgatgttggtcgacttaatgtccttgatctccaggttcaaatccgcagactgccaaaaccagttatcgcaatggctgctggttatgctgttggaggaggacatatcttgcacatggtctgtgatctaaccattgcagctgacaatgctattttcggtcagacgggtcctaaggttggaagttttgatgctggttatggaagttcaatcatgtctcgtctggttggtcctaaaaaggcacgggaaatgtggttcatgacgagattctacacagcttcggaagcagataaaatgggactcatcaatacagttgtaccgctagaggatttggagaaagaaactgtgaaatggtgcagagaaatcttacggaacagccctactgcaatccgtgtgcttaaggcagcactcaatgcagtcgatgatggccatgccggacttcaggggctaggaggtgatgccacgctcttattctatggaaccgaagaaggtatagaaggaagaacagcttatatgcaacgccgaccaccgaacttctctaaatttccccggcgaccttga

SEQ ID NO: 29217 - protein, 338 aa, Brassica napus
MADSKELGTASRRISVFTNHLIPVETIPTRVHSVELSTASSMNDNYHKVHGEVPTHQVVWRKADLVGDDGETKEFVDIIYEKAVGEDIAKITINRPEKRNAFRSQTVKELMRAFNDARDDSSVGVIILTGKGTKAFCSGGDQALRTPDGYADPNDVGRLNVLDLQVQIRRLPKPVIAMAAGYAVGGGHILHMVCDLTIAADNAIFGQTGPKVGSFDAGYGSSIMSRLVGPKKAREMWFMTRFYTASEADKMGLINTVVPLEDLEKETVKWCREILRNSPTAIRVLKAALNAVDDGHAGLQGLGGDATLLFYGTEEGIEGRTAYMQRRPPNFSKFPRRP

SEQ ID NO: 29218 - DNA, 780 bp, Brassica napus
  CDS (1)..(780)
atggatctcatccaagtgaacaaggaatcaggcgggatcggaatcatcacgatcaaccgtccgaaatctctcaactctctcacgagagcgatgatggtggatctcgcgcgcgcgttcaaggagatggacgccgatgaatcgatccaggtcgtgattttcaccggagccggtaaatctttctgctccggcgtcgatttgaccgcggcggagtcggttttcaagggagacgtgaaggatccggagaccgacccggtaattcagatggagcggttgagaaaaccgatcatcggagcaattaacggcttcgccatcaccgcggggttcgagctcgccttggcctgcgatattctggtcgcgtccagaggagctaagttcatggatactcacgctaggtttgggatattcccttcttggggactgtctcagaagctgtcgaggatcatcggagcaaacaaagctcgtgaagtttctttaacgtcgatgccgttgacagctgacgtggctgagaagttagggtttgtaaaccacgtggttgaagaaggagaagctttgaagaaagccagaggaatcgcagaggctatcatcaagaatgaacaaggcatggttctgcgtattaagtccgtcatcaatgatggactcaagcttgatcttggtcatgcccttacactcgaaaaggagcgagctcacgcgtactacagtgggatgacaaaggaacagttcaagaagctgcaggagttcatagctggacgtggttccaagaaaccttcttccaagttatag

SEQ ID NO: 29219 - protein, 259 aa, Brassica napus
MDLIQVNKESGGIGIITINRPKSLNSLTRAMMVDLARAFKEMDADESIQVVIFTGAGKSFCSGVDLTAAESVFKGDVKDPETDPVIQMERLRKPIIGAINGFAITAGFELALACDILVASRGAKFMDTHARFGIFPSWGLSQKLSRIIGANKAREVSLTSMPLTADVAEKLGFVNHVVEEGEALKKARGIAEAIIKNEQGMVLRIKSVINDGLKLDLGHALTLEKERAHAYYSGMTKEQFKKLQEFIAGRGSKKPSSKL

SEQ ID NO: 29220 - DNA, 831 bp, Brassica napus
  CDS (1)..(831)
atggattcctacaaaaccctagaaatcgttcgcaagaataccgactcctccgtcttccacgtcgtcctcaacaggccgtcgcagctcaacgccctatccctcgacttcttcgacgaattccccatagctctatcgtccctcgaccaaaacccagacgtcgccgtcatcatcctctccggcgccggaaaacacttctgctccggcatcgacctcgcttccctctcctcgatctcggcccaatcgtcctcaggcggcgacagagggcgctcgagtgagggtctacgacgcaggatcaaatcgatgcaggcggcgataaccgccgtggaagagtgccggaagcctgtgatcgcagctgtgcacggcgcgtgtatcggagggggagttgatctcgtcacggcttgtgacgttagatactgctccgaggacgctttcttctcgatcaaggaggttgatctagcgatcgttgcggatctcgggactctccagcggttgccgaggatcgtcgggcacgcgaaggctatggagttggcgttgacggcgagacgattctcgggatgtgaagcgaaggaacttggtcttgtttctcaggtcttcagatctaagtcggagcttgataaaggcatcaccatgatcgctgaaagaatagcagcgaagtctcctttagctgtgacagggacgaaggcagtgttgttgagaagcagagagatgagtgtagaacaaggtcttgactacgtagcaacttggaactcgggtatgcttatatcgaacgatctcaacgaagctgtctctgcgcagatgatgaaaagacaacctcgtttctctaaactgtga

SEQ ID NO: 29221 - protein, 276 aa, Brassica napus
MDSYKTLEIVRKNTDSSVFHVVLNRPSQLNALSLDFFDEFPIALSSLDQNPDVAVIILSGAGKHFCSGIDLASLSSISAQSSSGGDRGRSSEGLRRRIKSMQAAITAVEECRKPVIAAVHGACIGGGVDLVTACDVRYCSEDAFFSIKEVDLAIVADLGTLQRLPRIVGHAKAMELALTARRFSGCEAKELGLVSQVFRSKSELDKGITMIAERIAAKSPLAVTGTKAVLLRSREMSVEQGLDYVATWNSGMLISNDLNEAVSAQMMKRQPRFSKL

SEQ ID NO: 29222 - DNA, 1128 bp, Brassica napus
  CDS (1)..(1128)
atggcctctcactctcaggttttggaggaagagaaatcgagtgttagaatattgacactgaacagaccaaagcagctgaatgctctgtccttcaaaatgataactcggttgctgcaactgttccttgcatatgaggaggaccctagtgtcaaacttgtcatcctaaagggccagggaagagccttttgtgccggtggtgatgtttcagctgttgttcgtgacatcggacaaggcaaatggagacgcagtgctgatttcatgtcacttgaatatactctcaactatgttatggccacatatagtaaagctcagatttcaattttgaatggtattgtcatgggaggtggagctggtgtctgcgtccacggtcgatttcgtattgcaacagagaacacggtttttgccatgcccgaaacagctctagggctatttccagatgtaggcgccccctacttcttgtctaaactccctggattttttggagagtatgttggcctcacaggagctaggttaaatggcgccgaaatgcttgcttgtggtcttgcaactcattatctgccttcaacaagattaactgcattacaagcagaactttgcaaagttgactcaagtgatccagttaccttggcctcaacaattctcgatgcatacacacaaaatccacacccgaaacagcagagtgcttaccacaggttagatgttattgataagtgcttctccagaagaacaatcgaagaaattatagctgcacttgagagagaggccactcacaaaccagatgattggatctcagctaccattggagcattgaagaaagcttcaccagcaagccttaaaatcactcttagatcgataagagaaggacgagtgcaaggtgtgggccagtgccttagccgtgaggatagaatggtgtctcatgtgataaaggaagatataagcaaagattttgtggaggggtgcagagcaatattgatagacaaagataagaatccaaagtgggagccaaggagactagaggagatgaaggatagcatggtagagcagtacttcaagagagtggaagaagaagaggatctaaagttcccagcaaggaaaaatttgccagccttagcaatggcaaagctgtga

SEQ ID NO: 29223 - protein, 375 aa, Brassica napus
MASHSQVLEEEKSSVRILTLNRPKQLNALSFKMITRLLQLFLAYEEDPSVKLVILKGQGRAFCAGGDVSAVVRDIGQGKWRRSADFMSLEYTLNYVMATYSKAQISILNGIVMGGGAGVCVHGRFRIATENTVFAMPETALGLFPDVGAPYFLSKLPGFFGEYVGLTGARLNGAEMLACGLATHYLPSTRLTALQAELCKVDSSDPVTLASTILDAYTQNPHPKQQSAYHRLDVIDKCFSRRTIEEIIAALEREATHKPDDWISATIGALKKASPASLKITLRSIREGRVQGVGQCLSREDRMVSHVIKEDISKDFVEGCRAILIDKDKNPKWEPRRLEEMKDSMVEQYFKRVEEEEDLKFPARKNLPALAMAKL

SEQ ID NO: 29224 - DNA, 831 bp, Brassica napus
  CDS (1)..(831)
atggattcctacaaaaccctagaaatcgttcgcaagaataccgactcctccgtcttccacgtcgtcctcaacaggccgtcgcagctcaacgccctatccctcgacttcttcgacgaattccccatagctctatcgtccctcgaccaaaacccagacgtcgccgtcatcatcctctccggcgccggaaaacacttctgctccggcatcgacctcgcttccctctcctcgatctcggcccaatcgtcctcaggcggcgacagagggcgctcgagtgagggtctacgacgcaggatcaaatcgatgcaggcggcgataaccgccgtggaagagtgccggaagcctgtgatcgcagctgtgcacggcgcgtgtatcggagggggagttgatctcgtcacggcttgtgacgttagatactgctccgaggacgctttcttctcgatcaaggaggttgatctagcgatcgttgcggatctcgggactctccagcggttgccgaggatcgtcgggcacgcgaaggctatggagttggcgttgacggcgagacgattctcgggatgtgaagcgaaggaacttggtcttgtttctcaggtcttcagatctaagtcggagcttgataaaggcatcaccatgatcgctgaaggaatagcagcgaagtctcctttagctgtgacagggacgaaggcagtgttgttaagaagcagagagatgagtgtagaacaaggtcttgactacgtagcaacttggaactcgggtatgcttatatcgaacgatctcaacgaagctgtctctgcgcagatgatgaaaagacaacctcgtttctctaaactgtga

SEQ ID NO: 29225 - protein, 276 aa, Brassica napus
MDSYKTLEIVRKNTDSSVFHVVLNRPSQLNALSLDFFDEFPIALSSLDQNPDVAVIILSGAGKHFCSGIDLASLSSISAQSSSGGDRGRSSEGLRRRIKSMQAAITAVEECRKPVIAAVHGACIGGGVDLVTACDVRYCSEDAFFSIKEVDLAIVADLGTLQRLPRIVGHAKAMELALTARRFSGCEAKELGLVSQVFRSKSELDKGITMIAEGIAAKSPLAVTGTKAVLLRSREMSVEQGLDYVATWNSGMLISNDLNEAVSAQMMKRQPRFSKL

SEQ ID NO: 29226 - DNA, 1017 bp, Brassica napus
  CDS (1)..(1017)
atggctgactccaaggaactcggcaccgcgagccgccgtatctccgtcttcaccaatcatctcatccccgtggaaacaattccaactcgcgttcactcagtggaactctctactgcctcgtcgatgaatgacaattaccataaggttcacggtgaagtgccgactcaccaagtcgtttggagaaaagctgatctcgtcggtgacgacggagaaacaaaagagtttgttgacattatatatgagaaagccgtcggtgaagatattgccaagatcactataaaccgtccggagaaaagaaacgcgttccggtctcagactgtgaaggagcttatgcgtgcgtttaacgacgccagagacgatagctctgtaggtgtcatcatactcaccggcaagggaacgaaagcgttttgcagtggtggtgatcaagcgttgaggacaccagatggttatgctgatcccaatgatgttggtcgacttaatgtccttgatctccaggttcaaatccgcagactgccaaaaccagttatcgcaatggttgctggttatgctgttggaggaggacatatcttgcacatggtttgtgatctaaccattgcagctgataatgctattttcggtcagacgggtcctaaggttggaagttttgatgctggttatggaagttcaatcatgtctcgtctggttggtcctaaaaaggcacgggaaatgtggttcatgacgagattctacacagcttcggaagcagataaaatgggactcatcaatacagttgtaccgctagaggatttggagaaagaaactgtgaaatggtgcagagaaatcttacggaacagccctactgcaatccgtgtgcttaaggcagcactcaatgcagtcgatgatggccatgccggacttcaggggctaggaggtgatgccacgctcttattctatggaaccgaagaaggtatagaaggaagaacagcttatatgcaacgccgaccaccgaacttctctaaatttccccggcgaccttga

SEQ ID NO: 29227 - protein, 338 aa, Brassica napus
MADSKELGTASRRISVFTNHLIPVETIPTRVHSVELSTASSMNDNYHKVHGEVPTHQVVWRKADLVGDDGETKEFVDIIYEKAVGEDIAKITINRPEKRNAFRSQTVKELMRAFNDARDDSSVGVIILTGKGTKAFCSGGDQALRTPDGYADPNDVGRLNVLDLQVQIRRLPKPVIAMVAGYAVGGGHILHMVCDLTIAADNAIFGQTGPKVGSFDAGYGSSIMSRLVGPKKAREMWFMTRFYTASEADKMGLINTVVPLEDLEKETVKWCREILRNSPTAIRVLKAALNAVDDGHAGLQGLGGDATLLFYGTEEGIEGRTAYMQRRPPNFSKFPRRP

SEQ ID NO: 29228 - DNA, 795 bp, Glycine max
  CDS (1)..(795)
atggatgggaaatcgccggagaaactaatactggtgaaccgcgagccaaacggcgtcgcactggtgacgattaaccgtcccggttcccttaactcgctgacccggcccatgatggtggacctggcccaggctttcaagaggctcgaccgggacgagttggtgcgggtcattatattaaccgggtcgggccggtcattctgttcgggcgtggatctcacggccgctgaggacgtgttcaagggcgatgtgaaggacccggagagcgatccggtggtgcaaatggagctctgccgcaagccaattatcggagccatcagaggattcgccgtcactgctggcttcgaaattgccctcgcctgtgacatcttggttgctgccaagggatctaagttcatggatactcatgctaggtttgggatatttccttcgtggggtttgtctcagaagctttcgcgcgtcataggggccaataaagcccgcgaggtatctctctcagccacacctttgactgcagaggtagctgagaagttgggtttcgtgaaccatgttgttgaagagggtgaattgttgaagaaaagcagggaaattgcggatgccattgtgaaaaataaccaagacttggtgttgaggtacaaggcggtcatcaatgatggcctcaagctggatcttggccacgcactttcccttgaaaaggagagggctcataattattataatggaatgacgaaggagcaattcaagaagatgcaggaattcatagctggtcgaagttccaagaaacagtccaaattgtag

SEQ ID NO: 29229 - protein, 264 aa, Glycine max
MDGKSPEKLILVNREPNGVALVTINRPGSLNSLTRPMMVDLAQAFKRLDRDELVRVIILTGSGRSFCSGVDLTAAEDVFKGDVKDPESDPVVQMELCRKPIIGAIRGFAVTAGFEIALACDILVAAKGSKFMDTHARFGIFPSWGLSQKLSRVIGANKAREVSLSATPLTAEVAEKLGFVNHVVEEGELLKKSREIADAIVKNNQDLVLRYKAVINDGLKLDLGHALSLEKERAHNYYNGMTKEQFKKMQEFIAGRSSKKQSKL

SEQ ID NO: 29230 - DNA, 795 bp, Glycine max
  CDS (1)..(795)
atggatgggaaatcgccggagaaactaatactggtgaaccgcgagccaaacggcgtcgcactggtgacgattaaccgtcccggttcccttaactcgctgacccggcccatgatggtggacctggcccaggctttcaagaggctcgaccgggacgagttggtgcgggtcattatattaaccgggtcgggccggtcattctgttcgggcgtggatctcacggccgctgaggacgtgttcaagggcgatgtgaaggacccggagagcgatccggtggtgcaaatggagctctgccgcaagccaattatcggagccatcagaggattcgccgtcactgctggcttcgaaattgccctcgcctgtgacatcttggttgctgccaagggatctaagttcatggatactcatgctaggtttgggatatttccttcgtggggtttgtctcagaagctttcgcgcgtcataggggccaataaagcccgggaggtatctctctcggccacacctttgactgcagaggtagctgagaggttgggtttggtgaaccatgtcattgaagaggctgaattgttgaagaaaagcagggaaattgcggatgccattgtgaaaaataaccaagacttggttttgaggtacaaggcggtcatcaatgatggcctcaagctggatcttggccgcgcactttctcttgaaaaggagagggctcatgactattataacggaatgacgaaggagcaattcaggaagatgcaggaattcatagctggtcgaagttccaagaaacagtccaaattgtag

SEQ ID NO: 29231 - protein, 264 aa, Glycine max
MDGKSPEKLILVNREPNGVALVTINRPGSLNSLTRPMMVDLAQAFKRLDRDELVRVIILTGSGRSFCSGVDLTAAEDVFKGDVKDPESDPVVQMELCRKPIIGAIRGFAVTAGFEIALACDILVAAKGSKFMDTHARFGIFPSWGLSQKLSRVIGANKAREVSLSATPLTAEVAERLGLVNHVIEEAELLKKSREIADAIVKNNQDLVLRYKAVINDGLKLDLGRALSLEKERAHDYYNGMTKEQFRKMQEFIAGRSSKKQSKL

SEQ ID NO: 29232 - DNA, 909 bp, Zea mays
  CDS (1)..(909)
atgctcggcctccggcgcctccccgctgtctccggccgcctcgcgccggaggtcacctccgtctctgcggcctcctcccacagcgccgtcttctttcgcaccctccaaatcctcgtccagcaggggcccgtccgcctccaaaagctctctgctccggacaccgggatcgtggagctgaggctggagcggccggaggccaagaacgccatagggaaggagatgctccaggggctgcggagcgcgatccaggaggtggaggccgacacggctgcaaacgtcgtcttggtgacgagctcggtgcccaaggttttctgcgcgggcgccgatctcaaggaaaggaggttgatgggtcctagtgaagttcgggacttcgttaattccttaaggtctacattttcatcctttgaggcactgtctattcctacaattgctgttgtcgaaggggttgcttttggtggcgggttagaattggctctgtcatgtgatcttcgcatatgtggcaaggatgcaaaattcagtttgccagagactggccttgctattatcccaggtgctggaggaacacagcgccttcctaggattgttggaaggtcaagagcaaaagaactaatattcactggtcgtagattcgatgcggtggaggctgtaactatgggagtagtaaactactgtgttcctgccggcgacgcttatcaaaaggctcttgaacttgcgcgggagataaaccagaaaggcccgttagcagtaaaaatggctaagaaggccatcgatcaaggggcagaggtagacttgccctcggcattggtcgttgaagaagaatgctaccagcaagtcctgcacactgaggatcgtcttgagggtctagccgcattcgccgagaaaagaaagcctatatataaagggaagtag

SEQ ID NO: 29233 - protein, 302 aa, Zea mays
MLGLRRLPAVSGRLAPEVTSVSAASSHSAVFFRTLQILVQQGPVRLQKLSAPDTGIVELRLERPEAKNAIGKEMLQGLRSAIQEVEADTAANVVLVTSSVPKVFCAGADLKERRLMGPSEVRDFVNSLRSTFSSFEALSIPTIAVVEGVAFGGGLELALSCDLRICGKDAKFSLPETGLAIIPGAGGTQRLPRIVGRSRAKELIFTGRRFDAVEAVTMGVVNYCVPAGDAYQKALELAREINQKGPLAVKMAKKAIDQGAEVDLPSALVVEEECYQQVLHTEDRLEGLAAFAEKRKPIYKGK

SEQ ID NO: 29234 - DNA, 918 bp, Zea mays
  CDS (1)..(918)
atgcgcagtccgcgaggcctcctcaccgcctccggctaccttgcgggccggcacgctccgtcggcctccgtgtccaccactggccacaactccctactcgctcgcaccttccaaatcctagcccagccggagtccgtccgtctgcagaagcacccggcacccaactccgggatcttagagctgaggctggagcggccggaagtcaagaacgccattaattgggatatgatgaggatgctgcggagcgccatagagaagattcaggccgacacgacggcgaaggtcgtccttgttgcgagctccgtgccgggggctttctctgcaggcgccgatctcaaggaaaggaggctaatgagttcttctgacgttggggggtatgctagatccttgaggtctacattttcgtcttttgaggcacttcctattccaacaattgctgtcattgaaggagctgcccttggtggtgggctagaactggctttggcatgcgatcttcgaatatgtggagaaaatgctgaacttggactgccagaaacaagccttgctattatacctggagctggaggtacgcaacgccttcctaggatcatagggaggtccagagcaaaggaactaatattcactggcctcagatgtggtgcagctgaagctgtaacgatggggttagcaaactactgtgttccagcaggagaggcttaccagaaggctcttgacattgcctgtgagataactcagaagggtcccatggggataagaatggcaaagaaggcgatcaatgagggggcagaggttgccgacatgtcctcggcgctggctatcgaagaggagtgctacgagcagctgctttacacgcaggatcgcgttgaggccctagctgcatttgccgagaagaggaagcctgtgtacacaggaaagtag

SEQ ID NO: 29235 - protein, 305 aa, Zea mays
MRSPRGLLTASGYLAGRHAPSASVSTTGHNSLLARTFQILAQPESVRLQKHPAPNSGILELRLERPEVKNAINWDMMRMLRSAIEKIQADTTAKVVLVASSVPGAFSAGADLKERRLMSSSDVGGYARSLRSTFSSFEALPIPTIAVIEGAALGGGLELALACDLRICGENAELGLPETSLAIIPGAGGTQRLPRIIGRSRAKELIFTGLRCGAAEAVTMGLANYCVPAGEAYQKALDIACEITQKGPMGIRMAKKAINEGAEVADMSSALAIEEECYEQLLYTQDRVEALAAFAEKRKPVYTGK

SEQ ID NO: 29236 - DNA, 918 bp, Zea mays
  CDS (1)..(918)
atgcgcagtccgcgaggcctcctcaccgcctccggctaccttgcgggccggcacgctccgtcgccctccgtgtccaccactggccacaactccctactcgctcgcaccttccaaatcctagcccagccggagtccgtccgtctgcagaagcacccggcacccaactccgggatcttagagctgaggctggagcggccggaagtcaagaacgccattaattgggatatgatgaggatgctgcggagcgccatagagaagattcaggccgacacgacggcgaaggtcgtccttgttgcgagctccgtgccgggggctttctctgcaggcgccgatctcaaggaaaggaggctaatgagttcttctgacgttggggggtatgctagatccttgaggtctacattttcgtcttttgaggcacttcctattccaacaattgctgtcattgaaggagctgcccttggtggtgggctagaactggctttggcgtgcgatcttcgaatatgtggagaaaatgctgaacttggactgccagaaacaagccttgctattatacctggagctggtggtacgcaacgccttcctaggatcatagggaggtccagagcaaaggaactgatattcactggccgcagatgtggtgcagctgaagctgtaacgatggggttagcaaactattgtgttccagcaggagaggcttaccagaaggctcttgacattgcctgtgagataacccagaagggtcccatggggataagaatggcaaagaaggcgatcaatgagggggcagaggttgccgacatgtcctcggcgctggctatcgaaggggagtgctacgagcagctgctttacacgcaggatcgcgttgaggccctagctgcatttgctgagaagaggaagcctgtgtacacaggaaagtag

SEQ ID NO: 29237 - protein, 305 aa, Zea mays
MRSPRGLLTASGYLAGRHAPSPSVSTTGHNSLLARTFQILAQPESVRLQKHPAPNSGILELRLERPEVKNAINWDMMRMLRSAIEKIQADTTAKVVLVASSVPGAFSAGADLKERRLMSSSDVGGYARSLRSTFSSFEALPIPTIAVIEGAALGGGLELALACDLRICGENAELGLPETSLAIIPGAGGTQRLPRIIGRSRAKELIFTGRRCGAAEAVTMGLANYCVPAGEAYQKALDIACEITQKGPMGIRMAKKAINEGAEVADMSSALAIEGECYEQLLYTQDRVEALAAFAEKRKPVYTGK

SEQ ID NO: 29238 - DNA, 1011 bp, Zea mays
  CDS (1)..(1011)
atggacgctgcggagaggaggctggctcgcgtcgctgcccacctcgttccgtccttcccggtcccacacgccaccgggcctcccctcgcgccttctcccgcggcagcgtcctcgtcgtcgtcctcgccggcgggggacagctacaggcgcgtgcacggcgacgtgccgtcggagccaccggagtggcgcaccgccacagacgagtcagggaaggagttcgtcgacatcatctacgagaaggccgtcggagagggcatcgccaagatcaccattaaccggcctgacagaaggaacgccttccgtccgctgaccgtgaaggaactaatgcgcgcgttcaacgatgccagagatgatagttcgattggagtcatcattcttacagggaagggaaccaaggcgttctgcagcggcggtgaccaggcgttaagagattctgatggatatgtggacttcgatagctttggccgcctcaatgtcttagatctccaggtgcagattcgccgtcttccaaagcctgtcattgctatggttgctggttatgctgttggtggtggacatgttttgcacatggtgtgtgatataacaattgcagcagagaacgcgatatttgggcagacagggcccaaggttggaagctttgatgctggttatggatcttcgataatgtcccggttggttggacccaagagagcccgtgaaatgtggtttctgtcacggttctacacagctgacgaagctgacaaaatgggactcgtgaacaccgtagtaccgcttgctgaactggagcaggaaactgtcaaatggtgccgtcagatcttaagaaacagccccatggctattcgcgtgctgaaatctgcactcaacgcggcagatgatggccatgcaggccttcaggagctcggcgggaatgccacgctaatattttacggcacggaggaggcaaaggaagggaagaacgcgtacatggagagacgacgcccagatttctccaagttcccacgcaaaccttga

SEQ ID NO: 29239 - protein, 336 aa, Zea mays
MDAAERRLARVAAHLVPSFPVPHATGPPLAPSPAAASSSSSSPAGDSYRRVHGDVPSEPPEWRTATDESGKEFVDIIYEKAVGEGIAKITINRPDRRNAFRPLTVKELMRAFNDARDDSSIGVIILTGKGTKAFCSGGDQALRDSDGYVDFDSFGRLNVLDLQVQIRRLPKPVIAMVAGYAVGGGHVLHMVCDITIAAENAIFGQTGPKVGSFDAGYGSSIMSRLVGPKRAREMWFLSRFYTADEADKMGLVNTVVPLAELEQETVKWCRQILRNSPMAIRVLKSALNAADDGHAGLQELGGNATLIFYGTEEAKEGKNAYMERRRPDFSKFPRKP

SEQ ID NO: 29240 - DNA, 867 bp, Zea mays
  CDS (1)..(867)
atggccggcggcggcgaccgtgacgcatccgacgcggagctccgcgcggggttcgagaccctggccgtgacgcggccggacccttccgcgggggtctacgaggtccgcctcaaccgcccggcgcagcgcaacgcgctgagcccggccgcgttcgcggagatcccgcgcgccatgtctctgctggaccgcgccccctcggcgcgcgccgtggtgctgtccgccgcgggcccgcacttctgcgcgggcatcgagctcgggggccccggggacccgctgtccgccgcctccgccgatcccgtggccgccgcggaggggctccgccgcgcggtcctcgacatgcaggcggcgctcacggccatcgagcggtgccggaagcccgtcgtcgcggcggtgcacggcgcctgcgtcggcggcggcgtcgacctcgtggccgcctgcgacatcaggtgctgctccagggacgcctccttcgtgctcaaggaggtggacatggccatcgtcgccgacctcggcgcgctgcagcgcctcccgcggatcgtcggctacggcaacgctgctgacctcgcgctcaccggacgcaagatcaacgccatggaggccaaggacatggggttggttaccagggtctttgattccaagcaagacttggatgcgggcgtcgcaaagatcgccaaagaaatagctgacaagtcggcatgggcggtgattggaaccaaggccgttctgctgagaagcagggatgcgaccatagaacaaggcctggagcatgtagccacatggaacgcgggtatgatgaggtcgaacgatctgaaggaggccatcagagccttcctggagaagcggaagcctgtgttctccaagctgtaa

SEQ ID NO: 29241 - protein, 288 aa, Zea mays
MAGGGDRDASDAELRAGFETLAVTRPDPSAGVYEVRLNRPAQRNALSPAAFAEIPRAMSLLDRAPSARAVVLSAAGPHFCAGIELGGPGDPLSAASADPVAAAEGLRRAVLDMQAALTAIERCRKPVVAAVHGACVGGGVDLVAACDIRCCSRDASFVLKEVDMAIVADLGALQRLPRIVGYGNAADLALTGRKINAMEAKDMGLVTRVFDSKQDLDAGVAKIAKEIADKSAWAVIGTKAVLLRSRDATIEQGLEHVATWNAGMMRSNDLKEAIRAFLEKRKPVFSKL

SEQ ID NO: 29242 - DNA, 21 bp, Artificial sequence
  primer
atgagctacgagaacctgctg

SEQ ID NO: 29243 - DNA, 20 bp, Artificial sequence
  primer
tcagcgatccttgaagtcgg

SEQ ID NO: 29244 - protein, 324 aa, Artificial sequence
  consensus sequence
  Variant (3)..(4): Xaa in position 3 to 4 is any amino acid
  Variant (5)..(5): Xaa in position 5 is any or no amino acid
  Variant (8)..(33): Xaa in position 8 to 33 is any amino acid
  Variant (34)..(62): Xaa in position 34 to 62 is any or no amino acid
  Variant (64)..(67): Xaa in position 64 to 67 is any amino acid
  Variant (68)..(73): Xaa in position 68 to 73 is any or no amino acid
  Variant (75)..(75): Xaa in position 75 is any amino acid
  Variant (78)..(78): Xaa in position 78 is any amino acid
  Variant (79)..(79): Xaa in position 79 is any or no amino acid
  Variant (81)..(86): Xaa in position 81 to 86 is any amino acid
  Variant (87)..(130): Xaa in position 87 to 130 is any or no amino acid
  Variant (132)..(132): Xaa in position 132 is any amino acid
  Variant (136)..(137): Xaa in position 136 to 137 is any amino acid
  Variant (139)..(139): Xaa in position 139 is any amino acid
  Variant (141)..(141): Xaa in position 141 is any amino acid
  Variant (145)..(145): Xaa in position 145 is any amino acid
  Variant (147)..(151): Xaa in position 147 to 151 is any amino acid
  Variant (153)..(159): Xaa in position 153 to 159 is any amino acid
  Variant (160)..(160): Xaa in position 160 is any or no amino acid
  Variant (162)..(166): Xaa in position 162 to 166 is any amino acid
  Variant (168)..(170): Xaa in position 168 to 170 is any amino acid
  Variant (172)..(175): Xaa in position 172 to 175 is any amino acid
  Variant (176)..(177): Xaa in position 176 to 177 is any or no amino acid
  Variant (180)..(181): Xaa in position 180 to 181 is any amino acid
  Variant (182)..(182): Xaa in position 182 is any or no amino acid
  Variant (184)..(187): Xaa in position 184 to 187 is any amino acid
  Variant (189)..(190): Xaa in position 189 to 190 is any amino acid
  Variant (191)..(192): Xaa in position 191 to 192 is any or no amino acid
  Variant (194)..(207): Xaa in position 194 to 207 is any amino acid
  Variant (208)..(208): Xaa in position 208 is any or no amino acid
  Variant (210)..(211): Xaa in position 210 to 211 is any amino acid
  Variant (212)..(212): Xaa in position 212 is any or no amino acid
  Variant (216)..(244): Xaa in position 216 to 244 is any amino acid
  Variant (245)..(269): Xaa in position 245 to 269 is any or no amino acid
  Variant (271)..(291): Xaa in position 271 to 291 is any amino acid
  Variant (292)..(311): Xaa in position 292 to 311 is any or no amino acid
  Variant (313)..(314): Xaa in position 313 to 314 is any amino acid
  Variant (317)..(318): Xaa in position 317 to 318 is any amino acid
  Variant (321)..(322): Xaa in position 321 to 322 is any amino acid
RPXXXNAXXXXXXXXXXXXXXXXXXXXXXXXXXXXXXXXXXXXXXXXXXXXXXXXXXXXXXXGXXXXXXXXXXFXAGXXDXXXXXXXXXXXXXXXXXXXXXXXXXXXXXXXXXXXXXXXXXXXXXXXXXXPXIAAXXGXAXGGGXEXXXXXDXXXXXXXXAXXXXXEXXXGXXXXXXGGXXXLXXXXGXXXXAXXXXXXXXXXXXXXXAXXXGLVXXXXXXXXXXXXXXXXXXXXXXXXXXXXXXXXXXXXXXXXXXXXXXXXXXXXXXKXXXXXXXXXXXXXXXXXXXXXXXXXXXXXXXXXXXXXXXXXDXXEGXXAFXXKR

SEQ ID NO: 29245 - protein, 25 aa, Artificial sequence
  protein pattern
  Variant (2)..(2): Xaa in position 2 is any amino acid
  Variant (3)..(3): Xaa in position 3 is Ile, Leu or Val
  Variant (4)..(4): Xaa in position 4 is Ala, Cys, Gly, Ser or Val
  Variant (5)..(5): Xaa in position 5 is any amino acid
  Variant (6)..(6): Xaa in position 6 is Ile, Leu or Val
  Variant (7)..(7): Xaa in position 7 is any amino acid
  Variant (9)..(9): Xaa in position 9 is any or no amino acid
  Variant (11)..(11): Xaa in position 11 is any amino acid
  Variant (12)..(13): Xaa in position 12 to 13 is any or no amino acid
  Variant (15)..(15): Xaa in position 15 is any amino acid
  Variant (16)..(16): Xaa in position 16 is Ala, Asp, Glu, Gly, Asn, Ser or Thr
  Variant (17)..(18): Xaa in position 17 to 18 is any amino acid
  Variant (19)..(19): Xaa in position 19 is Ile, Leu, Met or Val
  Variant (20)..(24): Xaa in position 20 to 24 is any amino acid
  Variant (25)..(25): Xaa in position 25 is Phe, Ile, Leu or Val
PXXXXXXGXAXXXGXXXXXXXXXXX

SEQ ID NO: 29246 - DNA, 1056 bp, Azotobacter vinelandii
  CDS (1)..(1056): transl_table=11
atgcggcaggttccgcacgctcggcaaccggcgatttgccacggcggatgctgcccgtcggacgaagcgcccgttagactcgcagcgaagaccggagcaaccgccgctggaggcggcccccatccgcggtggcaacccatgcagatcgacgaagaactgacgttcaagaaactggaaattttcctggccttcatgcgcagcggcaacctgtcgcgcgccgccgccgagctggacaccagcacggtcagcgtgcaccgcgccctgcattcgctggagaacgctctgcgctgcccgctgttcaagcgcgaaggacgcaagctgacgccgctggagagcgcccatgtgctggaggaccgcgcgcagaagctggtcgccgacgtgctcgacaccgtgcgcctgacccgcgaggccgccggcttctccgccgagcgcttcaagctcggcgcgctctactcgctgacggtgaagaccgtgccgcaattgatcatgggcctcaagctgcggcgcagcacgctgaacatcgacctgatcctcggctccaacatcgacctgctgtacaagctgaagaacctcgagctggacgccatcctggtctcgctcaacgacagcgtgagcgatccggactgcgagtcgctgccgctgtttcgcgacgacattttcctcgccgtaccggtcgactcgcctttcgccggccaggccgaggtcgacctggccgaactgcgcgaagccaccttcatcaccctgacccagggcttcgccacccaccaggacgccctgcgcgtgttccgccaggccggcttcgcgcccaaggtggcgatgcaggtcaacgacatcttcaccctgctcagcatggtcagctccggggtcggttacgccctgctgccggggcgcatcgccgcggtgtacgagaaccgcatacggttgatcccgctcgagacgcgctaccgcctgcagcagcagatcggcgtggtgttcctcaagagccgcgagcgcgaccccaacctgctggccctgctcgccgagtgccggatgtacgccaagcgccacgcgggctga

SEQ ID NO: 29247 - protein, 351 aa, Azotobacter vinelandii
MRQVPHARQPAICHGGCCPSDEAPVRLAAKTGATAAGGGPHPRWQPMQIDEELTFKKLEIFLAFMRSGNLSRAAAELDTSTVSVHRALHSLENALRCPLFKREGRKLTPLESAHVLEDRAQKLVADVLDTVRLTREAAGFSAERFKLGALYSLTVKTVPQLIMGLKLRRSTLNIDLILGSNIDLLYKLKNLELDAILVSLNDSVSDPDCESLPLFRDDIFLAVPVDSPFAGQAEVDLAELREATFITLTQGFATHQDALRVFRQAGFAPKVAMQVNDIFTLLSMVSSGVGYALLPGRIAAVYENRIRLIPLETRYRLQQQIGVVFLKSRERDPNLLALLAECRMYAKRHAG

SEQ ID NO: 29248 - DNA, 927 bp, Klebsiella pneumoniae subsp. pneumoniae MGH 78578
  CDS (1)..(927): transl_table=11
atgaaagacgatattaaccaggagatcaccttccgcaagctatcggtctttatgatgtttatggcgaagggcaatatcgccagaaccgccgaagcgatgaaactcagcagcgtcagcgttcaccgcgcgctgcataccctggaagagggggtgggctgcccgctgtttgtccacaaagggcgcaacctgctgccgctgcaggcggcgtggacgctgcttgaatactgccaggatgtgataagtctgatgaaccgcgggctagaggcgacgcgcaaggttgcaggcgtcggtcaggggcggttgcgcatcggtaccctctattctctgaccctggaaaccgttccgcgcatcattatggggatgaagctgcgtcgcccggagctggagctggacctgacgatgggttcaaatcagatgctgctggatatgctggaagacgatgccctcgatgccatcctgatcgccaccaacgaaggggagttcaataataccgctttcgacgtggtgccgctgtttgaggacgatatttttctcgccgccccggcgaccgaacggctggatgcctcacggctcgccgatctgcgcgattacgccgaccgcaagtttgtttcgctggcggaggggttcgccacctatgccggattccgggaagcattccatatcgccggcttcgagccggagatcgtcacccgggtgaatgatattttctcgatgattagcctggtgcaggctggcgtcggttttgccctgctgccggggcgaatgaagaaagtgtatgagaaggatgtacagctgctaaagctggcggaagcctaccagatgcgccagctgatctctatcgtctattcgcaccatcgcgaacgcgatgccgatctgctggcgctggcggcggaaggacggatgtacgcccgcagtattaatcgctaa

SEQ ID NO: 29249 - protein, 308 aa, Klebsiella pneumoniae subsp. pneumoniae MGH 78578
MKDDINQEITFRKLSVFMMFMAKGNIARTAEAMKLSSVSVHRALHTLEEGVGCPLFVHKGRNLLPLQAAWTLLEYCQDVISLMNRGLEATRKVAGVGQGRLRIGTLYSLTLETVPRIIMGMKLRRPELELDLTMGSNQMLLDMLEDDALDAILIATNEGEFNNTAFDVVPLFEDDIFLAAPATERLDASRLADLRDYADRKFVSLAEGFATYAGFREAFHIAGFEPEIVTRVNDIFSMISLVQAGVGFALLPGRMKKVYEKDVQLLKLAEAYQMRQLISIVYSHHRERDADLLALAAEGRMYARSINR

SEQ ID NO: 29250 - DNA, 954 bp, Streptomyces coelicolor A3(2)
  CDS (1)..(954): transl_table=11
atggtgcatcagcaaagctcacggccccgcctgtcaccgtccggtgacacagaagacatcgtcgcgctgctcgcgccccgcctcgcgcacttcgccggcgtggcccgcaccgagcacgtcacccgggccgcccaggagatgaacgtcccccagtcgaccctctcccgcgccctcgtccgcctggaggaggacctcggcgtcgacctgttcgtccggcgcggccgcaccctcgcgctgaccgtcgccgggcggaccttcctcggctccgtcgaacgggccctcgccgaggtcgagcgggccgccgacgaggtccgcgccgacgccgacccggccaccggcaaggtcgccttcggcttcctgcacaccatgggcgccgagaccgtccccggcctgctgcacgccttccgcgccgaccacccccgggtccgcttcagcctcgtgcagaactacggcgaggccatgctggagcggctgcgcgcgggggagctggacctgtgcctcacctcgccggtccccgacgcccccgacctggtcgcccgccgcctcgacgaacagaagctgcgcctggtcgtcccggccgaccactccctggccgggcgccggcgcatccgcctcgccgaggcggccgacgagatcttcgtgaccctggagcccggctacggcctgcggcgcatcaccgacgcgttgtgcaaggaggccggtttccggcccagggtggccttcgagggggaggaggcggagacgctgcggggcctggtcgcggccggtctcggcgtcgccctgctgccgccgcccgccgtgccccgccccggcgtgctcgaactgacggtcaccgccccccgcgccgcccgcgagatcggcgtggcctggctggcgggacgcacggacacgccaccggtggcggcgttcaagaggttcctgctgtcacggcggggcagcctgctgccgtcctga

SEQ ID NO: 29251 - protein, 317 aa, Streptomyces coelicolor A3(2)
MVHQQSSRPRLSPSGDTEDIVALLAPRLAHFAGVARTEHVTRAAQEMNVPQSTLSRALVRLEEDLGVDLFVRRGRTLALTVAGRTFLGSVERALAEVERAADEVRADADPATGKVAFGFLHTMGAETVPGLLHAFRADHPRVRFSLVQNYGEAMLERLRAGELDLCLTSPVPDAPDLVARRLDEQKLRLVVPADHSLAGRRRIRLAEAADEIFVTLEPGYGLRRITDALCKEAGFRPRVAFEGEEAETLRGLVAAGLGVALLPPPAVPRPGVLELTVTAPRAAREIGVAWLAGRTDTPPVAAFKRFLLSRRGSLLPS

SEQ ID NO: 29252 - DNA, 927 bp, Pseudomonas syringae pv. tomato str. DC3000
  CDS (1)..(927): transl_table=11
atgcagatcgatgacgaactcacgctcaagaaactcgaaatcttcctggccttcatgcgcaccggcaatctggcccgtgcggcagaagagttgcagaccagcaacgtcagcgtgcaccgcgccattcattcactggaaagcgccctgcgctgcccgctgttcaagcacgaagggcgcaatctgacgccgctggaaagcgcttatgtgctggaagagcgtgcgcagaaactggtgcaggatgtgctcacaacggttgaattgacccgtcaggcggcgggcttttcggcggcgcgattccggctcggagccttgtattcgctgacggtcaagacggtgccgcagttgatcatgggcctgaagatccgccgcagcgagctgaacatcgacttgattctgggctcgaacatcgacctgctctacaagctcaagaacatggaagtcgatgccatgctggtgtcgctggacgagagcaccaatgacccggattgcgagcatctggcgctgttttccgacgatatcttcctcgccgtgcccaccgactcgccctttgccgagcaccacgaagtggacttgatcgacctgcgcgaggcgacgtttatcaccctcacccaaggctttgcgacccatcgcgacggcgtacgggtttttcagcaggcagggttcgaacccaaggtggcgatgcaggtgaatgacatcttcactctgctgagcatggtcagctccggcgtcggctatgcgctgctgccggggcgcatagcagcggtctatgaaaaccgcgtgcgcctgattccgctgcaaagccgctaccggatgcagcaacacattggcgtggtctttctcaaatccaaagagcgcgatcccaacctgctggcgctgctggccgagtgccggatgtacgcgaatcgcctgctggaacaggcgacctga

SEQ ID NO: 29253 - protein, 308 aa, Pseudomonas syringae pv. tomato str. DC3000
MQIDDELTLKKLEIFLAFMRTGNLARAAEELQTSNVSVHRAIHSLESALRCPLFKHEGRNLTPLESAYVLEERAQKLVQDVLTTVELTRQAAGFSAARFRLGALYSLTVKTVPQLIMGLKIRRSELNIDLILGSNIDLLYKLKNMEVDAMLVSLDESTNDPDCEHLALFSDDIFLAVPTDSPFAEHHEVDLIDLREATFITLTQGFATHRDGVRVFQQAGFEPKVAMQVNDIFTLLSMVSSGVGYALLPGRIAAVYENRVRLIPLQSRYRMQQHIGVVFLKSKERDPNLLALLAECRMYANRLLEQAT

SEQ ID NO: 29254 - DNA, 921 bp, Acinetobacter sp. ADP1
  CDS (1)..(921): transl_table=11
atggaaattgatgaagaattaaccttaaaaaaactccagatttttttggcctttatgcgtaatggaaatctttccaaaactgcttccgaaatggaaattagtaatgtcagtgttcataaagcactacactcattggaaagtgccctacgctgtccactatttaagcatgaaggccgcaacttaattccgcttaaaagtgcttatgtattacaggaacattcgcataaacttgttcaagatattgtggtgactatcaataaaaccagagaggcagcaggttttgctgccaaagtattgcatttaggttcattatattcactaactgtcaatacgattccgaatgtgatcagtcgcttaaagctcagacgcggtgaactagatattcagttattgttaagttcaaatctggatctggttaaaaaattaaaatcgacagaattggatgcgattattgtggcactcaatgagaccactcgggatccagattttgagagtctacctatgtttgaagataatatttatcttgcggttaacaaacattcgccccttgctagcttagatgaaattgatttaagcacacttaaggatgaaacttttttaacactctctaaaggttttgcgactcgtaacgacagtgacctagtgtttgagaaagcaggaatagaccctaaagtctttcttcaggtgagtgatattttcactttagtgagtatggtgagtactggagttggtttggcactgttgcctggacgtatctcgaccatttatgaaagttcggtcaaactaattccgttacaagggtcctatcaaatcaaacaggaaatcggtctggtttttttgaaaagtaaggaaagagatcctaatttactggcattagtcgcagaatgtcgaatgtttgccaagcaatatattgcaatataa

SEQ ID NO: 29255 - protein, 306 aa, Acinetobacter sp. ADP1
MEIDEELTLKKLQIFLAFMRNGNLSKTASEMEISNVSVHKALHSLESALRCPLFKHEGRNLIPLKSAYVLQEHSHKLVQDIVVTINKTREAAGFAAKVLHLGSLYSLTVNTIPNVISRLKLRRGELDIQLLLSSNLDLVKKLKSTELDAIIVALNETTRDPDFESLPMFEDNIYLAVNKHSPLASLDEIDLSTLKDETFLTLSKGFATRNDSDLVFEKAGIDPKVFLQVSDIFTLVSMVSTGVGLALLPGRISTIYESSVKLIPLQGSYQIKQEIGLVFLKSKERDPNLLALVAECRMFAKQYIAI

SEQ ID NO: 29256 - DNA, 927 bp, Pseudomonas syringae pv. syringae B728a
  CDS (1)..(927): transl_table=11
atgcagatcgatgacgaactgacgctcaagaaactggaaatattcctggccttcatgcgcaccggcaatctggcgcgggcggcggaggagttgcagaccagtaacgtcagcgtgcaccgcgccattcattcgctggaaagcgcgctgcgttgcccgctgttcaagcacgagggacgcaacctgacgccactggaaagcgcgtatgtgctggaagaacgtgcacagaaactggtccaggatgtgctcgccacggtggaactgacccgtcaggcagcaggcttctcggcggcgcggttcaggctgggggcgttgtactcgctgaccgtcaagacggtgccgcagctgatcatgggcctgaagatccgccgcagcgagctgaatatcgacctgattctgggctcgaacatggacctgctctacaagctcaagaacatggaagtcgatgcgatgctggtgtcgctggatgaaagcacccatgacccggactgcgagcatctggcgctgttttccgacgacatctttctcgccgtccccaccgactcaccgttcgccgaacaccctgaagtggacctgagcgacctgcgcgaagcgacgttcatcaccctgacccaaggcttcgccacgcaccgcgacgggatccgcgtattccagcaggccggtttcgagcccaaggtggcgatgcaggtcaatgacatcttcaccctgctgagcatggtcagctccggcgtcggctatgcactgctgccgggaagaatcgccgcggtctatgaaaaccgcgtgcgcctgatcccgttgcagagccgctaccggatgcaacaacacatcggcattgtttttctcaagtccaaacagcgcgatcccaacctgctggcgctgttggccgagtgccggatgtacaccaaccggctgctggaacagacgacctga

SEQ ID NO: 29257 - protein, 308 aa, Pseudomonas syringae pv. syringae B728a
MQIDDELTLKKLEIFLAFMRTGNLARAAEELQTSNVSVHRAIHSLESALRCPLFKHEGRNLTPLESAYVLEERAQKLVQDVLATVELTRQAAGFSAARFRLGALYSLTVKTVPQLIMGLKIRRSELNIDLILGSNMDLLYKLKNMEVDAMLVSLDESTHDPDCEHLALFSDDIFLAVPTDSPFAEHPEVDLSDLREATFITLTQGFATHRDGIRVFQQAGFEPKVAMQVNDIFTLLSMVSSGVGYALLPGRIAAVYENRVRLIPLQSRYRMQQHIGIVFLKSKQRDPNLLALLAECRMYTNRLLEQTT

SEQ ID NO: 29258 - DNA, 918 bp, Pseudomonas fluorescens Pf-5
  CDS (1)..(918): transl_table=11
atgctcatcgacgaagagttgaccctgaaaaagctcgaagtgtttctggccttcatgcgcaccggcaacctggcccgcgccgccgccgagttgcagaccagcaatgtcagcgtgcaccgggccattcactccctggaaaatgccctgcgctgcccgctgttcaagcatgaagggcgcaacctgacgcccctggaaagcgccttcgtcctggaggaacgggcacagaagctggtgcaggacgtggtcgagagcgtgcgcctgacccgcgaagcggcgggcttttcagcagaacgcttcaagctcggcgcactttactcgctgacggtgaaaaccgtgccgcagctgatcatgggcctcaagctgcgccgcagcgagctgaacatcgacctgatcctgggctccaacatcgacttgctgtacaagctcaaggacatggaagtggacgccatcctgatttccctggacgacagcgcccatgacccggactgcgagcaactgccgttgttttccgatgacatttttctcgccacccccgccgattcgccctttgcccagcagagcgaagtggacctggccgacgtgcgcgacgccaccttcatcaccctgacccagggctttgccacccatcaggacggggtgcgagtgttcaagcaggcggggttcgaacccaaggtggcgatgcaggtcaacgacatcttcaccctgctgagcatggtcagctccggggtcggttatgcgttgctgccggggaggatcgcggcggtgtatgagaaccgcgtgaaactgataccgctgcaggcgcgctaccgcctgcagcagcatatcggcgtggtgtttctcaaagccaaggagcgcgacccgaacctgttggcgctgctggccgaatgccggatgtacgccaaccgccaaaccccctag

SEQ ID NO: 29259 - protein, 305 aa, Pseudomonas fluorescens Pf-5
MLIDEELTLKKLEVFLAFMRTGNLARAAAELQTSNVSVHRAIHSLENALRCPLFKHEGRNLTPLESAFVLEERAQKLVQDVVESVRLTREAAGFSAERFKLGALYSLTVKTVPQLIMGLKLRRSELNIDLILGSNIDLLYKLKDMEVDAILISLDDSAHDPDCEQLPLFSDDIFLATPADSPFAQQSEVDLADVRDATFITLTQGFATHQDGVRVFKQAGFEPKVAMQVNDIFTLLSMVSSGVGYALLPGRIAAVYENRVKLIPLQARYRLQQHIGVVFLKAKERDPNLLALLAECRMYANRQTP

SEQ ID NO: 29260 - DNA, 927 bp, Pseudomonas syringae pv. phaseolicola 1448A
  CDS (1)..(927): transl_table=11
atgcagatcgatgacgaactgacgctcaagaaactggaaatattcctggccttcatgcgcaccggcaatctggcgcgggcggcggaggagttgcagaccagcaacgtcagcgtgcaccgcgccattcactcgttggaaagcgccctgcgttgcccgctgttcaaacacgaaggccgtaaccttacgccgctggaaagcgcgtatgtgctggaaaagcgtgcgcagaagctggtgcaggatgtgctcgccaccgtagagctgacccgtcaggcggcaggcttttcggcggcacgcttccgccttggggctttgtattcactgaccgtcaagacggtgccgcagctgatcatgggcctgaaaatccgccgcagcgagctgaatatcgatctgattctgggttcgaacatggacctgctgtacaagctcaagaacatggaagtcgacgccatgctggtgtcgctggatgaaagcacccatgacccggactgcgagcagctggcgttgttttccgacgatatcttcctggctgtgcccaccgactcgccgtttgccgagcacagcgaggtggatctcagcgacctgcgtgaagcgacatttatcaccctcacccaaggctttgccactcatcgcgatggcatacgggtgtttcagcaggccgggttcgagcccaaagtggcgatgcaggtcaatgacatcttcaccctgctgagcatggtcagttccggcgtcggctatgcgctgctgccggggcgcatagccgcagtgtatgaaaaccgcgtgcggctgattccattgcagagccgctaccggatgcagcaacacatcggcatggtctttctcaagtccagagagcgagaccctaacctgctggcgctgctggctgagtgtcggatgtatgcgaatcgcctgctggagcaggcgacctga

SEQ ID NO: 29261 - protein, 308 aa, Pseudomonas syringae pv. phaseolicola 1448A
MQIDDELTLKKLEIFLAFMRTGNLARAAEELQTSNVSVHRAIHSLESALRCPLFKHEGRNLTPLESAYVLEKRAQKLVQDVLATVELTRQAAGFSAARFRLGALYSLTVKTVPQLIMGLKIRRSELNIDLILGSNMDLLYKLKNMEVDAMLVSLDESTHDPDCEQLALFSDDIFLAVPTDSPFAEHSEVDLSDLREATFITLTQGFATHRDGIRVFQQAGFEPKVAMQVNDIFTLLSMVSSGVGYALLPGRIAAVYENRVRLIPLQSRYRMQQHIGMVFLKSRERDPNLLALLAECRMYANRLLEQAT

SEQ ID NO: 29262 - DNA, 921 bp, Ralstonia eutropha JMP134
  CDS (1)..(921): transl_table=11
atgagaatccgcatcggcgaagagatcaccttccgcaagctcgaagcactgctggcgttcatggaatccggcaacctggccaaggccgccgagatcctggacaccagtacggtcagcgtgcaccgcgcgttgcactcgctcgaagagggcacgagctgcgcgctgttccggcatgaaggccgcaacctgatcccgaccgacgcggcccatgtgctggctgacgcggcgcgcgaggtgctcaaggccatggccgacggcatccgcgccacgcgcgaggccgccggttacctggcggaccatctcaagatcggctcgctgtattcgctgacggcgcacaccgtgccgcagatcgtgatcggcctgaaggcgaggcgcccggacctgcagacggaactggtgctgggctcgaacgcggacttgctgcagatgctcaagcagggctcgatcgacgccacgctgatggcgacgcccgagccggaccccgagattgaatcgatcccgctgttcgaggacgagatattcttcgccgcgccggccgactcgccctacgcggcgatgccggccgtcgacctgcgcgcctgccaggacgagccgttcgtgtcgctgagcgagggattcgccacctcccgcggcttcgcggaggcgttcaagattgcggatttccagccgaacctggtcatgaaggtcggcgacatcttctcgctgatgaaccttgtcggcggcggcgtcggctacacactgctgccgggccgcgtgaaggccgtgcattcgcgcaatgtggcattcgtgccgcttacgtccgactacgacaatatccggcagaccattggcctgagcttcctgcgccggcgcgaacgcgatcccaacctgcttgcgctggcggccgtgtgccgcatggcgatgcggcaagccgaaaagtaa

SEQ ID NO: 29263 - protein, 306 aa, Ralstonia eutropha JMP134
MRIRIGEEITFRKLEALLAFMESGNLAKAAEILDTSTVSVHRALHSLEEGTSCALFRHEGRNLIPTDAAHVLADAAREVLKAMADGIRATREAAGYLADHLKIGSLYSLTAHTVPQIVIGLKARRPDLQTELVLGSNADLLQMLKQGSIDATLMATPEPDPEIESIPLFEDEIFFAAPADSPYAAMPAVDLRACQDEPFVSLSEGFATSRGFAEAFKIADFQPNLVMKVGDIFSLMNLVGGGVGYTLLPGRVKAVHSRNVAFVPLTSDYDNIRQTIGLSFLRRRERDPNLLALAAVCRMAMRQAEK

SEQ ID NO: 29264 - DNA, 918 bp, Pseudomonas fluorescens PfO-1
  CDS (1)..(918): transl_table=11
atgctgatcgacgaagagttgaccctgaagaaactcgaggtgttcctcgccttcatgcgtaccggcaacctcgcccgcgccgccgccgagctgcagaccagcaacgttagcgtgcaccgcgcgatccattcgctggaaagcgccctgcgctgtccgctgttcaagcacgaagggcgcaacctgacgccgctggaaagcgcctacgtgctcgaggagcgggcgcagaagctgattcaggacgtggtcgaaagcgtacgcctgacccgcgaagccgccgggttctcggctgaacgcttcaagctcggctcgctgtattcgctgacggtgaaaaccgtgccgcagctgatcatgggcctgaagatccgccgcagcgaactcaatatcgacctgatcctcggctcgaacatcgacctgctctacaagctgaaaaacatggaagtcgacgcgatcctggtgtcgctggacgaaaccgtcaacgacccggactgcgagcagattccgctgttttccgacgacatcttcctcgccaccccggcggattcgcgtttcgcgcagcgcagcgaagtggacctggccgaggtgcgcgacgaaaccttcatcaccctgacccaaggcttcgccactcatcaggacggtattcgggtgttcaggcaggcggggttcgagccgaaggtggcgatgcaggtcaacgacatcttcaccctgctgagcatggtcagctccggggtcggttatgcgttgctgccggggaggattgcggcggtgtacgagaaccgggtgaagctgattccgttgcaggagaaataccggttgcagcagcacatcggggtggtgtttttgaaggctaaagagcgggatccgaatctgctggcgttgttggcggagtgtcggatgtatgccaatcgccagtccacctaa

SEQ ID NO: 29265 - protein, 305 aa, Pseudomonas fluorescens PfO-1
MLIDEELTLKKLEVFLAFMRTGNLARAAAELQTSNVSVHRAIHSLESALRCPLFKHEGRNLTPLESAYVLEERAQKLIQDVVESVRLTREAAGFSAERFKLGSLYSLTVKTVPQLIMGLKIRRSELNIDLILGSNIDLLYKLKNMEVDAILVSLDETVNDPDCEQIPLFSDDIFLATPADSRFAQRSEVDLAEVRDETFITLTQGFATHQDGIRVFRQAGFEPKVAMQVNDIFTLLSMVSSGVGYALLPGRIAAVYENRVKLIPLQEKYRLQQHIGVVFLKAKERDPNLLALLAECRMYANRQST

SEQ ID NO: 29266 - DNA, 1044 bp, Burkholderia sp. 383
  CDS (1)..(1044): transl_table=11
atgattagccggagattaaatgtttccccgccgggctccgccatgcgaaaaccccggaaattcgcgcattgttgcaaccccggttctgcggcagaatcgtcggccgcccttcccgtcgtccgcaccatgcgcaaccgcatcaacgaagagatcacgttccgcaagctcgaggtgctgctcgccttcatggaagccggcagcctcgcgaaggccgccgaggcgctgggcgtcagcacggtcagcgtgcatcgcgcgctgcacacgctcgaggaagggatgcactgcgcgctgtttcgccacgaggggcggaacctgattccgaccgacgccgcgctggtgcttgccgaagtcgcgggcgaagtgctcaagacgatgacggacgggatccgctcgacgcgcgaggcggccggctacggcgccggccagttgaagatcggttcgctctactcgctgacgatccgcaccgtgcccgaagtcgtgatcgcgttgaaggaacgccgtcccgagctgcaggccgagctcgtgctcggctcgaacgccgacctgctcgacaagctccggcaaggcgcgatcgacgcgacgctgatggcgctgcccgaaccggacgccgagatcgaatcgatcgcgctgttcgaggacgagatgttcttcgccgcaccgatcgactcgccgtacgcgcggcacgacgcaatcgatctgtgtgcgtgcggcgacgcgccgttcgtgtcgctcggcgaaggcttcgcgacgcatcatggcttcacggaagcgtttcgttcggccggcgtcacgccgaacgtcgtgatgcgggtgggcgacatcttctcgctgatcaacctcgtgtcgggcggcgtcggctgttcgctgctgcccggccgcgtgcgcgacctgttcgcgcacaagatcgcgctcgtgccgctcgccggacccacgatccgccagacgatcggcttgagcttcctgcaccggcgcgaacgcgacccgaacctgctcgcactcgcgaccgtgtgccggatgacggtcaaggggccgaacgcgcgttag

SEQ ID NO: 29267 - protein, 347 aa, Burkholderia sp. 383
MISRRLNVSPPGSAMRKPRKFAHCCNPGSAAESSAALPVVRTMRNRINEEITFRKLEVLLAFMEAGSLAKAAEALGVSTVSVHRALHTLEEGMHCALFRHEGRNLIPTDAALVLAEVAGEVLKTMTDGIRSTREAAGYGAGQLKIGSLYSLTIRTVPEVVIALKERRPELQAELVLGSNADLLDKLRQGAIDATLMALPEPDAEIESIALFEDEMFFAAPIDSPYARHDAIDLCACGDAPFVSLGEGFATHHGFTEAFRSAGVTPNVVMRVGDIFSLINLVSGGVGCSLLPGRVRDLFAHKIALVPLAGPTIRQTIGLSFLHRRERDPNLLALATVCRMTVKGPNAR

SEQ ID NO: 29268 - DNA, 930 bp, Pseudomonas aeruginosa UCBPP-PA14
  CDS (1)..(930): transl_table=11
atgctgatcgacgaagaaatcaccctcaagaagctggaaaccttcctcgccttcatgcgcaccggcaacctggcgcgcgcggcggcggaactgggcaccagcaacgtcagcgtgcaccgcgccatccactcgctggaaagcgccctgcgctgcccgctgttcaagcacgagggacgcaacctgaccccgctggaaagcgcctacgtgctcgaggagcgcgcgcagaagctggtccaggaggtactcgacacggtgcgcctgacccgcgaggcggccggcttctccgccgagcgcttcaagctcggcgcgctctattcgctgacggtgaagaccgtgccgcaactgatcatgggcctcaagctgcgacgcagcgcgctgaatatcgacctgatcctcggctccaacgtcgacctgttctaccagctgaagaacatggagctggacgccatcctggtgtcgctcaacgacagcgtcagcgatcccgactgcgagcacctgccgctgttctccgatgacatcttcctcgccgtgccggtggactcgccctacgccaggctcgccgagatcgatctcagcaccctgcgcgacacgcccttcgtcacgctcacccagggcttcgccacccatcaggacggcacccgggtgttccagcaggccggtttcgaaccgcagatcgccatgcaggtgaacgacatcttcaccctcctcagcatggtcagctcgggggtcggccatgcgctgctgcccaaacgcatcgaggcggtctacgagaaccgcgtgcggctgatcccgctgcaaccgcgctatcgcctgcagcagcacatcggcgtggtgttcctcaaggccaaggagcgcgacccgaacctgctggcgttgctcgcggagtgccggatgtacagcctgcgcctggagcaggaggcggcgggatag

SEQ ID NO: 29269 - protein, 309 aa, Pseudomonas aeruginosa UCBPP-PA14
MLIDEEITLKKLETFLAFMRTGNLARAAAELGTSNVSVHRAIHSLESALRCPLFKHEGRNLTPLESAYVLEERAQKLVQEVLDTVRLTREAAGFSAERFKLGALYSLTVKTVPQLIMGLKLRRSALNIDLILGSNVDLFYQLKNMELDAILVSLNDSVSDPDCEHLPLFSDDIFLAVPVDSPYARLAEIDLSTLRDTPFVTLTQGFATHQDGTRVFQQAGFEPQIAMQVNDIFTLLSMVSSGVGHALLPKRIEAVYENRVRLIPLQPRYRLQQHIGVVFLKAKERDPNLLALLAECRMYSLRLEQEAAG

SEQ ID NO: 29270 - DNA, 912 bp, Pseudomonas putida GB-1
  CDS (1)..(912): transl_table=11
atgctgatcgacgaagaactgacccttaaaaagctggaaaccttcctcgccttcatgcgcaccggcaacctcggccgcgccgccgccgagctgtcgaccagcgcagtcagcgtgcaccgtgccatccattcgctggaaagcgcgctgcgctgcccgttgttcaagcacgaaggccgccagctgatcccgctggaaagcgcctacgtgctggaaaagaaagcccggcaactgattcaggacgccgagcagatggtgcgtcaaacccgcgaagcagccggcttttacgccgagcgcttccgcttgggcgcactctactcgctgaccgtgaaaaccgtgccaaagctggtcatgggcctcaagctgcgccgcagcgaactgaacatcgacctgaccctgggctccaacgtcgatctgctgcagcgcctgaagaaccacgaactggaggccatcctcgtctccctcgacgagagcgccagcgacccggcctgcgagcaactgccgctgttctccgacgacattttccttgccgtacctactgattcgcccttcgccgggcaggccgaggtagacctggctgacctcgccgactccactttcattaccctgacccagggcttcgccacacaccgcgatggcgcccgggtgttccagcaggccgggttcgagccgaaggtggccatgcaggtgaacgatatcttcaccctgctgagcatggtcagttcaggcgtgggcttcgccctgctgcctgggcgcatcgcggcggtgtacgagaaccgcgtcaggttgattgccttgaagccgcaatatcgcctgcagcagcacattggcgtggtgtttctgaaggcgcgcgagcgggagccaaacttgttggcgttgttggcagagtgccgaatgtacagccgagataactga

SEQ ID NO: 29271 - protein, 303 aa, Pseudomonas putida GB-1
MLIDEELTLKKLETFLAFMRTGNLGRAAAELSTSAVSVHRAIHSLESALRCPLFKHEGRQLIPLESAYVLEKKARQLIQDAEQMVRQTREAAGFYAERFRLGALYSLTVKTVPKLVMGLKLRRSELNIDLTLGSNVDLLQRLKNHELEAILVSLDESASDPACEQLPLFSDDIFLAVPTDSPFAGQAEVDLADLADSTFITLTQGFATHRDGARVFQQAGFEPKVAMQVNDIFTLLSMVSSGVGFALLPGRIAAVYENRVRLIALKPQYRLQQHIGVVFLKAREREPNLLALLAECRMYSRDN

SEQ ID NO: 29272 - DNA, 927 bp, Klebsiella pneumoniae
  CDS (1)..(927): transl_table=11
atgcaagaggatattaaccaggagatcaccttccgcaagctgtcggtctttatgatgtttatggcgaaaggtaatatcgccagaaccgccgaagcgatgaaactcagcagcgtcagcgttcaccgcgcgctgcataccctggaagagggggtgggctgcccgctgtttgtccataaagggcgcaacctgctgccgctgcaggcggcgtggacgctgcttgaatactgccaggatgtgataagtctgatgaaccgcgggctcgaggcgacgcgcaaggttgcaggcgtcggtcaggggcggttgcgcatcggtaccctctattctctgaccctggaaaccgttccgcgcatcattatggggatgaagctgcgtcgcccggagctggagctggacctgacgatgggttcaaatcagatgctgctggatatgctggaagacgatgccctcgatgccatcctgatcgccaccaacgaaggggagttcaataataccgctttcgacgtggtgccgctgtttgaggacgatatttttctcgccgccccggcgactgaacggctggatgcctcacggctcgccgatctgcgcgattacgccgaccgcaagtttgtttcgctggcggaggggttcgccacctatgccggattccgggaagcattccatatcgccggcttcgagccggagatcgtcacccgggtgaatgatatcttttcgatgataagcctggtgcaggctggcgtcggttttgccctgctgccggggcggatgaagaaagtgtatgagaaggatgtacagctgctaaagctggcggaaccctaccagatgcgccagctgatctctatcgtctattcgcaccatcgcgaacgcgatgccgacctgctggcgctggcggcggaaggacggatgtacgcccgcagtattaatcgctaa

SEQ ID NO: 29273 - protein, 308 aa, Klebsiella pneumoniae
MQEDINQEITFRKLSVFMMFMAKGNIARTAEAMKLSSVSVHRALHTLEEGVGCPLFVHKGRNLLPLQAAWTLLEYCQDVISLMNRGLEATRKVAGVGQGRLRIGTLYSLTLETVPRIIMGMKLRRPELELDLTMGSNQMLLDMLEDDALDAILIATNEGEFNNTAFDVVPLFEDDIFLAAPATERLDASRLADLRDYADRKFVSLAEGFATYAGFREAFHIAGFEPEIVTRVNDIFSMISLVQAGVGFALLPGRMKKVYEKDVQLLKLAEPYQMRQLISIVYSHHRERDADLLALAAEGRMYARSINR

SEQ ID NO: 29274 - DNA, 927 bp, Klebsiella pneumoniae
  CDS (1)..(927): transl_table=11
atgaaagacgatattaaccaggagatcaccttccgcaagctgtcggtctttatgatgtttatggcgaaaggtaatatcgccagaaccgccgaagcgatgaaactcagcagcgtcagcgttcaccgcgcgctgcataccctggaagagggggtgggctgcccgctgtttgtccacaaagggcgcaacctgctgccgctgcaggcggcgtggacgctgcttgaatactgccaggatgtgataagtctgatgaaccgcgggctcgaggcgacgcgcaaggttgcaggcgtcggtcaggggcggttgcgcatcggtaccctctattctctgaccctggaaaccgttccgcgcatcattatggggatgaagctgcgtcgcccggagctggagctggacctgacgatgggttcaaatcagatgctgctggatatgctggaagacgatgccctcgatgccatcctgatcgccaccaacgaaggggagttcaataataccgctttcgacgtggtgccgctgtttgaggacgatatttttctcgctgccccggcgactgaacggctggatgcctcacggctcgccgatctgcgcgattacgccgaccgcaagtttgtttcgctggcggaggggttcgccacctatgcgggattccgggaagcattccatatcgccggcttcgagccggaaatcgtcaccagggtgaatgatatcttttcgatgataagcctggtgcaggcaggcgtcgggtttgcgctgctgccggggcggatgaagaaagtgtatgagaaggatgtacagctgctaaagctggcggaaccctaccagatgcgccagctgatctctatcgtctattcgcaccatcgcgagcgcgatgccgacctgctggcgctggcggcggaaggacggatgtacgcccgcagtattaatcgctaa

SEQ ID NO: 29275 - protein, 308 aa, Klebsiella pneumoniae
MKDDINQEITFRKLSVFMMFMAKGNIARTAEAMKLSSVSVHRALHTLEEGVGCPLFVHKGRNLLPLQAAWTLLEYCQDVISLMNRGLEATRKVAGVGQGRLRIGTLYSLTLETVPRIIMGMKLRRPELELDLTMGSNQMLLDMLEDDALDAILIATNEGEFNNTAFDVVPLFEDDIFLAAPATERLDASRLADLRDYADRKFVSLAEGFATYAGFREAFHIAGFEPEIVTRVNDIFSMISLVQAGVGFALLPGRMKKVYEKDVQLLKLAEPYQMRQLISIVYSHHRERDADLLALAAEGRMYARSINR

SEQ ID NO: 29276 - DNA, 20 bp, Artificial sequence
  primer
atgcggcaggttccgcacgc

SEQ ID NO: 29277 - DNA, 20 bp, Artificial sequence
  primer
tcagcccgcgtggcgcttgg

SEQ ID NO: 29278 - protein, 298 aa, Artificial sequence
  consensus sequence
  Variant (2)..(3): Xaa in position 2 to 3 is any amino acid
  Variant (5)..(5): Xaa in position 5 is any amino acid
  Variant (7)..(8): Xaa in position 7 to 8 is any amino acid
  Variant (11)..(12): Xaa in position 11 to 12 is any amino acid
  Variant (14)..(15): Xaa in position 14 to 15 is any amino acid
  Variant (18)..(19): Xaa in position 18 to 19 is any amino acid
  Variant (22)..(23): Xaa in position 22 to 23 is any amino acid
  Variant (25)..(25): Xaa in position 25 is any amino acid
  Variant (27)..(31): Xaa in position 27 to 31 is any amino acid
  Variant (33)..(33): Xaa in position 33 is any amino acid
  Variant (40)..(40): Xaa in position 40 is any amino acid
  Variant (42)..(42): Xaa in position 42 is any amino acid
  Variant (45)..(48): Xaa in position 45 to 48 is any amino acid
  Variant (53)..(53): Xaa in position 53 is any amino acid
  Variant (55)..(55): Xaa in position 55 is any amino acid
  Variant (60)..(60): Xaa in position 60 is any amino acid
  Variant (63)..(64): Xaa in position 63 to 64 is any amino acid
  Variant (66)..(67): Xaa in position 66 to 67 is any amino acid
  Variant (69)..(85): Xaa in position 69 to 85 is any amino acid
  Variant (88)..(89): Xaa in position 88 to 89 is any amino acid
  Variant (92)..(99): Xaa in position 92 to 99 is any amino acid
  Variant (101)..(101): Xaa in position 101 is any amino acid
  Variant (107)..(108): Xaa in position 107 to 108 is any amino acid
  Variant (112)..(115): Xaa in position 112 to 115 is any amino acid
  Variant (117)..(117): Xaa in position 117 is any amino acid
  Variant (119)..(119): Xaa in position 119 is any amino acid
  Variant (122)..(123): Xaa in position 122 to 123 is any amino acid
  Variant (125)..(127): Xaa in position 125 to 127 is any amino acid
  Variant (129)..(130): Xaa in position 129 to 130 is any amino acid
  Variant (134)..(135): Xaa in position 134 to 135 is any amino acid
  Variant (138)..(139): Xaa in position 138 to 139 is any amino acid
  Variant (141)..(145): Xaa in position 141 to 145 is any amino acid
  Variant (148)..(148): Xaa in position 148 is any amino acid
  Variant (150)..(163): Xaa in position 150 to 163 is any amino acid
  Variant (164)..(166): Xaa in position 164 to 166 is any or no amino acid
  Variant (169)..(169): Xaa in position 169 is any amino acid
  Variant (171)..(171): Xaa in position 171 is any amino acid
  Variant (176)..(176): Xaa in position 176 is any amino acid
  Variant (178)..(182): Xaa in position 178 to 182 is any amino acid
  Variant (184)..(188): Xaa in position 184 to 188 is any amino acid
  Variant (191)..(197): Xaa in position 191 to 197 is any amino acid
  Variant (199)..(200): Xaa in position 199 to 200 is any amino acid
  Variant (202)..(203): Xaa in position 202 to 203 is any amino acid
  Variant (208)..(214): Xaa in position 208 to 214 is any amino acid
  Variant (216)..(217): Xaa in position 216 to 217 is any amino acid
  Variant (221)..(221): Xaa in position 221 is any amino acid
  Variant (223)..(227): Xaa in position 223 to 227 is any amino acid
  Variant (229)..(229): Xaa in position 229 is any amino acid
  Variant (233)..(233): Xaa in position 233 is any amino acid
  Variant (235)..(235): Xaa in position 235 is any amino acid
  Variant (237)..(237): Xaa in position 237 is any amino acid
  Variant (239)..(240): Xaa in position 239 to 240 is any amino acid
  Variant (244)..(244): Xaa in position 244 is any amino acid
  Variant (251)..(253): Xaa in position 251 to 253 is any amino acid
  Variant (257)..(258): Xaa in position 257 to 258 is any amino acid
  Variant (260)..(260): Xaa in position 260 is any amino acid
  Variant (262)..(263): Xaa in position 262 to 263 is any amino acid
  Variant (265)..(266): Xaa in position 265 to 266 is any amino acid
  Variant (267)..(268): Xaa in position 267 to 268 is any or no amino acid
  Variant (270)..(272): Xaa in position 270 to 272 is any amino acid
  Variant (274)..(274): Xaa in position 274 is any amino acid
  Variant (277)..(277): Xaa in position 277 is any amino acid
  Variant (279)..(279): Xaa in position 279 is any amino acid
  Variant (281)..(283): Xaa in position 281 to 283 is any amino acid
  Variant (288)..(288): Xaa in position 288 is any amino acid
  Variant (293)..(293): Xaa in position 293 is any amino acid
  Variant (296)..(296): Xaa in position 296 is any amino acid
IXXEXTXXKLXXFXXFMXXGNXXRXAXXXXXSXVSVHRAXHXLEXXXXCPLFXHXGRNLXPLXXAXXLXXXXXXXXXXXXXXXXXTRXXAGXXXXXXXXGXLYSLTXXTVPXXXXGXKXRRXXLXXXLXXGSNXXLLXXLXXXXXDAXLXXXXXXXXXXXXXXXXXLFXDXIFLAXPXXXXXAXXXXXDLXXXXXXXFXXLXXGFATXXXXXXXFXXAGFXPXXXXXVXDIFXLXSXVXXGVGXALLPGRXXXVYEXXVXLXXLXXXXYXXXQXIGXVXLXXXERDPXLLALXAEXRM

SEQ ID NO: 29279 - protein, 58 aa, Artificial sequence
  protein pattern
  Variant (2)..(3): Xaa in position 2 to 3 is any or no amino acid
  Variant (5)..(6): Xaa in position 5 to 6 is any amino acid
  Variant (9)..(10): Xaa in position 9 to 10 is any amino acid
  Variant (13)..(13): Xaa in position 13 is Ile or Leu
  Variant (14)..(14): Xaa in position 14 is Ala, Gly or Ser
  Variant (15)..(15): Xaa in position 15 is Lys or Arg
  Variant (16)..(16): Xaa in position 16 is Ala or Thr
  Variant (18)..(18): Xaa in position 18 is Ala, Glu or Ser
  Variant (19)..(19): Xaa in position 19 is Ala or Glu
  Variant (20)..(20): Xaa in position 20 is Leu or Met
  Variant (21)..(22): Xaa in position 21 to 22 is any amino acid
  Variant (24)..(24): Xaa in position 24 is Ala, Asn, Ser or Thr
  Variant (29)..(29): Xaa in position 29 is Lys or Arg
  Variant (31)..(31): Xaa in position 31 is Ile or Leu
  Variant (33)..(33): Xaa in position 33 is Ser or Thr
  Variant (36)..(36): Xaa in position 36 is Glu, Asn or Ser
  Variant (37)..(37): Xaa in position 37 is Ala or Gly
  Variant (38)..(38): Xaa in position 38 is Leu or Val
  Variant (39)..(39): Xaa in position 39 is any amino acid
  Variant (44)..(44): Xaa in position 44 is any amino acid
  Variant (45)..(45): Xaa in position 45 is His or Arg
  Variant (46)..(46): Xaa in position 46 is Glu or Lys
  Variant (49)..(49): Xaa in position 49 is any amino acid
  Variant (51)..(51): Xaa in position 51 is any amino acid
  Variant (54)..(54): Xaa in position 54 is any amino acid
  Variant (55)..(55): Xaa in position 55 is Ala or Ser
  Variant (57)..(57): Xaa in position 57 is Phe, His, Trp or Tyr
  Variant (58)..(58): Xaa in position 58 is Thr or Val
LXXFXXFMXXGNXXXXAXXXXXSXVSVHXAXHXLEXXXXCPLFXXXGRXLXPLXXAXX

SEQ ID NO: 29280 - protein, 42 aa, Artificial sequence
  protein pattern
  Variant (2)..(3): Xaa in position 2 to 3 is any amino acid
  Variant (6)..(6): Xaa in position 6 is Phe, Ile or Val
  Variant (7)..(7): Xaa in position 7 is Ala, Asp, Glu or Thr
  Variant (9)..(9): Xaa in position 9 is any amino acid
  Variant (10)..(10): Xaa in position 10 is any or no amino acid
  Variant (12)..(13): Xaa in position 12 to 13 is any amino acid
  Variant (14)..(14): Xaa in position 14 is any or no amino acid
  Variant (16)..(16): Xaa in position 16 is Gly, Asn or Ser
  Variant (20)..(20): Xaa in position 20 is Ser or Thr
  Variant (21)..(21): Xaa in position 21 is Leu or Met
  Variant (22)..(22): Xaa in position 22 is Ile, Leu or Val
  Variant (23)..(23): Xaa in position 23 is Asn or Ser
  Variant (24)..(24): Xaa in position 24 is Leu or Met
  Variant (26)..(26): Xaa in position 26 is Gln or Ser
  Variant (27)..(27): Xaa in position 27 is Ala, Gly, Ser or Thr
  Variant (31)..(31): Xaa in position 31 is any amino acid
  Variant (32)..(32): Xaa in position 32 is Ala or Ser
  Variant (38)..(38): Xaa in position 38 is Ile, Met or Val
  Variant (39)..(40): Xaa in position 39 to 40 is any amino acid
  Variant (41)..(41): Xaa in position 41 is Ile, Leu or Val
  Variant (42)..(42): Xaa in position 42 is Phe or Tyr
FXXAGXXPXXVXXXVXDIFXXXXXVXXGVGXXLLPGRXXXXX

SEQ ID NO: 29281 - protein, 62 aa, Artificial sequence
  protein pattern
  Variant (3)..(3): Xaa in position 3 is any amino acid
  Variant (4)..(4): Xaa in position 4 is Ala or Val
  Variant (7)..(11): Xaa in position 7 to 11 is any amino acid
  Variant (12)..(13): Xaa in position 12 to 13 is any or no amino acid
  Variant (15)..(16): Xaa in position 15 to 16 is any or no amino acid
  Variant (18)..(18): Xaa in position 18 is Ala, Ser or Thr
  Variant (24)..(24): Xaa in position 24 is Ala, Leu or Val
  Variant (25)..(25): Xaa in position 25 is Glu, His or Lys
  Variant (29)..(29): Xaa in position 29 is any amino acid
  Variant (30)..(30): Xaa in position 30 is Ile or Leu
  Variant (31)..(31): Xaa in position 31 is Ile or Val
  Variant (32)..(32): Xaa in position 32 is Ile or Met
  Variant (34)..(34): Xaa in position 34 is Leu or Met
  Variant (36)..(36): Xaa in position 36 is Ala, Ile or Leu
  Variant (39)..(39): Xaa in position 39 is Pro or Ser
  Variant (40)..(40): Xaa in position 40 is Ala, Asp, Glu or Thr
  Variant (42)..(42): Xaa in position 42 is Glu, Asn or Gln
  Variant (43)..(43): Xaa in position 43 is any amino acid
  Variant (44)..(44): Xaa in position 44 is Asp or Glu
  Variant (46)..(46): Xaa in position 46 is any amino acid
  Variant (47)..(47): Xaa in position 47 is Leu or Met
  Variant (51)..(52): Xaa in position 51 to 52 is any amino acid
  Variant (54)..(54): Xaa in position 54 is Phe or Leu
  Variant (55)..(56): Xaa in position 55 to 56 is any amino acid
  Variant (58)..(58): Xaa in position 58 is Glu or Lys
  Variant (59)..(59): Xaa in position 59 is Asp, Asn or Gln
  Variant (60)..(60): Xaa in position 60 is any amino acid
  Variant (61)..(61): Xaa in position 61 is Ala, Glu or Ser
  Variant (62)..(62): Xaa in position 62 is Ile, Leu or Val
TRXXAGXXXXXXXLXXGXLYSLTXXTVPXXXXGXKXRRXXLXXXLXXGSNXXLXXXLXXXXX

SEQ ID NO: 29282 - protein, 14 aa, Artificial sequence
  protein pattern
  Variant (3)..(3): Xaa in position 3 is Glu, Arg or Ser
  Variant (5)..(5): Xaa in position 5 is Asp or Glu
  Variant (8)..(8): Xaa in position 8 is Phe or Leu
  Variant (10)..(10): Xaa in position 10 is Ala, Thr or Val
  Variant (12)..(12): Xaa in position 12 is Ala, Thr or Val
  Variant (13)..(13): Xaa in position 13 is Asp or Thr
  Variant (14)..(14): Xaa in position 14 is Glu or Ser
LFXDXIFXAXPXXX

SEQ ID NO: 29283 - protein, 14 aa, Artificial sequence
  protein pattern
  Variant (3)..(3): Xaa in position 3 is Ala or Pro
  Variant (4)..(4): Xaa in position 4 is Asp or Asn
  Variant (9)..(9): Xaa in position 9 is Ala, Leu or Val
  Variant (11)..(11): Xaa in position 11 is any amino acid
  Variant (12)..(12): Xaa in position 12 is Cys or Gly
RDXXLLALXAXXRM

SEQ ID NO: 29284 - protein, 19 aa, Artificial sequence
  protein pattern
  Variant (3)..(3): Xaa in position 3 is any amino acid
  Variant (4)..(4): Xaa in position 4 is Asp, Glu or Thr
  Variant (5)..(6): Xaa in position 5 to 6 is any amino acid
  Variant (7)..(7): Xaa in position 7 is Asp or Glu
  Variant (8)..(9): Xaa in position 8 to 9 is any amino acid
  Variant (11)..(11): Xaa in position 11 is Ile, Leu or Val
  Variant (12)..(12): Xaa in position 12 is Ser or Thr
  Variant (14)..(14): Xaa in position 14 is Ala, Ser or Thr
  Variant (15)..(15): Xaa in position 15 is any amino acid
DLXXXXXXXFXXLXXGFAT

SEQ ID NO: 29285 - protein, 10 aa, Artificial sequence
  protein pattern
  Variant (2)..(2): Xaa in position 2 is Gln or Arg
  Variant (3)..(3): Xaa in position 3 is Ile, Leu or Met
  Variant (4)..(4): Xaa in position 4 is any amino acid
  Variant (6)..(6): Xaa in position 6 is any amino acid
  Variant (8)..(8): Xaa in position 8 is Gly or Ser
  Variant (9)..(9): Xaa in position 9 is Ile, Leu, Met or Val
YXXXQXIXXV

SEQ ID NO: 29286 - DNA, 654 bp, Azotobacter vinelandii
  CDS (1)..(654): transl_table=11
atgcgccgaaccaaggctgatgccgaaaagacccgcgaaaacatcctcgctaccgccgagcggttgtttctacgcaacggcgtggcccataccagcctggaacagatcgcccgcgccagcggcgtgacccgtggtgcggtctactggcatttccagaacaagagccatctgctcaacgaaatactcgaccaggtccgcccgcggccggaacagatcgccgagcggctgaacgccccggcgcaagcctaccccctgcagaacctgcgcgacctgctcgtggaaatcatggccgacctggccgccaacgagcaggagcgcaacatcctgacgatcctgctgatgcgctgcgaattcaccgacgaattgagcgacgcccaggaacgccacaccaacttcatcaaccagttcatcgccctcagcgaggaacagttcgaacgcgagcggcaacgcctgcgtcccggcatcagcccgcccctggcggcgcgcctgctgcacgccaccctggtcggcatgctcagcgaccgcctgcgcgatcccgggctgttcgacgtccagaccgaggcgccggtgatgatcgacgccctgttcagcggcctgctctgcgactggcggatcgccggccagcgccccgttcaggccggcgccacctcgtag

SEQ ID NO: 29287 - protein, 217 aa, Azotobacter vinelandii
MRRTKADAEKTRENILATAERLFLRNGVAHTSLEQIARASGVTRGAVYWHFQNKSHLLNEILDQVRPRPEQIAERLNAPAQAYPLQNLRDLLVEIMADLAANEQERNILTILLMRCEFTDELSDAQERHTNFINQFIALSEEQFERERQRLRPGISPPLAARLLHATLVGMLSDRLRDPGLFDVQTEAPVMIDALFSGLLCDWRIAGQRPVQAGATS

SEQ ID NO: 29288 - DNA, 651 bp, Klebsiella pneumoniae subsp. pneumoniae MGH 78578
  CDS (1)..(651): transl_table=11
atggcacgaaaaaccaaacaacaggcacgtgaaacccggcaactgattctggatgttgctctgcgtctgttttcgcagcaaggcgtatcatctacctcgttggcaacaattgcaaaagctgcgggtgtaacgaggggggctatctactggcatttcaagaataaatcagatttattcaacgaaatttgggagctgtcagacgccagtattagcgatctcgaaattgagtatcgggcaaaattccccaacgatccactctcagttatcagggagattctagtctatgttcttgaagcgacagtgacagaagaacgtcgacgattaatgatggagattatctatcataagtgtgagttcgtcggtgaaatgaccgtggtgcagcaggcccagcggcagctctccctggcgagttatgagcgtatcgagcagaccttgaaagagtgcatcgcggcgaagctgctgcccgccaatttactcacccggcgggcggccgtgttaatgcgcagctacctttccgggctgatggaaaactggctgtttgcccccgattcgttcgacctgcatgcggaagcgcgggactacgtcgctattctgctggagatgtatcaattctgcccgacgctacgcggcccggagagcttgtcagcttaa

SEQ ID NO: 29289 - protein, 216 aa, Klebsiella pneumoniae subsp. pneumoniae MGH 78578
MARKTKQQARETRQLILDVALRLFSQQGVSSTSLATIAKAAGVTRGAIYWHFKNKSDLFNEIWELSDASISDLEIEYRAKFPNDPLSVIREILVYVLEATVTEERRRLMMEIIYHKCEFVGEMTVVQQAQRQLSLASYERIEQTLKECIAAKLLPANLLTRRAAVLMRSYLSGLMENWLFAPDSFDLHAEARDYVAILLEMYQFCPTLRGPESLSA

SEQ ID NO: 29290 - DNA, 654 bp, Klebsiella pneumoniae subsp. pneumoniae MGH 78578
  CDS (1)..(654): transl_table=11
atggcaagaaaaacaaaagaagaggcgcagcgcacgcggcagctcctgattgagtccgcaatccagcagttcgccctgcgcggagtaaccaacaccaccctgacggatatcgccgatgcggcgggagtgactcgcggcgcggtgtactggcattttgccagtaagacggagctgtttaatgaaatgtggcagcagcagccgccgcttagagatttgattcagcccagtcaggccatagagtacgaacatgagccgctaaatgctttacgcgagcggtttattgcaggcctgcgctatattgctgcgaatcctcgacagcgcgctctgatgcaaattctttatcagcgctgtgagttttccagtgatatgctttcggaatacgaaattcgccaacgtattggttttaattattcactcattggcggcatcctgcagtgctgcgtgcgtaacaatatattgccagccgaaacaaacattgagatgatattaattgttttacacagtgctttttccgggctgattaaaaactggctgctcgatccgcaacgcttcgatctttatcagcaggcgcctgcgctggtggataatataatggcggtggtctgtgctgcgcgtttatcgggagggcctgcgctacggctggtgaatcagtaa

SEQ ID NO: 29291 - protein, 217 aa, Klebsiella pneumoniae subsp. pneumoniae MGH 78578
MARKTKEEAQRTRQLLIESAIQQFALRGVTNTTLTDIADAAGVTRGAVYWHFASKTELFNEMWQQQPPLRDLIQPSQAIEYEHEPLNALRERFIAGLRYIAANPRQRALMQILYQRCEFSSDMLSEYEIRQRIGFNYSLIGGILQCCVRNNILPAETNIEMILIVLHSAFSGLIKNWLLDPQRFDLYQQAPALVDNIMAVVCAARLSGGPALRLVNQ

SEQ ID NO: 29292 - DNA, 654 bp, Kineococcus radiotolerans SRS30216
  CDS (1)..(654): transl_table=11
atggccccgagcagttccacctccacccgcgccccccgcgccgacgccgagcggaaccgccggcgcgtcctggacgccgcgacgagggtgttcgccgacgtgggcgcggacgcgacgctcaacgacgtcgcccgcgccgccggcgtcggggtggccaccgtctaccgcaagttccccgacaagaccgccctcctcgacgccctggtggaggacaaggtcgaggccctggtgcggctcgtcgaggctgcgcccgcccagcgcggccccggggaggcctttcgcgacttcctgctggcgctcatggagcaacgcgccggtgaccggggcctggaggtggtcctcacctcacccaccggccgcagccacttcaccgccgaactgcagcgccgactgcttcccggcgtcgacgacctgatcgaccgcgccgtccgggccgggcagctgcgtcctggcttgagttcgcacgaggtgtgcctgctcgccttcatggtcgggaaggtcgctgacgtcacccgctccgacgacccccgcgtgtggcgtcggtacgcccaactcctcatcgacggaacccgcccctcgcacgatgtcgaagcgttgaccccacgaccgctctccttcgacgcgaccaccgcggcgctcggccgttccgtctga

SEQ ID NO: 29293 - protein, 217 aa, Kineococcus radiotolerans SRS30216
MAPSSSTSTRAPRADAERNRRRVLDAATRVFADVGADATLNDVARAAGVGVATVYRKFPDKTALLDALVEDKVEALVRLVEAAPAQRGPGEAFRDFLLALMEQRAGDRGLEVVLTSPTGRSHFTAELQRRLLPGVDDLIDRAVRAGQLRPGLSSHEVCLLAFMVGKVADVTRSDDPRVWRRYAQLLIDGTRPSHDVEALTPRPLSFDATTAALGRSV

SEQ ID NO: 29294 - DNA, 648 bp, Escherichia coli O157:H7 EDL933
  CDS (1)..(648): transl_table=11
atggcacgaaaaaccaaacaagaagcgcaagaaacgcgccaacacatcctcgatgtggctctacgtcttttctcacagcagggggtatcatccacctcgctgggtgagattgcaaaagcagctggcgttacgcgcggtgcaatctactggcattttaaagacaagtcggatttgttcagtgagatctgggaactatcagaatccaatattggtgaactagagcttgagtatcaggcaaaattccctagcgatccactctcagtattaagagagatattaattcatgttcttgaatccacggtgacagaagaacggcgtcgattattgatggagattatattccacaaatgcgaatttgtcggagaaatggctgttgtgcaacaggcacaacgtaatctctgtttggaaagttatgaccgtatagaacaaacgttaaaacattgtattgaagcgaaaatgttgcctgcggatttaatgacgcgtcgggcagcaattattatgcgcggctatatttccggcctgatggaaaactggctctttgccccgcaatcttttgatcttaaaaaagaagcccgcgattacgtcgccatcttactggagatgtatctcctgtgccccacgcttcgtaatcctgccactaacgaataa

SEQ ID NO: 29295 - protein, 215 aa, Escherichia coli O157:H7 EDL933
MARKTKQEAQETRQHILDVALRLFSQQGVSSTSLGEIAKAAGVTRGAIYWHFKDKSDLFSEIWELSESNIGELELEYQAKFPSDPLSVLREILIHVLESTVTEERRRLLMEIIFHKCEFVGEMAVVQQAQRNLCLESYDRIEQTLKHCIEAKMLPADLMTRRAAIIMRGYISGLMENWLFAPQSFDLKKEARDYVAILLEMYLLCPTLRNPATNE

SEQ ID NO: 29296 - DNA, 642 bp, Agrobacterium tumefaciens str. C58
  CDS (1)..(642): transl_table=11
ttggaaggagacatcagcatgcgccgaaccaaggccgaggcagaagagacgcgtcaggcgatccttgccgccgccgagcgggtgttcttcaaaaagggtgtggccaatagttcactggacgaggtggcggccgcggccggtgtcacgcgtggcgccatatactggcatttttccagcaaggccgaccttttcattggcctttacgaatccgtagcgctgccggaatcggatctgctggattttggcgatccggacctcaaggggacagcactgctggccaagatcgaggaggcgacgtgcaagtggcttgcgcttctggcagaagacgaacaacgccagcgcatcatgacgatcagcctgcgtaccaattattccgacgagtttgccccggtcctgcatgcgcaggaagaactggaccgtcaccacaaggatgtgctggaggccgcttttcagcgtgtacagtcagagggtgtcttcaacgataattggacggcagagtcggcgctcggtgcgctttactggctgctgaaaggcatagtctatgactggctgctgttcggtaaacgtttcgatctggtcaaggaaggggccgaggcgatgcatcgtctcatgaagggatttcaacgtcctccagtaccttga

SEQ ID NO: 29297 - protein, 213 aa, Agrobacterium tumefaciens str. C58
MEGDISMRRTKAEAEETRQAILAAAERVFFKKGVANSSLDEVAAAAGVTRGAIYWHFSSKADLFIGLYESVALPESDLLDFGDPDLKGTALLAKIEEATCKWLALLAEDEQRQRIMTISLRTNYSDEFAPVLHAQEELDRHHKDVLEAAFQRVQSEGVFNDNWTAESALGALYWLLKGIVYDWLLFGKRFDLVKEGAEAMHRLMKGFQRPPVP

SEQ ID NO: 29298 - DNA, 651 bp, Sinorhizobium meliloti 1021
  CDS (1)..(651): transl_table=11
atgcgccgaaccaaggccgacgccgaggctacaagacagaagatcctgtgcgccgccgagcggatgttctacaagaagggcgttcccaacacgacgctcgaggaagtggcgaaggaggctggcgtcacccgcggcgccatctactggcatttcgccaacaagacggatcttttcctcgccctttacgaggccgtgccgctgccccacgaagacatgatcgcacgcgagatcgaaacggaagccttcgacacgctcgccatcgtcgagagcgcgaccagcgactggctgacgaccctggccgcggacgagcagcggcagcgcattctcgcgatcatgctgcgctgcgactacgacaatgacatgtccgccgttctcgtgcgccagcgcgaaatcgaggagcgccacgatgcccttctcgagcttgccttcgcccgcgcactggaaaggggtcagttgcaggagcactgggcgccgccgactgcggcgcgggccctgcgctggatgatgatggggctctgtaccgaatggctgctcttcggccgccgcttcgacctcgtggcccaggggagcgaagcactccagtctctctttgcgggcttccggcgggtgccggctcgcggcgatacctcctcccgcctcggccctaactga

SEQ ID NO: 29299 - protein, 216 aa, Sinorhizobium meliloti 1021
MRRTKADAEATRQKILCAAERMFYKKGVPNTTLEEVAKEAGVTRGAIYWHFANKTDLFLALYEAVPLPHEDMIAREIETEAFDTLAIVESATSDWLTTLAADEQRQRILAIMLRCDYDNDMSAVLVRQREIEERHDALLELAFARALERGQLQEHWAPPTAARALRWMMMGLCTEWLLFGRRFDLVAQGSEALQSLFAGFRRVPARGDTSSRLGPN

SEQ ID NO: 29300 - DNA, 654 bp, Salmonella typhimurium LT2
  CDS (1)..(654): transl_table=11
atggcacgaaaaaccaaacaacaagcgctggagacacgacaacacatcctggatgtggccctgcgtttgttctcgcagcaaggcgtatcggcaacctcgctggcggagattgcgaacgctgctggcgtgacgcgcggcgcaatctattggcatttcaaaaataagtcggatttattcagtgagatctgggagctatcagaatccaatattggtgagcttgagattgagtatcaggcaaaattccccgacgatccactatctgtattaagagaaattttagttcatattcttgaagctactgtaacagaagaacgacgccgcttattgatggagattatattccataaatgtgagtttgtcggagaaatggttgtggttcaacaggcgcaacgtagcctttgtctggaaagttacgatcggattgaacaaacgttaaaacattgtattaatgctaaaatgctgcctgaaaatctgctgacccgtcgtgcggcgatactgatgcgcagctttatttcagggctcatggaaaactggttatttgctccgcaatcgtttgatttaaaaaaagaagctcgcgcctacgtcacgatcctgctggagatgtatcaattgtgtccgacgctgcgcgcgtcgacggtcaacggctccccctga

SEQ ID NO: 29301 - protein, 217 aa, Salmonella typhimurium LT2
MARKTKQQALETRQHILDVALRLFSQQGVSATSLAEIANAAGVTRGAIYWHFKNKSDLFSEIWELSESNIGELEIEYQAKFPDDPLSVLREILVHILEATVTEERRRLLMEIIFHKCEFVGEMVVVQQAQRSLCLESYDRIEQTLKHCINAKMLPENLLTRRAAILMRSFISGLMENWLFAPQSFDLKKEARAYVTILLEMYQLCPTLRASTVNGSP

SEQ ID NO: 29302 - DNA, 663 bp, Salmonella typhimurium LT2
  CDS (1)..(663): transl_table=11
atggcgaagaaaacgaaggcggatgcgcttaaaacgcggcaacatttgattgaaaccgctattgcgcagttcgctttgcgcggcgttgccaacacgacgttgaatgatatcgctgatgccgctgatgtcacgcggggcgccatctactggcactttgagaataaaacgcagttgtttaatgaggtttggttacagcaaccacctttacgcgaacttattcaggataggcttacgggatgctggaatgataatcctttacaggatctacgagagaaatttattgcagccttacaatatattgcggcagtgcctcgtcagcaggcattaatgcagattttatatcataaatgtgaattccataatggtatgatatcggaacaggccattcgggagaagatgggtttccatcatcagtcgctgcttgaagtattacagcgatgtatggataaaaaactgatctcaggcagtcttgatctggatgtcatattaattattctgcatggtagttttagcggaatagtaaaaaactggttaatgaatcccacaagttatgatctttataagcaggcgcctgcattagtcgataatgtattaaaaatgctaagcccggatggcagtgtgaggcaattaatgccaaatgaacaacaggcggaagaagcctga

SEQ ID NO: 29303 - protein, 220 aa, Salmonella typhimurium LT2
MAKKTKADALKTRQHLIETAIAQFALRGVANTTLNDIADAADVTRGAIYWHFENKTQLFNEVWLQQPPLRELIQDRLTGCWNDNPLQDLREKFIAALQYIAAVPRQQALMQILYHKCEFHNGMISEQAIREKMGFHHQSLLEVLQRCMDKKLISGSLDLDVILIILHGSFSGIVKNWLMNPTSYDLYKQAPALVDNVLKMLSPDGSVRQLMPNEQQAEEA

SEQ ID NO: 29304 - DNA, 660 bp, Ralstonia solanacearum GMI1000
  CDS (1)..(660): transl_table=11
atggtcagacgaaccaaggaagaagcgctggaaacgcgcaaccgcatcctcgacgcggcggaagaggtgttctatgtgcgtggcgtggcgcgcacgtcgctatccgacatcgcgcaggcggccggtgtcacgcgcggcgccatctactggcatttccgcaacaaggccgatgtgttcgccgccatgtgcgagcgcgtcaagctgccgatggagaccctgtgctcgccgctgggcgtcgaacccaacgatccgctgggcgagctgcgcaatgtggccaatttcgtgctgcagcagctggtggaagacatgcactggcgccgggtcttcgagatcatgttcaacaagtgcgagttcgtggaggacacgagcccgatcctcaagcgccagcaggagtccttcgaggaggggcttgcacgcctgacccacatcatcgggcaggcggcccggcgcgggcagctgccgcccgacctggatgtgccgctggcggtggcgcatttccacgcctcgttcggcggcatcatgggcgactacctgttctatccggacgcctccagcctcgccgtcaagcgcgagcgcttcgtcgatgcctgcatcgacacactcaagtactcgcccgcgctgcgcctggcgcagcccgtcgtcgccgaggcttgtgcatga

SEQ ID NO: 29305 - protein, 219 aa, Ralstonia solanacearum GMI1000
MVRRTKEEALETRNRILDAAEEVFYVRGVARTSLSDIAQAAGVTRGAIYWHFRNKADVFAAMCERVKLPMETLCSPLGVEPNDPLGELRNVANFVLQQLVEDMHWRRVFEIMFNKCEFVEDTSPILKRQQESFEEGLARLTHIIGQAARRGQLPPDLDVPLAVAHFHASFGGIMGDYLFYPDASSLAVKRERFVDACIDTLKYSPALRLAQPVVAEACA

SEQ ID NO: 29306 - DNA, 624 bp, Agrobacterium tumefaciens str. C58
  CDS (1)..(624): transl_table=11
atgcgccgaaccaaggccgaggcagaagagacgcgtcaggcgatccttgccgccgccgagcgggtgttcttcaaaaagggtgtggccaatagttcactggacgaggtggcggccgcggccggtgtcacgcgtggcgccatatactggcatttttccagcaaggccgaccttttcattggcctttacgaatccgtagcgctgccggaatcggatctgctggattttggcgatccggacctcaaggggacagcactgctggccaagatcgaggaggcgacgtgcaagtggcttgcgcttctggcagaagacgaacaacgccagcgcatcatgacgatcagcctgcgtaccaattattccgacgagtttgccccggtcctgcatgcgcaggaagaactggaccgtcaccacaaggatgtgctggaggccgcttttcagcgtgtacagtcagagggtgtcttcaacgataattggacggcagagtcggcgctcggtgcgctttactggctgctgaaaggcatagtctatgactggctgctgttcggtaaacgtttcgatctggtcaaggaaggggccgaggcgatgcatcgtctcatgaagggatttcaacgtcctccagtaccttga

SEQ ID NO: 29307 - protein, 207 aa, Agrobacterium tumefaciens str. C58
MRRTKAEAEETRQAILAAAERVFFKKGVANSSLDEVAAAAGVTRGAIYWHFSSKADLFIGLYESVALPESDLLDFGDPDLKGTALLAKIEEATCKWLALLAEDEQRQRIMTISLRTNYSDEFAPVLHAQEELDRHHKDVLEAAFQRVQSEGVFNDNWTAESALGALYWLLKGIVYDWLLFGKRFDLVKEGAEAMHRLMKGFQRPPVP

SEQ ID NO: 29308 - DNA, 615 bp, Agrobacterium tumefaciens str. C58
  CDS (1)..(615): transl_table=11
atggcgaaagcaaaactgacacgcgctgaacagaagatacaacgtccgctacaaattctcgacgctgcattcgaggaattcaccaaaagaggtttcacggcgacgcgggtggaggacattgccgaacgggtgggagttacgaagggcacggtctacgtctatttcgagaccaaggaggcgctgttcgaggcgatggtcagacatgcctcggtgccgtttcaggaggccttcaaggcctatacgcataaatccgacgaccccgtcgaggagcttcgctcgctgctagaattcctgttcgacgccttggtcgacaaccgaaaaatgcgcgaactgttccgcctgatcgtcgcggaaggcgcaaaatttcctgaactcatcgaccagcaccacgacacgttgatggtcccggttttcgcgcgcatcgatgcgatcctgaatgagggcgtggcgaagaaaagattcagggccaaccccccggaactcgccaaggtggtgatgtcgcccatggtcggaacattggtgttccggctgatcttcgacgacaggcgcagcctggacaagcgcgccgtcctgacgatccatctggagctgatcatgcgcggtctactggcctga

SEQ ID NO: 29309 - protein, 204 aa, Agrobacterium tumefaciens str. C58
MAKAKLTRAEQKIQRPLQILDAAFEEFTKRGFTATRVEDIAERVGVTKGTVYVYFETKEALFEAMVRHASVPFQEAFKAYTHKSDDPVEELRSLLEFLFDALVDNRKMRELFRLIVAEGAKFPELIDQHHDTLMVPVFARIDAILNEGVAKKRFRANPPELAKVVMSPMVGTLVFRLIFDDRRSLDKRAVLTIHLELIMRGLLA

SEQ ID NO: 29310 - DNA, 630 bp, Brucella melitensis 16M
  CDS (1)..(630): transl_table=11
atgcgcagaacaaaagccgaggccgcggaaacccgtgaagccattcttctggcagccgaacaggtgttcctcgaacgcggcgtgaaccagtccacactgacggaaatcgcatgttacgcaggcgtgacgcgcggcgcgatctattttcattttgaagacaagctcgatattttccagtccatcattggccgggcgcgctttccgcaggaagagatcatgcttcaggcggcgcgcttcgaccatcccaatccgctccatattctcgaacaatccatcgtcgccgcgctggagcttttcgccaccgatgaaagacagcaggtcgtcttcaccatcatcaaccagcgttgcgaatatgtgggcgagatggctcccgtcatcgaccggctgaaggaaatgcgcagtaatgtgctggcgcttttcatcggccttttgaaagtggccgagcggcgcggcgagcttgcaagcgaatggagcgccgaaacggcggcgcaaattctgctcgccatggtgggtggttttctcaatgaatggttacacggtgaaaaaggtttcgatctcatcatccatggcagccgtgtgatttccacagtgatccagtcgctgcgcgcacccgcaaatatcccgcagtag

SEQ ID NO: 29311 - protein, 209 aa, Brucella melitensis 16M
MRRTKAEAAETREAILLAAEQVFLERGVNQSTLTEIACYAGVTRGAIYFHFEDKLDIFQSIIGRARFPQEEIMLQAARFDHPNPLHILEQSIVAALELFATDERQQVVFTIINQRCEYVGEMAPVIDRLKEMRSNVLALFIGLLKVAERRGELASEWSAETAAQILLAMVGGFLNEWLHGEKGFDLIIHGSRVISTVIQSLRAPANIPQ

SEQ ID NO: 29312 - DNA, 648 bp, Chromobacterium violaceum ATCC 12472
  CDS (1)..(648): transl_table=11
atggcacggaaaacacgtgaggaagcggaacagacccgccagcagttgctggacgccgccgagcagttgttcagcgagcagggcgtgtcgcgcaccacgctggcggaaatcgccaccgccgccgggctgacccgcggcgcggtgtactggcacttccagaacaagctggatctgtaccgcgcgatgctggaccgggtgtcgccgtcgttcgacgacatgcgcgagcaactgttgctcgtcgccaacacggatccggcccaggcgctgtggcagcacagccaccggctgctggcgctgatcgagcacgatccgcaggtgcggcgcatcctgctgatcctgttcatgcgcagcgaatacgtcggcgagctggcgccgatacacgaggagtgcattgcccacatgcacgaggcgcgcggcctgctgagccaggtggtgggcgccgccaaggcgcgcgggcagacttacgactgcgtcgatccggacgaagtggcggtggcgctgcagtcgctgcacgacggcctgatgacccggctgctggtggaccggccgtgcccggacgccaccctggccgccagccggctgttgcagtatttgtaccgcggcattttcctgccgccggtgatggaacaacttaccacttgcggctga

SEQ ID NO: 29313 - protein, 215 aa, Chromobacterium violaceum ATCC 12472
MARKTREEAEQTRQQLLDAAEQLFSEQGVSRTTLAEIATAAGLTRGAVYWHFQNKLDLYRAMLDRVSPSFDDMREQLLLVANTDPAQALWQHSHRLLALIEHDPQVRRILLILFMRSEYVGELAPIHEECIAHMHEARGLLSQVVGAAKARGQTYDCVDPDEVAVALQSLHDGLMTRLLVDRPCPDATLAASRLLQYLYRGIFLPPVMEQLTTCG

SEQ ID NO: 29314 - DNA, 627 bp, Rhodopseudomonas palustris CGA009
  CDS (1)..(627): transl_table=11
atgcggcggacgaaactggaagcagaaacaacgcgcgagaccatactcgcggtggccgagcggctgttcctcgaaagcggcgtcaccgaggtgtcgctggagcagatcgccgtggcggccgggttcacccggggggcggtgcattggcatttccagaacaagcaggggctgctgctagcgttgctggaccggatgggccttccgctcgaacaactcgccggtcagctcgagatcgacgataccctcgacccgatggacgaactggtccgcgacatgaccgggcggctctgcgagctggagatggatccgaaacgcaagcggctctccacctacctggtcaatttcgccgcggtcgaagcgcccgagcgccagcgcaacttcgaccgcaaattcagatcctcggtcaccatcatttttcgtttggccgagaaacgcggccggctggcgccgcactggcggccggagatcgccgcgctagccttctgcggcatggtgatgggcctgatcaatcaatggctgaacggcgagaccgagttcgacatgcgcaatgacgtcaccgcggctgtgcgggctttttcgtcctcgctgcgggcgcagcccgacgatccaaaaagaccaggagcttag

SEQ ID NO: 29315 - protein, 208 aa, Rhodopseudomonas palustris CGA009
MRRTKLEAETTRETILAVAERLFLESGVTEVSLEQIAVAAGFTRGAVHWHFQNKQGLLLALLDRMGLPLEQLAGQLEIDDTLDPMDELVRDMTGRLCELEMDPKRKRLSTYLVNFAAVEAPERQRNFDRKFRSSVTIIFRLAEKRGRLAPHWRPEIAALAFCGMVMGLINQWLNGETEFDMRNDVTAAVRAFSSSLRAQPDDPKRPGA

SEQ ID NO: 29316 - DNA, 639 bp, Herminiimonas arsenicoxydans
  CDS (1)..(639): transl_table=11
atggcgcgatgtacgaaagaagaagcactggaaacccgcagccgcatcatcgatgcggcggaggaggtgtttcacgcgcgcggtctggctcaatccacattgagtgatgttgcactggcggcggatgtgacgcggggggccatttactggcacttcaagaacaagggcgatttgtttgatgcgatgtgcgaacgcgtgcgtttgccgctggaatcgctggcggccacgccgtttgaacagtatgcgcacaatcctttgggacatttgcgcaatacctgggtggcgttcatgaagaacgtcgtcagcgatacgcgctcacgcaaagtgctggacattatttttctgcgatcggaactggtcgatcgtgatgatccgatctgggtgcgccagcagcattgctatgaaaaaggtttggataatatggagcgcatcctgaaggaagcggtcgcgctcgatcagttgccgaaagatctggatacgcgcctggcggcgatcagcttgcacagccatgtgatcggtcttttgatgaactggctgttttcacccggcagttttgcattggcggaagttgcgccagccgtgattgacggctgcctggaaagccttgcttgtgctacatccatgcgtttgaaaacctag

SEQ ID NO: 29317 - protein, 212 aa, Herminiimonas arsenicoxydans
MARCTKEEALETRSRIIDAAEEVFHARGLAQSTLSDVALAADVTRGAIYWHFKNKGDLFDAMCERVRLPLESLAATPFEQYAHNPLGHLRNTWVAFMKNVVSDTRSRKVLDIIFLRSELVDRDDPIWVRQQHCYEKGLDNMERILKEAVALDQLPKDLDTRLAAISLHSHVIGLLMNWLFSPGSFALAEVAPAVIDGCLESLACATSMRLKT

SEQ ID NO: 29318 - DNA, 642 bp, Burkholderia vietnamiensis G4
  CDS (1)..(642): transl_table=11
atggtcagacgcaccaaggaggaggcactcgagacgcgcaaccgcattctcgacgccgccgaacacgtattcttcgagaaaggcgtgtcgcacacgtcgctcgcggacatcgcccagcacgccggcgtcacgcgcggcgcgatctactggcatttcgccaacaagagcgagttgttcgacgcgatgttcgaccgcgtgttcctgccgatcgacgagttgaagcggatgccgcccgatgcgccgggcgccgatccgctggaaaagatccgcaagatcctgatctggtgcctgctgggcgtgcagcgcgacccgcagttgcggcgcgtgttcagcatcctgttcatgaagtgcgaatacgtggccgacctggagccgctgctgcagcgcaatcgcgcgggcatgagcgaggcgctgcacgcgctcgacgccgatctcgcgctcgccgtgcagctcaagctgctgcccgagcggctcgacacgtggcgcgcgacgctgatgctgcatacgctcgtcagcggctttgtgcgcgacatgctgatgctccccgacgagatcgacgccgaacagcacgcggagcagctggtcgacggctgcttcgacatgatgcgttatagcccggcgatgctgaagacggggggatga

SEQ ID NO: 29319 - protein, 213 aa, Burkholderia vietnamiensis G4
MVRRTKEEALETRNRILDAAEHVFFEKGVSHTSLADIAQHAGVTRGAIYWHFANKSELFDAMFDRVFLPIDELKRMPPDAPGADPLEKIRKILIWCLLGVQRDPQLRRVFSILFMKCEYVADLEPLLQRNRAGMSEALHALDADLALAVQLKLLPERLDTWRATLMLHTLVSGFVRDMLMLPDEIDAEQHAEQLVDGCFDMMRYSPAMLKTGG

SEQ ID NO: 29320 - DNA, 642 bp, Erwinia carotovora subsp. atroseptica SCRI1043
  CDS (1)..(642): transl_table=11
atggcacgaaaaaccaaaaaacaggctcaggaaactcggcaacagatactggatactgcgttaagagtgttctctgagcatggtgtgtctgcgacttcattgtctgatattgcgactgctgctggtgtgacccgcggtgctatttattggcattttaagaacaaagccgaaatttttgatgaaatctgggctctggcagagtcaaaaatcagtgagtttgaaatagagtatcagacaaaattccctgataatccactccgtgtgatgcgtgaattattgatttatatgctgcgtttaaccgttagcgacactcactggcgttccattatggagatcgtttttcacaaatgtgagtttgtcggtgaaatgctgcaatcgtataatgcacgaaaagagctttatctttcctgctatgtggatatcgaagaaaacctgattgagtgcattcgtatggggatgttgccgacggacattcatccccgtcgggcagcgattgcgctgcgtgcctatttctccggtgtgatggagaactggttatttatgccggaaagtttcgatctcgatcaggaagccccggcgctggtagatgcctttatcgacatgttgcattttagccctgcgctgcgtaaacctgctgagtaa

SEQ ID NO: 29321 - protein, 213 aa, Erwinia carotovora subsp. atroseptica SCRI1043
MARKTKKQAQETRQQILDTALRVFSEHGVSATSLSDIATAAGVTRGAIYWHFKNKAEIFDEIWALAESKISEFEIEYQTKFPDNPLRVMRELLIYMLRLTVSDTHWRSIMEIVFHKCEFVGEMLQSYNARKELYLSCYVDIEENLIECIRMGMLPTDIHPRRAAIALRAYFSGVMENWLFMPESFDLDQEAPALVDAFIDMLHFSPALRKPAE

SEQ ID NO: 29322 - DNA, 648 bp, Symbiobacterium thermophilum IAM 14863
  CDS (1)..(648): transl_table=11
ttgacaacgggcccggcatctcccatgtccccccgtccgaagaacccgccgccggatcggcgggcggagatcctcgacgccgccctgcggctcttcgccgagaaggggtacgccgaggccaccaacgccgagatcgccaaggaggccggggtcaccgcggcggcactctactactacttccccagcaaggaggagctgttcaggaccgcggtgcgccagcacatcgggcggtttgtcccgacgctgcgggcgctgacggcgcaggcgcccgcggacgcctccggtccggaggccgtcgggatgatcctccggaacgcgctggctttcttcacggaggagaagacgcagctggtgctccggatcgtcctggccgaggggccccggcgccccgagatccgccagatctggatcgaccagatcaccgggatcttcgaatttttggcccccttcgtgatgaacgccatcgcctcggggcagatccgccccatcgacccccggctgatcttcgtcctgctccagggccccatgctgtcgaccgtgatcatccgggacctcctgcaggttcccgcgctggaggggctcaccaacgacgccgtggtcgacgcggtcctggagaccacgctggccggccttcggaccgacggctga

SEQ ID NO: 29323 - protein, 215 aa, Symbiobacterium thermophilum IAM 14863
MTTGPASPMSPRPKNPPPDRRAEILDAALRLFAEKGYAEATNAEIAKEAGVTAAALYYYFPSKEELFRTAVRQHIGRFVPTLRALTAQAPADASGPEAVGMILRNALAFFTEEKTQLVLRIVLAEGPRRPEIRQIWIDQITGIFEFLAPFVMNAIASGQIRPIDPRLIFVLLQGPMLSTVIIRDLLQVPALEGLTNDAVVDAVLETTLAGLRTDG

SEQ ID NO: 29324 - DNA, 636 bp, Burkholderia mallei ATCC 23344
  CDS (1)..(636): transl_table=11
atggccagacgcacgaaggaggaagcgctcgcgacgcgcgaccgcatcctcgacgccgccgagcacgtcttcttcgagaaaggcgtatcgcacacgtcgctcgccgacatcgcccagcacgcgggcgtcacgcggggcgcgatctattggcacttcgcgagcaagagcgagctcttcgacgcgatgttcgaccgcgtgctcctgccgatcgacgaactgaaggccggcacgggcgagccgcacgcggacccgctcggccggattcgcgaaatcctgatctggtgcctgctcggcgccgcgcgcgatccgcaattgcggcgcgtgttcagcatcctgttcatgaagtgcgagtacgtcgcggacatggggccgctgctgcagcgcaaccgcgaaggcatgcgcgacgccctgcgcaacatcgaggcggatctcgcgcagggcgtcgcgaacggccagttgcccgccgatctcgacacgtggcgtgcgacgctgatgctgcatacgctcgtgagcggcttcgtgcgcgacatgctgatgctgccgggcgagatcgacgccgaacggcatgcggaaaaactcgtcgacggctgcttcgacatgctgcgcatgagccccgcgatgcgcaaggacgactga

SEQ ID NO: 29325 - protein, 211 aa, Burkholderia mallei ATCC 23344
MARRTKEEALATRDRILDAAEHVFFEKGVSHTSLADIAQHAGVTRGAIYWHFASKSELFDAMFDRVLLPIDELKAGTGEPHADPLGRIREILIWCLLGAARDPQLRRVFSILFMKCEYVADMGPLLQRNREGMRDALRNIEADLAQGVANGQLPADLDTWRATLMLHTLVSGFVRDMLMLPGEIDAERHAEKLVDGCFDMLRMSPAMRKDD

SEQ ID NO: 29326 - DNA, 660 bp, Pseudomonas syringae pv. syringae B728a
  CDS (1)..(660): transl_table=11
atggttcgtcgcaccaaagaggaagctcagatcactcgcagccagattctggaggctgccgagcaggctttttatgagcgaggcgtcgcccgcaccacactggccgacattgcaacccttgccggtgtgacgcgaggcgccatctattggcactttaacaataaggccgatctggtgcaggccatgctcgacagtcttcaggaacccctcgacgaaatggcgcaggccagtcagagcgaggaagaggaagacccgctgggctgcatgagaaatctgttgattcacctgtttcatgagctcgcactggacccgaaaacccgtcgcatcaatgaaatcctgtttcacaagtgcgagtttaccgacgagatgtgtgattttcgtcgtcagcgccaggacaacgccatacagtgccacgatcggatcaccctggggctgaacaatgccgtacgccaggggcagctacccaaaaggctggacactgcgcgcgctgcagtggccctgtttgcctacgtcaacggcatcatctatcaatggctgctggttccggacagcttctcgctgcctgcagaggccgagcaactggtcgacgtgtgcctggacatgctgcgtttcagcccgacgttgctgatcgataataaccgctcgacagtgggtgcctga

SEQ ID NO: 29327 - protein, 219 aa, Pseudomonas syringae pv. syringae B728a
MVRRTKEEAQITRSQILEAAEQAFYERGVARTTLADIATLAGVTRGAIYWHFNNKADLVQAMLDSLQEPLDEMAQASQSEEEEDPLGCMRNLLIHLFHELALDPKTRRINEILFHKCEFTDEMCDFRRQRQDNAIQCHDRITLGLNNAVRQGQLPKRLDTARAAVALFAYVNGIIYQWLLVPDSFSLPAEAEQLVDVCLDMLRFSPTLLIDNNRSTVGA

SEQ ID NO: 29328 - DNA, 633 bp, Pseudomonas fluorescens Pf-5
  CDS (1)..(633): transl_table=11
atggtccgtcgtaccaaagaggaagctcaagaaactcgcagccagatactcgaggccgccgaaaaggccttttacgagcgtggcgtggcgcgtaccaccctggccgacatcgcggcgctggcgggagtcacgcgaggtgccatctattggcacttcagcaacaaggccgatctggtgcaggccatgctcgacagcctgcgtgaacctttggatgaaatggccgcggccagtgagaatgtagatgaaatggacccgttgggctgcatgcgcaagctgctcattcatttgtttcatcaagttgccctggacccgaaaacccgacgcatcaatgaaatcctgtttcacaagtgcgagttcaccgacgaaatgtgcgacctgcgccgccagcgtcgcgctgccagcttggactgcaacgtacacatcgagctggcgttgcgtaatgcagtgaatcgtgggcaattgcccgagaatctcgatgcggcgcgggcagctatcacgttgcatgcgttcatcgatggcattctctaccagtggttgctggcccctgacagcttcgccctgcacaccgaagcagagcgctggatcgacatcgggctggatatgctgcgcttgagccccaacctccgtcattaa

SEQ ID NO: 29329 - protein, 210 aa, Pseudomonas fluorescens Pf-5
MVRRTKEEAQETRSQILEAAEKAFYERGVARTTLADIAALAGVTRGAIYWHFSNKADLVQAMLDSLREPLDEMAAASENVDEMDPLGCMRKLLIHLFHQVALDPKTRRINEILFHKCEFTDEMCDLRRQRRAASLDCNVHIELALRNAVNRGQLPENLDAARAAITLHAFIDGILYQWLLAPDSFALHTEAERWIDIGLDMLRLSPNLRH

SEQ ID NO: 29330 - DNA, 645 bp, Pseudomonas syringae pv. phaseolicola 1448A
  CDS (1)..(645): transl_table=11
atggttcgtcgcaccaaagaggaagctcagatcactcgcagccagattctggaggctgccgagcaggctttttatgagcgaggcgtcgcccgcaccacgctggctgacatcgcaacccttgctggtgtgacgcgaggagccatttactggcacttcaacaataaggccgatctggttcaggcaatgctcgacagtcttcaggaaccactcgatgaaatggcgcaggccagtcagagcgaagaggaagaagacccactgggctgtatgagaaatcttttgattcatttgtttcatgagctcgcactggacccgaaaacccgtcgcatcaatgaaatcctgtttcacaaatgcgagtttactgacgagatgtgtgattttcgtcgtcagcgccaggacaacgccatacagtgccacgaccggatcaccctggggctgaacaatgccgtacgtcaggggcaacttccaaaagatctcgatacggcccgggccgcagtcgccctgttttcttgcgtaaacggcatcatttatcaatggctgctggttccagacagcttttcattgccggcagaggccgagcaactggttgatgtgtgtctggacatgctgcgtttcagccctacgctaagaatcagcaaggcttcctga

SEQ ID NO: 29331 - protein, 214 aa, Pseudomonas syringae pv. phaseolicola 1448A
MVRRTKEEAQITRSQILEAAEQAFYERGVARTTLADIATLAGVTRGAIYWHFNNKADLVQAMLDSLQEPLDEMAQASQSEEEEDPLGCMRNLLIHLFHELALDPKTRRINEILFHKCEFTDEMCDFRRQRQDNAIQCHDRITLGLNNAVRQGQLPKDLDTARAAVALFSCVNGIIYQWLLVPDSFSLPAEAEQLVDVCLDMLRFSPTLRISKAS

SEQ ID NO: 29332 - DNA, 720 bp, Ralstonia eutropha JMP134
  CDS (1)..(720): transl_table=11
atggtcagacgcaccaaggaagaggcgctcgaaacgcgccaccggattctcgacgcagccgaaaccgtgtttcacgcgcgcggcgtggcgcgcccgtcgctggcagacattgccgaggcggccggcgttacccgcggcgccatctactggcacttcaagaacaagagcgacgtgttcgccgccatgtgcgaccgcgtgaacctgcccgtggaagcgctatgcgacccggagcgcatcgcgcgccaggaagacccgctgggaggcatacgcgacatctgcgccttcgtcatgcgccagaccgtggtcaatccgcgctggcggcgggtgttcgagatcatcttccacaagtgcgagatggtgcaggacaacggggccatcttcgaacgccagcgccagtcgcaccaggaaggcatggtgaagatccgcgagcacctgcgctttgcggtggagcgcggccagcttccggccgatctggacctggacctggccgtgaacgcgttccatgcggcgattggcggcgtgctcgcgcactggctgttctcgccacaggacttcgacctcgacgccaatgccgagcgcctgtcggacgccttcatcgatacgctcaggttttccccggcgctgcgccatggctatgtgccgcgcccgatggcggaactcgatcgcgagctgagtacgctttgcgagaaagcctgccaggaagccaacggcgcgccgtaa

SEQ ID NO: 29333 - protein, 239 aa, Ralstonia eutropha JMP134
MVRRTKEEALETRHRILDAAETVFHARGVARPSLADIAEAAGVTRGAIYWHFKNKSDVFAAMCDRVNLPVEALCDPERIARQEDPLGGIRDICAFVMRQTVVNPRWRRVFEIIFHKCEMVQDNGAIFERQRQSHQEGMVKIREHLRFAVERGQLPADLDLDLAVNAFHAAIGGVLAHWLFSPQDFDLDANAERLSDAFIDTLRFSPALRHGYVPRPMAELDRELSTLCEKACQEANGAP

SEQ ID NO: 29334 - DNA, 633 bp, Pseudomonas fluorescens PfO-1
  CDS (1)..(633): transl_table=11
atggttcgtcgtaccaaagaggaagctcaggaaacgcgcagccagattctcgaagcggccgagaaagccttctatgagcggggcgtggcccgcacgaccctgtcggacatcgctaccttggccggggtgacgcgcggtgcgatctactggcacttcagcaacaaggccgatctgctgcaggccatgctcgataccctgcatgagccgctggacgaactggccaaggccagcgaaagcgaggacgaacccgatccgctgggttgcatgcgcaaattgctgattcatttgtttcatcaagttgcgctggatccgaagacccggcgtatcaacgaaattctgtttcataagtgcgagttcaccgatgaaatgtgcgacctgcgccagcagcgccggaccgccagcctcgattgcaatgtgcggatcgcgctgacactgagtaatgcgatcaatcgtgggcagttgccggcagacctcgacactgcccgggcagccatcagcattcacgcctatatcgacggcctcctttatggatggctattggcgccggacagcttcgagctgtacgccgaggccgaacgctgggtcgataccgggctggacatgctgcgcctgagccccagcctgcgcaaatga

SEQ ID NO: 29335 - protein, 210 aa, Pseudomonas fluorescens PfO-1
MVRRTKEEAQETRSQILEAAEKAFYERGVARTTLSDIATLAGVTRGAIYWHFSNKADLLQAMLDTLHEPLDELAKASESEDEPDPLGCMRKLLIHLFHQVALDPKTRRINEILFHKCEFTDEMCDLRQQRRTASLDCNVRIALTLSNAINRGQLPADLDTARAAISIHAYIDGLLYGWLLAPDSFELYAEAERWVDTGLDMLRLSPSLRK

SEQ ID NO: 29336 - DNA, 642 bp, Burkholderia sp. 383
  CDS (1)..(642): transl_table=11
atggtcagacgtaccaaggaggaggcgctcgagacgcgcaatcgcattctcgacgccgccgagcacgtgttcttcgagaagggcgtgtcgcacacgtcgctcgcggacatcgcccagcatgccggcgtgacgcgcggcgcgatctactggcatttcgcgaacaagagcgaactgttcgacgcgatgttcgaccgcgtgtttctgccgatcgacgagctcaagcggatgccgctcgacgcaccgggcggcaatccgctcgagaagatccggcagatcctgatctggtgcctgctcggcgtgcagcgcgacgcgcagttgcgccgcgtgttcagcatcctgttcatgaagtgcgagtacgtcgcagacctcgagccgctgctccagcgcaaccgcgcggggatgagcgaggcgctgcacgcgatcgatgccgatctcgcgggggccgtgcggctcaagctgctgcccgagcggctcgatacgtggcgcgcgacgctgatgctgcacacgctcgtcagtggtttcgtgcgcgacatgctgatgctgcccgacgagatcgacgccgagcagcatgcggaaaagctcgtcgacggctgcttcgacatgctgcgctacagtccggcgatgctgaaggacggcgactga

SEQ ID NO: 29337 - protein, 213 aa, Burkholderia sp. 383
MVRRTKEEALETRNRILDAAEHVFFEKGVSHTSLADIAQHAGVTRGAIYWHFANKSELFDAMFDRVFLPIDELKRMPLDAPGGNPLEKIRQILIWCLLGVQRDAQLRRVFSILFMKCEYVADLEPLLQRNRAGMSEALHAIDADLAGAVRLKLLPERLDTWRATLMLHTLVSGFVRDMLMLPDEIDAEQHAEKLVDGCFDMLRYSPAMLKDGD

SEQ ID NO: 29338 - DNA, 708 bp, Burkholderia sp. 383
  CDS (1)..(708): transl_table=11
atgcgtgccccgacacccggggcacgcaatcgcatgcccttaccgggccgctgcgatgtgacacgcgagccatcccgacccggatggacgttcggaaacgttatggtgaaacgaacccgtgaacaggcacaggcgacacgggccatcatcgtcgagtcggcacagggcgtgttcttcgatcatggcttcgcgcatgcgtcgcttgaggaaatcgcccgccgggccggcgtcacgcgcggggccgtgtactggcacttcgagagcaagctcgaggtgctcgatgccatcttcgccgatgcggcgatcccgctggaccctttcctgattgcgtcgcgacacgatgccgagcatgagctcgacgcgctgatcgatgcactcggtgcgtgctggcggatcgcgacacgctcgaaattgtcccgccggctgtacacgctgtcgtacacacgatgtgaaaacgcgaaggaaacggcggctttctgcgaacgggtttgccaggctgcgtacgcggcggaacagcgcatcgatgcctggttgcgtcgtgcgatatcggccgggcagctggcgagcgagcatgaaccggcggtgatcgccagcgtggttcacgcgacgctgagcggattgctgcaccgggaattgacgcggccaggatgccgcaatccggacagggttgaagtgaccgaagtggtccgcaccctgattcaaggatga

SEQ ID NO: 29339 - protein, 235 aa, Burkholderia sp. 383
MRAPTPGARNRMPLPGRCDVTREPSRPGWTFGNVMVKRTREQAQATRAIIVESAQGVFFDHGFAHASLEEIARRAGVTRGAVYWHFESKLEVLDAIFADAAIPLDPFLIASRHDAEHELDALIDALGACWRIATRSKLSRRLYTLSYTRCENAKETAAFCERVCQAAYAAEQRIDAWLRRAISAGQLASEHEPAVIASVVHATLSGLLHRELTRPGCRNPDRVEVTEVVRTLIQG

SEQ ID NO: 29340 - DNA, 636 bp, Burkholderia thailandensis E264
  CDS (1)..(636): transl_table=11
atggccagacgcacgaaggaggaagcgctcgcgacgcgcgaccgcatcctcgacgccgccgagcacgtcttcttcgagaaaggcgtgtcgcacacgtcgctcgccgacatcgcccagcacgcgggcgtcacgcgcggcgcgatctattggcatttcgcgagcaagagcgaactcttcgacgcgatgttcgaccgcgtgctgctgccgatcgacgagctgaaggccggcacgggcgagccgcacgcggatccgctcggccgggtccgcgagatcctgatctggtgcctgctcggcgcggcgcgcgatccgcagttgcggcgcgtgttcagcatcctgttcatgaagtgcgagtacgtcgcggacatggggccgctcctgcagcgcaaccgcgaaggcatgcgcgacgcgctgcgcaacatcgaagcggatctcgcccagggcgtcgcgaacggccagttgccggccgatctcgacacgtggcgcgcgacgctgatgctgcatacgctcgtgagcggcttcgtgcgcgacatgctgatgctgccgggcgagatcgatgcggagcggcatgcggaaaagctcgtcgacggctgcttcgacatgctgcgcacgagccccgcgatgcacaaggacggctga

SEQ ID NO: 29341 - protein, 211 aa, Burkholderia thailandensis E264
MARRTKEEALATRDRILDAAEHVFFEKGVSHTSLADIAQHAGVTRGAIYWHFASKSELFDAMFDRVLLPIDELKAGTGEPHADPLGRVREILIWCLLGAARDPQLRRVFSILFMKCEYVADMGPLLQRNREGMRDALRNIEADLAQGVANGQLPADLDTWRATLMLHTLVSGFVRDMLMLPGEIDAERHAEKLVDGCFDMLRTSPAMHKDG

SEQ ID NO: 29342 - DNA, 660 bp, Burkholderia xenovorans LB400
  CDS (1)..(660): transl_table=11
atggtccgtagaaccaaagaagaggcgctggagacgcgcaatagcattctcgacgcggccgagcgcgttttcttcgagaagggcgtttcgcgcacgtcgcttgccgacatcgcgcaggccgccggcgtcacgcgcggcgcgatctactggcacttcgcgcataaaagcgacctgttcactgaaatgttcgaccgcgtgctgctgccgctggacgaactcaaagccgcctcgcaagaccccaacgagcccgatccgctcggccggctaatggaaatctgcacggtctgcctgcgcgacaccgcgaacgatccacgccgccggcgcgtgttcgacatcctgtttctgaaatgcgaactggtcgaggaaatgggcccggtgatggtccgctatcagaccaacatgcgcgaaggactcgcgaaaatcgaaggcggcctgcgcaacgccatctccaaagggcaaatgcccgcggatctggacacgaagctggccgcggctatggtgcacgcgtttgtcagcggttcgctgcgcgacatgctgttcctgcccgacgccacggatttcggcgctcacgccgtgcagatggtggaaggcatgttcgacgcgctgaagctgagcccggcgctgcgcaacgggcatgcacggcgaacagccggtggctag

SEQ ID NO: 29343 - protein, 219 aa, Burkholderia xenovorans LB400
MVRRTKEEALETRNSILDAAERVFFEKGVSRTSLADIAQAAGVTRGAIYWHFAHKSDLFTEMFDRVLLPLDELKAASQDPNEPDPLGRLMEICTVCLRDTANDPRRRRVFDILFLKCELVEEMGPVMVRYQTNMREGLAKIEGGLRNAISKGQMPADLDTKLAAAMVHAFVSGSLRDMLFLPDATDFGAHAVQMVEGMFDALKLSPALRNGHARRTAGG

SEQ ID NO: 29344 - DNA, 729 bp, Ralstonia metallidurans CH34
  CDS (1)..(729): transl_table=11
atggtcagacgtaccaaggaagaagcgctagagacgcgcaaccgcattctggatgcggcagaggccgtgttccacgcccgtggcgtggcacgtccttcgctggcggacattgccgaggcggcaggcgtcacgcgcggcgcgatctattggcatttcaagaacaagagcgacgtgttcgccgcgatgtgcgatcgcgtcaacttgcctgtcgaggcgctctgctcgcccgagcgcattgcctcgcaggaagacccgctcggcagcatccgcgacatctgcgcattcgtgttccgccagaccgtcaacaatccccaatggcgccgcgtgttcgaaatcatcttccacaagtgcgagatggtcgaggacaacggcgccatcttcgtgcgccagcgccagtcgcaccaggaaggcacggtgaagatgcgcgagcatctgcggctagcgatggagcgcggccagttgcccgccgacctcgacctgccactggccgtcaatgcctttcacgccgcgatcggtggcgtgctggcgcactggctgttctcccccgaggatttcgaactggcccgcgaggccgaacgcctggcggacgcattcatcgacacattgcgcctctcgccggctctgcgcgtgggctacgtgccacgccccatggcgccgctcgatgcggaaatggcggccctgtgcgaacggcagccccagcagccccagcaggccctggcgccgacctga

SEQ ID NO: 29345 - protein, 242 aa, Ralstonia metallidurans CH34
MVRRTKEEALETRNRILDAAEAVFHARGVARPSLADIAEAAGVTRGAIYWHFKNKSDVFAAMCDRVNLPVEALCSPERIASQEDPLGSIRDICAFVFRQTVNNPQWRRVFEIIFHKCEMVEDNGAIFVRQRQSHQEGTVKMREHLRLAMERGQLPADLDLPLAVNAFHAAIGGVLAHWLFSPEDFELAREAERLADAFIDTLRLSPALRVGYVPRPMAPLDAEMAALCERQPQQPQQALAPT

SEQ ID NO: 29346 - DNA, 687 bp, Alkalilimnicola ehrlichei MLHE-1
  CDS (1)..(687): transl_table=11
atggatctacccgagccaagcatgcgcaaaaccaaggcggaagccgaagaaacccgtcaccagttgctggatgccgccgaagccgtcttcctggagcgcggcgtggccgacgccagcctcgcggccatcgcggaggcggcgggcatgacccgcggtgccatctattggcactttcgcgataagacacacctctacgatgagatggtgcggcgcgtgcgcctgccgttggtgaccatgcgggaggcctatgatggcgaactggggggtgatccggtcgcggtgctggagaagctctgcctgacggccatccgccacctgctcagggatgaacgtacccgccgggtctacaccatcgtcctgcaccggcgggcgcgccgccccggcgaaccggccacggcgggcgaggccgagaaccgcgagcaggccgaggcggcgttccgcagttgctttgaggccgcacagcgccagggtcggctgcatccggcgctcagccccgataccgccttggatgcgctgatcgcctttttcaccggattattgttcatctggctgcaggagccggagcgcctggatctggagggcgaggccgagtgcttgttccgggtgtttctccggggcctcgtgcggcccgcttcaagcgccgacccgcggggcgaccgggccggtggtgcggacgaggaacggtga

SEQ ID NO: 29347 - protein, 228 aa, Alkalilimnicola ehrlichei MLHE-1
MDLPEPSMRKTKAEAEETRHQLLDAAEAVFLERGVADASLAAIAEAAGMTRGAIYWHFRDKTHLYDEMVRRVRLPLVTMREAYDGELGGDPVAVLEKLCLTAIRHLLRDERTRRVYTIVLHRRARRPGEPATAGEAENREQAEAAFRSCFEAAQRQGRLHPALSPDTALDALIAFFTGLLFIWLQEPERLDLEGEAECLFRVFLRGLVRPASSADPRGDRAGGADEER

SEQ ID NO: 29348 - DNA, 639 bp, Pseudomonas aeruginosa UCBPP-PA14
  CDS (1)..(639): transl_table=11
atgcgacgcacaaaggaagattctgaaaaaacccgtacggccatcctcctggccgccgaggaactgttcctggaaaaaggcgtgtcccataccagcctggaacagatcgccagggccgccggggtgacccgtggcgccgtctactggcacttccagaacaaggctcacctgttcaacgagatgctcaaccaggtacgcctgccgccggagcaactcaccgagcgcctgtccggctgcgatggcagcgacccgctgcgctcgctctacgacctctgcctggaggccgtgcaatcgttgctgactcaggagaagaagcgccgcatcctgaccatcctgatgcaacgttgcgaattcaccgaggaactgcgcgaggcgcaggaacgcaacaacgccttcgtgcagatgttcatcgaactctgcgagcagttgttcgcccgcgacgaatgccgcgtgcggctgcatccgggcatgaccccaaggatcgcctcgcgcgccttgcacgcgctgatcctgggcctgttcaacgactggttgcgcgacccgcgcctgttcgatccggatacggacgcggaacacctgctggagccgatgttccgtggcctggtgcgcgactggggtcaggccagctcggcgccgtag

SEQ ID NO: 29349 - protein, 212 aa, Pseudomonas aeruginosa UCBPP-PA14
MRRTKEDSEKTRTAILLAAEELFLEKGVSHTSLEQIARAAGVTRGAVYWHFQNKAHLFNEMLNQVRLPPEQLTERLSGCDGSDPLRSLYDLCLEAVQSLLTQEKKRRILTILMQRCEFTEELREAQERNNAFVQMFIELCEQLFARDECRVRLHPGMTPRIASRALHALILGLFNDWLRDPRLFDPDTDAEHLLEPMFRGLVRDWGQASSAP

SEQ ID NO: 29350 - DNA, 612 bp, Acidovorax sp. JS42
  CDS (1)..(612): transl_table=11
atggcacggcgtaccaaggcagatgcggctgccacgcgcaatggcctgctggatgcggctgagcatgttttttacgagaagggcgtttctcgcgcgtccttggccgatattgccaccgtggccggcaccacccgtggcgccatttattggcacttcaaggacaaggcagatttgttcaatgccatgctggatcgcgtcacgcatccgctgatgcaggccattgaagacacccaaggcatggcgcacctggcgcgtttgcgcggcctggtgcagggcgtgcaaggcgccgtcgcgcacgatgagcgcatgcgccgtgttttcgagatcgcgctgtaccgggttgaatacgtcgaagactttgaggccgtgaaacgccatcatgtcgcagggtgcgcggctttccaggcgcagattgcccgggagctgggcctggccgccgcggcgcaaggcatcgacctgcccctatcggccccggttgcggccatgggcgtgcaggcgctgtttgatggcttgctgcagtcgtggctgctcaacgatgccaatttcgacctggaagccgccagccgccagaccatcgacgcatatctgcgcggtctgggcttttgcctgtga

SEQ ID NO: 29351 - protein, 203 aa, Acidovorax sp. JS42
MARRTKADAAATRNGLLDAAEHVFYEKGVSRASLADIATVAGTTRGAIYWHFKDKADLFNAMLDRVTHPLMQAIEDTQGMAHLARLRGLVQGVQGAVAHDERMRRVFEIALYRVEYVEDFEAVKRHHVAGCAAFQAQIARELGLAAAAQGIDLPLSAPVAAMGVQALFDGLLQSWLLNDANFDLEAASRQTIDAYLRGLGFCL

SEQ ID NO: 29352 - DNA, 648 bp, Escherichia coli B
  CDS (1)..(648): transl_table=11
atggcacgaaaaaccaaacaagaagcgcaagaaacgcgccaacacatcctcgatgtggctctacgtcttttctcacagcagggggtatcatccacctcgctgggcgagattgcaaaagcagctggcgttacgcgcggtgcaatctactggcattttaaagacaagtcggatttgttcagtgagatctgggaactgtcagaatccaatattggtgaactagagcttgagtatcaggcaaaattccctggcgatccactctcagtattaagagagatattaattcatgttcttgaatccacggtgacagaagaacggcgtcgattattgatggagattatattccacaaatgcgaatttgtcggagaaatggctgttgtgcaacaggcacaacgtaatctctgtctggaaagttatgaccgtatagaacaaacgttaaaacattgtattgaagtgaaaatgttgcctgcggatttaatgacacgtcgcgcagcaattattatgcgcggctatatttccggcctgatggaaaactggctctttgccccgcaatcttttgatcttaaaaaagaagcccgcgattacgttgccatcttactggagatgtatctcctgtgccccacgcttcgtaatcctgccactaacgaataa

SEQ ID NO: 29353 - protein, 215 aa, Escherichia coli B
MARKTKQEAQETRQHILDVALRLFSQQGVSSTSLGEIAKAAGVTRGAIYWHFKDKSDLFSEIWELSESNIGELELEYQAKFPGDPLSVLREILIHVLESTVTEERRRLLMEIIFHKCEFVGEMAVVQQAQRNLCLESYDRIEQTLKHCIEVKMLPADLMTRRAAIIMRGYISGLMENWLFAPQSFDLKKEARDYVAILLEMYLLCPTLRNPATNE

SEQ ID NO: 29354 - DNA, 654 bp, Enterobacter cloacae
  CDS (1)..(654): transl_table=11
atggcacgaaaaaccaaacaacaagcgctggaaacccgacaacacattctggatgtggcaatgcgtttgttctcacagcagggtgtttcggcaacctcgctggcacagattgctcaggccgcgggcgtcacgcggggagcgatttactggcatttcaaagacaagtccgatctgtttggtgaaatctgggagctttcagagtccagcattagcgatcttgagagtgagtatcgggcaaaattccctcacgatccactctcagtgttaagagaaattctagtatatatccttgaagcgacggttgttgaagagcgtcgtcgtctgatgatggaaatcatcttccataaatgtgagttcgttggtgaaatggcggtggttcagcaggcgcagcgcgacctgtgtctggaaagctacgatcgcatcgaacaggtcctcacggagtgcatgcaggccaaaatgcttcctgccacattactcacccgccgggcggcgatcctgatgcgcagctatatttccggcctgatggaaaactggctttttgctccggagtcgttcgatctcagatcagaggcgcgcagctacgtcgaaatttttcttgagatgtgccagctctgtccgacccttcaacgtaaacttagcccgcgctctgcctga

SEQ ID NO: 29355 - protein, 217 aa, Enterobacter cloacae
MARKTKQQALETRQHILDVAMRLFSQQGVSATSLAQIAQAAGVTRGAIYWHFKDKSDLFGEIWELSESSISDLESEYRAKFPHDPLSVLREILVYILEATVVEERRRLMMEIIFHKCEFVGEMAVVQQAQRDLCLESYDRIEQVLTECMQAKMLPATLLTRRAAILMRSYISGLMENWLFAPESFDLRSEARSYVEIFLEMCQLCPTLQRKLSPRSA

SEQ ID NO: 29356 - DNA, 624 bp, Agrobacterium tumefaciens
  CDS (1)..(624): transl_table=11
gtgaggagaaccaaggagcaggcggcggaaaccggtcgccagatcttgcaggcggcggagaccctgtttctggacaagggctacgacaatgtgagcctggaagaaatcgctgctctttccggcgtgacccgcggggcgatccactggcacttcaagaacaagcacgggcttctgctcgcgctcagaaacgaggcacaggaacctttccggcaatttgccgacgaactctccgaaggccgcggttccgcctccatcgaaaagctcggcgacatcataaccgacaccttcaagctgctggaacaggatccccgtcagcgcggtctgctacgtgtcatgatgaggcttgatatcggccttgcggagaaagaagagggcggggaaaataccttccccgaagagatgcacgcattgttcgtgcgcatattcagggcagtcgagcgaagcccgggaatgatgaagccatggacaccggaaaaggctgcctccatggtttatgcggccatgggcgggctcatcaccgaatgggcgttgcgaaagaccgaattcacgctttcaaatgacggcgggctgttcatccgaaccttgctggccgggcttcagcgaagacccacggacgagaactga

SEQ ID NO: 29357 - protein, 207 aa, Agrobacterium tumefaciens
MRRTKEQAAETGRQILQAAETLFLDKGYDNVSLEEIAALSGVTRGAIHWHFKNKHGLLLALRNEAQEPFRQFADELSEGRGSASIEKLGDIITDTFKLLEQDPRQRGLLRVMMRLDIGLAEKEEGGENTFPEEMHALFVRIFRAVERSPGMMKPWTPEKAASMVYAAMGGLITEWALRKTEFTLSNDGGLFIRTLLAGLQRRPTDEN

SEQ ID NO: 29358 - DNA, 648 bp, Morganella morganii
  CDS (1)..(648): transl_table=11
atggcacgaaaaactaaacagcaggccggagaaacccgccggcagattattgaggccgcattaaccgctttcagtgagcggggcgtatctgcgacgtcattagtggatattgctaagcaagcaggtgtgacccgtggtgcgatctattggcacttcaaaaataaagttgatctgtttactgaagtctgttcgataaccgatacaaaaattggcgttattgaacaagagtatcgggcaaaatacccggataatccacttttagtgtttaagaaaatattaatttacattctgacctcagtggtatccgatcccaaaatgcgggctattctgagtatttcatttcataaatgtgaatttaccggtgaaatgagcgaattaattaccatcagacaaaatttatatgctgcggaatactcaagaattgaatctttcctgattgaaagtgtgacactgggactgctgccgtcaaccctcgacctgcgccgtgcggcaatcatgctgcgcggaatgataaccggcctgttagaaaactggctcttttccagtgagagttttaatattgacggacaggcggaatatttggttgacggttatctggatatgttaatgttcagtaaaaatatgcagctgacgccggcagacgcctga

SEQ ID NO: 29359 - protein, 215 aa, Morganella morganii
MARKTKQQAGETRRQIIEAALTAFSERGVSATSLVDIAKQAGVTRGAIYWHFKNKVDLFTEVCSITDTKIGVIEQEYRAKYPDNPLLVFKKILIYILTSVVSDPKMRAILSISFHKCEFTGEMSELITIRQNLYAAEYSRIESFLIESVTLGLLPSTLDLRRAAIMLRGMITGLLENWLFSSESFNIDGQAEYLVDGYLDMLMFSKNMQLTPADA

SEQ ID NO: 29360 - DNA, 660 bp, Xanthomonas maltophilia
  CDS (1)..(660): transl_table=11
atggcccgtaagaccaaagaggacacccaggcaacccgggaaggcatccttgacgccgccgaagcctgcttccatgaacacggcgtggcccgtaccacgctggagatgatcggcgcccgcgccggctatacccgtggcgcggtgtactggcacttcaagaacaagagcgaggtgctggccgcgatcgtcgaacgggtgcacctgcccttcatgcaggaactggaacgcacctccaccgaccagcgcgacacgccggtgcacgacctgcgcgcggtgatgatccactcgttcatcgagctgtccgaggacgagcgcctgcgcaagaccatggagatcatgctgcgcagcgatgcctcggccgacaccaaggtgctgaccgaaatgcagcaggccggattccgcgatgccctggaccggatggagcgtgcgcttcgccgggcccgggacctgggccagctgcgcgaaggagcggacccgaagatcgccgcgcgcatgctgcacgccaccgtcctgggcgtgctgcacggcgcgatggtcgaaccggaactgatggacctcaagcgcgacggcatgctcgcgctggacatgactctggccgcctacgtgaaggatggcgtgttcgtgcccggaacggtgcccgagccgttgccggacgcgtga

SEQ ID NO: 29361 - protein, 219 aa, Xanthomonas maltophilia
MARKTKEDTQATREGILDAAEACFHEHGVARTTLEMIGARAGYTRGAVYWHFKNKSEVLAAIVERVHLPFMQELERTSTDQRDTPVHDLRAVMIHSFIELSEDERLRKTMEIMLRSDASADTKVLTEMQQAGFRDALDRMERALRRARDLGQLREGADPKIAARMLHATVLGVLHGAMVEPELMDLKRDGMLALDMTLAAYVKDGVFVPGTVPEPLPDA

SEQ ID NO: 29362 - DNA, 660 bp, Xanthomonas maltophilia
  CDS (1)..(660): transl_table=11
atggcccgcaagaccaaagaggacacccaggcaacccgggaaggcatccttgacgccgccgaagcctgtttccatgaacacggcgtggcccgtaccacgctggagatgatcggcgcccgcgccggctatacccgtggcgcggtgtactggcacttcaagaacaagagcgaggtgctggccgcgatcgttgaacgggtgcacctgcccttcatgcaggaactggaacgcacctccaccgagcagcgcgacacgccggtacacgacctgcgcgcggtgatgatccactcgttcatcgagctgtccgaggacgagcgcctgcgcaagaccatggagatcatgctgcgcagcgatgcctcggccgacaccaaggtgctgaccgaaatgcagcaggccggattccgcgatgccctggaccggatggagcgtgcgcttcgccgggcccgggacctgggccagctgcgcgaaggagcggacccgaagatcgccgcgcgcatgctgcacgccaccgtcctgggcgtgctgcacggcgcgatggtcgaaccggaactgatggacctcaagcgcgacggcatgctcgcgctggacatgactctggccgcctacgtgaaggatggcgtgttcgtgcccggaacggtgcccgagccgttgccggacgcgtga

SEQ ID NO: 29363 - protein, 219 aa, Xanthomonas maltophilia
MARKTKEDTQATREGILDAAEACFHEHGVARTTLEMIGARAGYTRGAVYWHFKNKSEVLAAIVERVHLPFMQELERTSTEQRDTPVHDLRAVMIHSFIELSEDERLRKTMEIMLRSDASADTKVLTEMQQAGFRDALDRMERALRRARDLGQLREGADPKIAARMLHATVLGVLHGAMVEPELMDLKRDGMLALDMTLAAYVKDGVFVPGTVPEPLPDA

SEQ ID NO: 29364 - DNA, 660 bp, Xanthomonas maltophilia
  CDS (1)..(660): transl_table=11
atggcccgcaagaccaaagaggacacccaggcaacccgggaaggcatccttgacgccgccgaagcctgtttccatgaacacggcgtggcccgtaccacgctggagatgatcggcgcccgcgccggctacacccgtggcgcggtgtactggcacttcaagaacaagagcgaggtgctggccgcgatcgtcgagcgcgtgcacctgcccttcatgcaggaactggaacgcacctccaccgaccagcgcgacaccccggtgcacgacctgcgcgcggtaatggtccactcgttcatcgagctgtccgaggacgagcgcctgcgcaagaccatggagatcatgctgcgcagcgatgcgtcggcggacaccagggtgctgaccgaaatgcagcaggccggattccgcgatgcgctggaccggatggagcgtgccctgcgccgcgcccgcgatctgggccagctgcgcgaaggcgccgacccgaaaatcgccgcgcgcatgctgcacgccaccgtgctgggcgtgctgcacggcgcgatggtcgaaccggaactgatggacctcaagcgcgatggcatgctcgcgctggacatgaccctggccgcctacgtgaaggatggtgtgttcgttcccggcaccgtccccgagccgctgcccgaggcgtga

SEQ ID NO: 29365 - protein, 219 aa, Xanthomonas maltophilia
MARKTKEDTQATREGILDAAEACFHEHGVARTTLEMIGARAGYTRGAVYWHFKNKSEVLAAIVERVHLPFMQELERTSTDQRDTPVHDLRAVMVHSFIELSEDERLRKTMEIMLRSDASADTRVLTEMQQAGFRDALDRMERALRRARDLGQLREGADPKIAARMLHATVLGVLHGAMVEPELMDLKRDGMLALDMTLAAYVKDGVFVPGTVPEPLPEA

SEQ ID NO: 29366 - DNA, 660 bp, Xanthomonas maltophilia
  CDS (1)..(660): transl_table=11
atggcccgcaagaccaaagaggacacccaggcaacccgggaaggcatccttgacgccgccgaagcctgcttccatgaacacggcgtggcccgtaccacgctggagatgatcggtgcccgcgccggctacacccgtggcgcggtctactggcacttcaagaacaagagcgaggtgctggccgcgatcgtcgagcgcgtgcacctgcccttcatgcaggaactggagcgcacctccaccgaccagcgcgacaccccggtgcacgacctgcgcgcggtgatgatccactcgttcatcgagctgtccgaggacgagcgcctgcgcaagaccatggagatcatgctgcgcagcgacgcctcggcggacaccaaggtgctgaccgaaatgcagcaggccggattccgcgatgcgctggaccggatggagcgcgccctgcgccgcgcccgcgatctgggccagctgcgcgaaggcgccgaccccaagatcgccgcgcgcatgctgcacgctaccgtgctgggcgtactgcatggcgcgatggtcgaaccggaactgatggacctcaagcgcgatggcatgctcgcgctggacatgaccctggccgcctacgtgaaggatggcgtgttcgttcccggaacggtgcccgagccgttgccggaagcatga

SEQ ID NO: 29367 - protein, 219 aa, Xanthomonas maltophilia
MARKTKEDTQATREGILDAAEACFHEHGVARTTLEMIGARAGYTRGAVYWHFKNKSEVLAAIVERVHLPFMQELERTSTDQRDTPVHDLRAVMIHSFIELSEDERLRKTMEIMLRSDASADTKVLTEMQQAGFRDALDRMERALRRARDLGQLREGADPKIAARMLHATVLGVLHGAMVEPELMDLKRDGMLALDMTLAAYVKDGVFVPGTVPEPLPEA

SEQ ID NO: 29368 - DNA, 660 bp, Xanthomonas maltophilia
  CDS (1)..(660): transl_table=11
atggcccgtaagaccaaagaggacacccaggcaacccgggaaggcatccttgacgccgccgaagcctgcttccatgaacacggcgtggcccgtaccacgctggagatgatcggcgcccgcgccggctatacccgtggcgcggtgtactggcacttcaagaacaagagcgaggtgctggccgcgatcgtcgaacgggtgcacctgcccttcatgcaggaactggaacgcacctccaccgaccagcgcgacacgccggtacacgacctgcgcgcggtgatgatccactcgttcatcgagctgtccgaggacgagcgcctgcgcaagaccatggagatcatgctgcgcagcgatgcctccgccgacaccaaggtgctgaccgaaatgcagcaggccggattccgcgatgcgctggaccggatggagcgtgcgcttcgccgggcccaggacctgggccagctgcgcgaaggagcggacccgaagatcgccgcgcgcatgctgcacgccaccgtactgggcgtgctgcacggcgcgatggtcgaaccggaactgatggacctcaagcgcgacggcatgctcgcgctggacatgactctggccgcctacgtgaaggatggcgtgttcgtgcccggaacggtgcccgagccgttgccggacgcgtga

SEQ ID NO: 29369 - protein, 219 aa, Xanthomonas maltophilia
MARKTKEDTQATREGILDAAEACFHEHGVARTTLEMIGARAGYTRGAVYWHFKNKSEVLAAIVERVHLPFMQELERTSTDQRDTPVHDLRAVMIHSFIELSEDERLRKTMEIMLRSDASADTKVLTEMQQAGFRDALDRMERALRRAQDLGQLREGADPKIAARMLHATVLGVLHGAMVEPELMDLKRDGMLALDMTLAAYVKDGVFVPGTVPEPLPDA

SEQ ID NO: 29370 - DNA, 660 bp, Xanthomonas maltophilia
  CDS (1)..(660): transl_table=11
atggcccgcaagaccaaagaggacacccaggcaacccgggaaggcatccttgacgccgccgaagcctgcttccatgaacacggcgtggcccgtaccacgctggagatgatcggtgcccgcgccggctacacccgtggcgcggtctactggcacttcaagaacaagagcgaggtgctggccgcgatcgtcgagcgcgtgcacctgcccttcatgcaggaactggagcgcacctccaccgaccagcgcgacaccccggtgcacgacctgcgcgcggtgatgatccactcgttcatcgagctgtccgaggacgagcgactgcgcaagaccatggagatcatgctgcgcagcgatgcctcggccgacaccaaggtgctgaccgaactgcagcaggccggtttccgcgatggactggagcggatggaacgtgccctgcgccgggcaaaggacctgggccagctgcgcgagggtgcagacccgaagatcgccgcacgcatgctgcacgccaccgtgctgggcgtactgcacggtgcgatggtcgaaccggaactgatggacctcaagcgcgatggcatgctcgcactggacatgaccctggccgcctacgtaaaggacggcgtgttcgttcccggcaccgtgccggagccgctgcccgaggcatga

SEQ ID NO: 29371 - protein, 219 aa, Xanthomonas maltophilia
MARKTKEDTQATREGILDAAEACFHEHGVARTTLEMIGARAGYTRGAVYWHFKNKSEVLAAIVERVHLPFMQELERTSTDQRDTPVHDLRAVMIHSFIELSEDERLRKTMEIMLRSDASADTKVLTELQQAGFRDGLERMERALRRAKDLGQLREGADPKIAARMLHATVLGVLHGAMVEPELMDLKRDGMLALDMTLAAYVKDGVFVPGTVPEPLPEA

SEQ ID NO: 29372 - DNA, 660 bp, Xanthomonas maltophilia
  CDS (1)..(660): transl_table=11
atggcccgcaagaccaaagaggacacccaggcaacccgggaaggcatccttgacgccgccgaagcctgcttccatgaacacggcgtggcccgtaccacgctggagatgatcggcgcccgcgccggctatacccgtggcgcggtctactggcacttcaagaacaagagcgaggtgctggccgcgatcgtcgaacgggtgcacctgcccttcatgcaggaactggagcgcacctcgaccgaccagcgcgacacccccgtgcacgacctgcgcgcggtgatgatccactccttcatcgagctgtccgaagacgagcgcctgcgcaagaccatggagatcatgctgcgcagcgatgcctcggccgacaccagggtgctgaccgaaatgcagcaggccggattccgcgatgcgctggaccggatggagcgtgccctgcgccgcgcccgcgatctgggccagctgcgcgaaggcgccgaccccaagatcgccgcgcgcatgctgcatgccaccgtgctgggcgtgctgcacggggcgatggtcgaaccggacctgatggacctcaagcgcgacggcatgctcgcactggacatgaccctggccgcctacgtgaaggacggcgtgttcgcgccgggcactgtgcccgagccgctgcccgaagcgtga

SEQ ID NO: 29373 - protein, 219 aa, Xanthomonas maltophilia
MARKTKEDTQATREGILDAAEACFHEHGVARTTLEMIGARAGYTRGAVYWHFKNKSEVLAAIVERVHLPFMQELERTSTDQRDTPVHDLRAVMIHSFIELSEDERLRKTMEIMLRSDASADTRVLTEMQQAGFRDALDRMERALRRARDLGQLREGADPKIAARMLHATVLGVLHGAMVEPDLMDLKRDGMLALDMTLAAYVKDGVFAPGTVPEPLPEA

SEQ ID NO: 29374 - DNA, 660 bp, Xanthomonas maltophilia
  CDS (1)..(660): transl_table=11
  misc_feature (615)..(615): y is t or c
atggcccgcaagaccaaagaggacacccaggcaacccgggaaggcatccttgacgccgccgaagcctgcttccatgaacacggcgtggcccgtaccacgctggagatgatcggtgcccgcgccggctatacccgcggtgcggtctactggcacttcaagaacaagagcgaggtgctggccgcgatcgtcgagcgcgtgcatctgcctttcatgcaggagctggagcgcacctcgaccgaccagcgcgacacgccggtgcacgacctgcgcgcggtgatgatccactcgttcatcgaaatgtccgaggacgagcgcctgcgcaaaacgatggagatcatgctgcgcagcgatgcgtcggctgacaccaaggtgctgaccgaaatgcagcaggccggtttccgcgatgcgttggaccggatggagcgcgccctgcgccgcgcccgcgatctgggccagctgcgcgagggtgcagacccgaagatcgccgcacgcatgctgcacgccaccgtgctgggcgtactgcacggtgcgatggtcgaaccggaactgatggacctcaagcgcgatggcatgctcgcactggacatgaccctggccgcctacgtgaaggacggygtgttcgttcccggcaccgtgcccgagccgctgcccgaggcatga

SEQ ID NO: 29375 - protein, 219 aa, Xanthomonas maltophilia
MARKTKEDTQATREGILDAAEACFHEHGVARTTLEMIGARAGYTRGAVYWHFKNKSEVLAAIVERVHLPFMQELERTSTDQRDTPVHDLRAVMIHSFIEMSEDERLRKTMEIMLRSDASADTKVLTEMQQAGFRDALDRMERALRRARDLGQLREGADPKIAARMLHATVLGVLHGAMVEPELMDLKRDGMLALDMTLAAYVKDGVFVPGTVPEPLPEA

SEQ ID NO: 29376 - DNA, 660 bp, Xanthomonas maltophilia
  CDS (1)..(660): transl_table=11
atggcccgcaagaccaaagaggacacccaggcaacccgggaaggcatccttgacgccgccgaagcctgcttccatgaacacggcgtggcccgtaccacgctggagatgatcggcgcccgcgccggctatacccgtggcgcggtgtactggcacttcaagaacaagagcgaggtgctggccgcgatcgtcgagcgcgtgcacctgcccttcatgcaggaactggagcgtacctccaccgaccagcgcgacaccccggtgcacgacctgcgcgcggtgatgatccactcgttcatcgagctgtccgaggacgagcgcctgcgcaagaccatggagatcatgctccgcagcgacgcctcggccgataccaaggtgctgaccgagatgcagcaaaccggcttccgcgatgcgctggaccggatggagcgcgccctgcgccgcgcccgcgatctgggccagctgcgcgaaggcgccgaccccaagatcgccgcgcgcatgctgcacgccaccgtgctgggcgtgctgcacggcgcgatggtcgaaccggaactgatggacctcaagcgcgatggcatgctcgcgctggacatgaccctggccgcctacgtgaaagaaggcgtgttcgtgcccggaacggtgcccgagccgctgccggaagcatga

SEQ ID NO: 29377 - protein, 219 aa, Xanthomonas maltophilia
MARKTKEDTQATREGILDAAEACFHEHGVARTTLEMIGARAGYTRGAVYWHFKNKSEVLAAIVERVHLPFMQELERTSTDQRDTPVHDLRAVMIHSFIELSEDERLRKTMEIMLRSDASADTKVLTEMQQTGFRDALDRMERALRRARDLGQLREGADPKIAARMLHATVLGVLHGAMVEPELMDLKRDGMLALDMTLAAYVKEGVFVPGTVPEPLPEA

SEQ ID NO: 29378 - DNA, 633 bp, Pseudomonas fluorescens
  CDS (1)..(633): transl_table=11
atggtccgtcgtaccaaagaggaagctcaggaaacccgtagccagatactcgaagcggcagaaaaggccttttacgaacggggcgtagcacgcaccacgctggcggacatcgcgacgctggcgggcgtgacgcgcggggccatctactggcatttcagtaacaaggcggatctggtgcaggccatgctcgatacattgcatgagccgctggatgaaatggccaaggcgagtgaaagcgaagatgaactcgacccactgggttgcatgcgcaagctgctgattcatttgtttcatcaagttgccctggacccgaaaacccgacgcatcaatgagattttgtttcacaagtgcgaattcaccgatgaaatgtgcgatctgcgccagcagcgccgggaggtcagcctcgattgcaatgtgcgtatcggcctggccctgagtaatgcggtgaatcgggggcagttgccggacaacctcgacacggcccgcgcggccatcagtctgcatgcctacatcgatggcattttgtatcagtggctattggcgcccgacagctttcaactgcataccgaagccgagcgttgggtcgatgcagcgttggacatgctgcgcctgagccccagcctgcgcaaatga

SEQ ID NO: 29379 - protein, 210 aa, Pseudomonas fluorescens
MVRRTKEEAQETRSQILEAAEKAFYERGVARTTLADIATLAGVTRGAIYWHFSNKADLVQAMLDTLHEPLDEMAKASESEDELDPLGCMRKLLIHLFHQVALDPKTRRINEILFHKCEFTDEMCDLRQQRREVSLDCNVRIGLALSNAVNRGQLPDNLDTARAAISLHAYIDGILYQWLLAPDSFQLHTEAERWVDAALDMLRLSPSLRK

SEQ ID NO: 29380 - DNA, 654 bp, Salmonella enteritidis
  CDS (1)..(654): transl_table=11
atggcacgaaaaaccaaacaacaagcgctggagacacgacaacacatcctggatgtggccctgcgtttgttctcgcagcaaggcgtatcagcaacctcgctggcggagattgcgaacgctgctggcgtgacgcgcggcgcaatctattggcatttcaaaaataagtcggatttattcagtgagatctgggagctatcagaatccaatattggtgagcttgagattgagtatcaggcaaaattccccgacgatccactatctgtattaagagaaattttagttcatattcttgaagctactgtaacagaagaacgacgccgcttattgatggagattatattccataaatgtgagtttgtcggagaaatggttgtggttcaacaggcgcaacgtagcctttgtctggaaagttacgatcggattgaacaaacgttaaaacattgtattaatgctaaaatgctgcctgaaaatctgctgactcgtcgtgcggcgatactgatgcgcagctttatttcagggctcatggaaaactggttatttgctccgcaatcgtttgatttaaaaaaagaagctcgcgcctacgtcacgatcctgctggagatgtatcaattgtgtccgacgctgcgcgcgtcgacgttcaacggctccccctga

SEQ ID NO: 29381 - protein, 217 aa, Salmonella enteritidis
MARKTKQQALETRQHILDVALRLFSQQGVSATSLAEIANAAGVTRGAIYWHFKNKSDLFSEIWELSESNIGELEIEYQAKFPDDPLSVLREILVHILEATVTEERRRLLMEIIFHKCEFVGEMVVVQQAQRSLCLESYDRIEQTLKHCINAKMLPENLLTRRAAILMRSFISGLMENWLFAPQSFDLKKEARAYVTILLEMYQLCPTLRASTFNGSP

SEQ ID NO: 29382 - DNA, 639 bp, Erwinia amylovora
  CDS (1)..(639): transl_table=11
atggcacgaaataccaaacaacaagcgcaggaaacgcgcaatcacattatagatgcggctatcaagcgtttttctgaacatggcgttgctaatacgtcactggcggacattgccgcaggcgcaggcgtgacgcgaggtgcaatctactggcattttaaaaataaaaccgatttgctcaatgaaatctggactcagtccgaatctggtttgactgcactggaacttgagtatcaatcaaaatacccggaggatccactttccgtgatgcgtgcgatgcttctgtatgtgtttgaagcgactgccaccgacccaagaagacgtgcgcttatggaaatcatttaccataaatgtgagttcgtgggtgaaatgaccaccctgcaactgatgcagcaaaacctctatcttgaatgttatgaaaagatagaagaggtgctgaaagagtgtattgcagcaaagcaacttccggaaaacctggatacccgacgcgccgcggtggtgatgcgcggctatgtgagcggcatcatggaaaactggctatttatgccggaaagctttgatctggccgaagatgctgcgcaactggtggctaccttaattgatatgttgaactacagcgtaaccttgcgcaaaccggcctga

SEQ ID NO: 29383 - protein, 212 aa, Erwinia amylovora
MARNTKQQAQETRNHIIDAAIKRFSEHGVANTSLADIAAGAGVTRGAIYWHFKNKTDLLNEIWTQSESGLTALELEYQSKYPEDPLSVMRAMLLYVFEATATDPRRRALMEIIYHKCEFVGEMTTLQLMQQNLYLECYEKIEEVLKECIAAKQLPENLDTRRAAVVMRGYVSGIMENWLFMPESFDLAEDAAQLVATLIDMLNYSVTLRKPA

SEQ ID NO: 29384 - DNA, 660 bp, Xanthomonas maltophilia
  CDS (1)..(660): transl_table=11
atggcccgcaagaccaaagaggacacccaggcaacccgggaaggcatccttgacgccgccgaagcctgcttccatgaacacggcgtggcccgtaccacgctggagatgatcggtgcccgcgccggctacacccgtggcgcggtctactggcacttcaagaacaagagcgaggtgctggccgccatcgtcgagcgcgtgcacctgcccttcatgcaggaactggagcgcacctccaccgaccagcgcgacaccccggtgcacgacctgcgcgcggtgatgatccactcgttcatcgagctgtccgaggacgagcgcctgcgcaagaccatggagatcatgctgcgcagcgatgcgtcggcgaacaccagggtgctgaccgaaatgcagcaggccggattccgcgatgcgctggaccggatggagcgtgccctgcgccgcgcccgcgatctgggccagctgcgcgaaggcgccgacccgaaaatcgccgcgcgcatgcagcacgccaccgtgctgggcgtgctgcacggcgcgatggtcgaaccggaactgatggacctcaagcgcgatggcatgctcgcgctggacatgaccctggccgcctacgtgaaggatggtgtgttcgttcccggcaccgtccccgagccgctgcccgaggcgtga

SEQ ID NO: 29385 - protein, 219 aa, Xanthomonas maltophilia
MARKTKEDTQATREGILDAAEACFHEHGVARTTLEMIGARAGYTRGAVYWHFKNKSEVLAAIVERVHLPFMQELERTSTDQRDTPVHDLRAVMIHSFIELSEDERLRKTMEIMLRSDASANTRVLTEMQQAGFRDALDRMERALRRARDLGQLREGADPKIAARMQHATVLGVLHGAMVEPELMDLKRDGMLALDMTLAAYVKDGVFVPGTVPEPLPEA

SEQ ID NO: 29386 - DNA, 651 bp, Klebsiella pneumoniae
  CDS (1)..(651): transl_table=11
atggcacgaaaaaccaaacaacaggcacgtgaaacccggcaactgattctggatgttgctctgcgtctgttttcgcagcaaggcgtatcatctacctcgttggcaacaattgcaaaagctgcgggtgtaacgaggggggctatctactggcatttcaagaataaatcagatttattcaacgaaatttgggagctgtcagacgccagtattagcgatctcgaaattgagtatcgggcaaaattccccaacgatccactctcagttatcagggagattctagtctatgttcttgaagcgacagtgacagaagaacgtcgacgattaatgatggagattatctatcataagtgtgagttcgtcggtgaaatgaccgtggtgcagcaggcccagcggcagctctccctggcgagttatgagcgtatcgagcagaccttgaaagagtgcatcgcggcgaagctgctgcccgccaatttactcaccccgcgggcgggcgtgttaatgcgcagctaccttttccgactgatggaaaactggctgtttgcccccgattcgttcgaccttcatgcggaagcgcgggactacctcgcttttctgctggagaagtatcaattctgcccgacgctacgcggcccggagagcttgtcagcttaa

SEQ ID NO: 29387 - protein, 216 aa, Klebsiella pneumoniae
MARKTKQQARETRQLILDVALRLFSQQGVSSTSLATIAKAAGVTRGAIYWHFKNKSDLFNEIWELSDASISDLEIEYRAKFPNDPLSVIREILVYVLEATVTEERRRLMMEIIYHKCEFVGEMTVVQQAQRQLSLASYERIEQTLKECIAAKLLPANLLTPRAGVLMRSYLFRLMENWLFAPDSFDLHAEARDYLAFLLEKYQFCPTLRGPESLSA

SEQ ID NO: 29388 - DNA, 651 bp, Enterobacter aerogenes
  CDS (1)..(651): transl_table=11
atggcacgaaaaaccaaacaacaggcacttgaaacccggcaactgattcttgacgtcgccctgcgattgttttcgcagcaaggggtatcatctacctcgttggccgcgattgcaaaagctgctggagtgaccaggggcgctatatactggcatttcaaaaacaaatccgatctgtttaatgaaatatggagtctttctgacgccagcattagcgatctcgaagttgagtatcgggcaaaattccctaacgatccactgtcagttgttcgcgaaatactggtttatatcctcgaagcgacggtagtagaggagcgtaggcgcctgatgatggaaatcatcttccataaatgcgaatttgtcggagaaatggccgttgtccaacaagcgcagcgcagtttatggcttgaaagctacgatcgtattgagcaaacattaaaagattgtatcactgctcaacaattacctgcgaatttactcactcgccgtgcggcaattctgatgcgcagttatctttccggattaatggaaaactggctctttgcaccagagagttttaaccttcatgcggaagcccgtgcttatgtcgatgcgctgattgagatgtatcagacctgcccgtcgctacgaagttcgtctgaggtcatggcctga

SEQ ID NO: 29389 - protein, 216 aa, Enterobacter aerogenes
MARKTKQQALETRQLILDVALRLFSQQGVSSTSLAAIAKAAGVTRGAIYWHFKNKSDLFNEIWSLSDASISDLEVEYRAKFPNDPLSVVREILVYILEATVVEERRRLMMEIIFHKCEFVGEMAVVQQAQRSLWLESYDRIEQTLKDCITAQQLPANLLTRRAAILMRSYLSGLMENWLFAPESFNLHAEARAYVDALIEMYQTCPSLRSSSEVMA

SEQ ID NO: 29390 - DNA, 663 bp, Escherichia coli O157
  CDS (1)..(663): transl_table=11
atggcaaaaagaaccaaagccgaagctctgaagacccggcaagaactgattgaaactgccatcgcccagtttgcgcaacatggcgtaagcaagacgacgctcaacgacattgccgatgccgctaacgttacgcgtggcgctatctactggcacttcgagaacaagacccaactgtttaatgagatgtggttgcaacagccttcattgcgggagttaatccaggaacacttgacggctggattagagcatgacccgtttcaacaattgcgtgaaaaattgattgtcggcttgcaatatattgccaaaattccccgccagcaggcgttgctgaaaatcttatatcacaaatgtgaatttaatgatgagatgctggccgagggagtgatacgcgaaaagatgggctttaatccgcagactctccgcgaagtattgcaggcgtgtcagcaacaaggttgtgtagcaaataacctcgatttagatgttgtgatgattattattgatggtgccttcagcggaattgttcaaaactggttaatgaatatggcgggttatgatctttataaacaagcccccgctctggtcgataacgtattaagaatgttcatgccagatgaaaacataacgaaattaattcatcaaacgaatgaattaagtgtcatgtaa

SEQ ID NO: 29391 - protein, 220 aa, Escherichia coli O157
MAKRTKAEALKTRQELIETAIAQFAQHGVSKTTLNDIADAANVTRGAIYWHFENKTQLFNEMWLQQPSLRELIQEHLTAGLEHDPFQQLREKLIVGLQYIAKIPRQQALLKILYHKCEFNDEMLAEGVIREKMGFNPQTLREVLQACQQQGCVANNLDLDVVMIIIDGAFSGIVQNWLMNMAGYDLYKQAPALVDNVLRMFMPDENITKLIHQTNELSVM

SEQ ID NO: 29392 - DNA, 633 bp, Neisseria gonorrhoeae
  CDS (1)..(633): transl_table=11
atgagaaaaaccaaaaccgaagccttgaaaaccaaagaacacctgatgcttgccgccttggaaaccttttaccgcaaagggattgcccgcacctcgctcaacgaaatcgcccaagccgccggcgtaacgcgcggcgcgctctattggcatttcaaaaataaggaagacttgtttgacgcgttgttccaacgtatctgcgacgacatcgaaaactgcatcgcgcaagatgccgcagatgccgaaggaggttcttggacggtattccgccacacgctgctgcactttttcgagcggctgcaaagcaacgacatccactacaaattccacaacatcctgtttttaaagtgcgaacatacggaacaaaacgccgccgttatcgccattgcccgcaagcatcaggcaatctggcgcgagaaaattaccgccgttttgaccgaagcggtggaaaatcaggatttggctgacgatttggacaaggaaacggcggtcatcttcatcaaatcgacgttggacgggctgatttggcgttggttctcttccggcgaaagtttcgatttgggcaaaaccgccccgcgcatcatcgggataatgatggacaacttggaaaaccatccctgcctgcgccggaaataa

SEQ ID NO: 29393 - protein, 210 aa, Neisseria gonorrhoeae
MRKTKTEALKTKEHLMLAALETFYRKGIARTSLNEIAQAAGVTRGALYWHFKNKEDLFDALFQRICDDIENCIAQDAADAEGGSWTVFRHTLLHFFERLQSNDIHYKFHNILFLKCEHTEQNAAVIAIARKHQAIWREKITAVLTEAVENQDLADDLDKETAVIFIKSTLDGLIWRWFSSGESFDLGKTAPRIIGIMMDNLENHPCLRRK

SEQ ID NO: 29394 - DNA, 22 bp, Artificial sequence
  primer
atgcgccgaaccaaggctgatg

SEQ ID NO: 29395 - DNA, 21 bp, Artificial sequence
  primer
ctacgaggtggcgccggcctg

SEQ ID NO: 29396 - protein, 173 aa, Artificial sequence
  consensus sequence
  Variant (2)..(2): Xaa in position 2 is any amino acid
  Variant (5)..(9): Xaa in position 5 to 9 is any amino acid
  Variant (12)..(13): Xaa in position 12 to 13 is any amino acid
  Variant (14)..(14): Xaa in position 14 is any or no amino acid
  Variant (17)..(18): Xaa in position 17 to 18 is any amino acid
  Variant (20)..(22): Xaa in position 20 to 22 is any amino acid
  Variant (24)..(26): Xaa in position 24 to 26 is any amino acid
  Variant (29)..(32): Xaa in position 29 to 32 is any amino acid
  Variant (34)..(35): Xaa in position 34 to 35 is any amino acid
  Variant (38)..(39): Xaa in position 38 to 39 is any amino acid
  Variant (42)..(42): Xaa in position 42 is any amino acid
  Variant (47)..(47): Xaa in position 47 is any amino acid
  Variant (52)..(53): Xaa in position 52 to 53 is any amino acid
  Variant (55)..(80): Xaa in position 55 to 80 is any amino acid
  Variant (81)..(84): Xaa in position 81 to 84 is any or no amino acid
  Variant (86)..(106): Xaa in position 86 to 106 is any amino acid
  Variant (108)..(111): Xaa in position 108 to 111 is any amino acid
  Variant (113)..(157): Xaa in position 113 to 157 is any amino acid
  Variant (158)..(162): Xaa in position 158 to 162 is any or no amino acid
  Variant (164)..(170): Xaa in position 164 to 170 is any amino acid
  Variant (171)..(172): Xaa in position 171 to 172 is any or no amino acid
RXTKXXXXXTRXXXILXXAXXXFXXXGVXXXXLXXIAXXAGXTRGAXYWHFXXKXXXXXXXXXXXXXXXXXXXXXXXXXXXXXXPXXXXXXXXXXXXXXXXXXXXXRXXXXIXXXXXXXXXXXXXXXXXXXXXXXXXXXXXXXXXXXXXXXXXXXXXXXXXXAXXXXXXXXXG

SEQ ID NO: 29397 - DNA, 870 bp, Azotobacter vinelandii
  CDS (1)..(870): transl_table=11
atgcccgccatttcaaggcggccgtctgactcttcccgacggctggaacgcatccttttccgcgccctgtccgtcgaggccctgcccttgcgagagcccatgaagaaactccacttccacatacgcctttaccgcctgctggtggtgctcgccttcggcctggtcatggccggcggggtcagcctgctggagcgcttcaggcgcgacgatctgatggccctgcgccagcgactgacccgccgctttctcgtccagttggctgccgccctgccctttcgcctgagcctgcacggcaagctgccggatcggcccatgctgtgggtcagcaaccatgtttcctggaccgatatccccctgctcggcgggctcgtcccgttgtcctttctgtccaaggccgaggtgcgcagctggccgctggccggctggctggcacacaaggccggtacactgttcatccgccgcggcgcgggcgacagcggcctggtccgcaaccagttgctgcgccacctgcacaacggccacgatctactgatcttccccgagggcaccaccaccgacgggcgcagcttgcgcggcttccacagccgcctgctggccagcgcggtggaatcgcgggtgccggtacagccggtggcgatccgctatttgcgcgacggggcgaccgatccggtcgcccccttcatcggcgacgacgacctgctctcgcatctgctgcgtctgctgcgcagcgaacgcagcgaagtggaaatccatctgctgccgccgctggacagccagggcctcagccgcaccgagctgggccgccaggcgcacacggcgatcgctcgatgcctgttcggcgacagaagcgccctgccggtcgccgcctga

SEQ ID NO: 29398 - protein, 289 aa, Azotobacter vinelandii
MPAISRRPSDSSRRLERILFRALSVEALPLREPMKKLHFHIRLYRLLVVLAFGLVMAGGVSLLERFRRDDLMALRQRLTRRFLVQLAAALPFRLSLHGKLPDRPMLWVSNHVSWTDIPLLGGLVPLSFLSKAEVRSWPLAGWLAHKAGTLFIRRGAGDSGLVRNQLLRHLHNGHDLLIFPEGTTTDGRSLRGFHSRLLASAVESRVPVQPVAIRYLRDGATDPVAPFIGDDDLLSHLLRLLRSERSEVEIHLLPPLDSQGLSRTELGRQAHTAIARCLFGDRSALPVAA

SEQ ID NO: 29399 - DNA, 801 bp, Mesorhizobium loti MAFF303099
  CDS (1)..(801): transl_table=11
atgatcggaaaaatcaggattttcctggccctgggccttgtcgtcgccggttcgctggtcctggtgccattgcagatcctgtcgatgaagaccggctggtggccggaaaccgtcattctcaagatctggcacaggctgatcctcagggcgctcggcatgcgcgtccatgtcaagggaacgctgtccgacaagcgccccttgctggttgcttcgaaccacatctcctggaccgacatcatggtgctgggctcttttgccgatgtgaagtttatcgccagggccgatatggaaggctggccgctgatcggcatgctatcgaaactacagcgcaccgtcttcatcgagcgcgaacgcaagcgctcctccggcgaccaggcaagcgagatcgccaatcgcatggccaagggcgatgccatggtgctgttcgccgagggttcgaccggtgacggcaatgccgtcctgccgttcaagagcacgcttttcggcgccgcctcgatggcgatttctgagggcgcggccgagcaagtgttcatccagcctgtggcgatcgcctatacgcgcctgcacggcgtgccgctcggccgccgccaccggccgatgtcggcctggatcggcgacgaggacctgatgccgcatctcaaggtgctgatggcggaaggcgcgctcgacgtcgaggtgcatttcggcgagccaatcgcctttgccaagggctcgaaccgcaaggaaacggccaggctgatggaaagccaggtgcgcgagatgatgcaggcggcactcgccgatccgcgcccgagccactag

SEQ ID NO: 29400 - protein, 266 aa, Mesorhizobium loti MAFF303099
MIGKIRIFLALGLVVAGSLVLVPLQILSMKTGWWPETVILKIWHRLILRALGMRVHVKGTLSDKRPLLVASNHISWTDIMVLGSFADVKFIARADMEGWPLIGMLSKLQRTVFIERERKRSSGDQASEIANRMAKGDAMVLFAEGSTGDGNAVLPFKSTLFGAASMAISEGAAEQVFIQPVAIAYTRLHGVPLGRRHRPMSAWIGDEDLMPHLKVLMAEGALDVEVHFGEPIAFAKGSNRKETARLMESQVREMMQAALADPRPSH

SEQ ID NO: 29401 - DNA, 879 bp, Sinorhizobium meliloti 1021
  CDS (1)..(879): transl_table=11
atgatcaattgggtgcgggtcgctctttgcggcatgctgctcgtcatggtctcgctggtgctgatgccggtccagattctttgcctctggctcgatctgaaaccgcggcgctggctgccgcgtcactggcatcgcgtcgcctgtctgctgctcggcctgcgcgtccgcgtccatggcgagctcgaccgccggcgtcccttgctcctgagcgccaatcacgtctcctggaaggatatcctggtgctttcctcggtggcggacgtcgttttcgttgccaagtcggacgtcaagagctggccgatattcgggcttctcgcccgccttcaggcatcggttttcgtggaacgcgagcagaagcgcaccaccggtcaccaggtcaatgacatcgggcggcggctcgccgatggggaaatcgtcgtgctcttcccggaaggaacgacctccgacggcaaccggctgctcgacatcaagacctcgctgttcggcgcggccgcttcggcggtcccgcagtcgccgaccggcgtggtccacgtccagccgctggcgatttcctacaccggcatccacggcatgccgatggggcgctatcatcggccgatcgccgcatggccgggggacatcggcttggtgccgcaccttctcggggtgctcagagagggagccctggaggtcgatgtcgatttcggcgaggcggtggactatgaccggcacgcgaaccgcaaggaagtaagccgcctcatcggtcagcggatccgcaagatgctgtcggatcggctgcgagggcgctcccgatccgccgcgaagggcgagccggcccccgcgtgctctgcagcgccggacatcccgtcagacgcgcaaaggtcgcggctcgcgccgtga

SEQ ID NO: 29402 - protein, 292 aa, Sinorhizobium meliloti 1021
MINWVRVALCGMLLVMVSLVLMPVQILCLWLDLKPRRWLPRHWHRVACLLLGLRVRVHGELDRRRPLLLSANHVSWKDILVLSSVADVVFVAKSDVKSWPIFGLLARLQASVFVEREQKRTTGHQVNDIGRRLADGEIVVLFPEGTTSDGNRLLDIKTSLFGAAASAVPQSPTGVVHVQPLAISYTGIHGMPMGRYHRPIAAWPGDIGLVPHLLGVLREGALEVDVDFGEAVDYDRHANRKEVSRLIGQRIRKMLSDRLRGRSRSAAKGEPAPACSAAPDIPSDAQRSRLAP

SEQ ID NO: 29403 - DNA, 828 bp, Streptomyces coelicolor A3(2)
  CDS (1)..(828): transl_table=11
atgggcggctggctgcccctggcgccctgcacgcccgccgcgtgcgtggaccggacccgggcggcggcggccgtaccgcgcgccgtgctgcgcctcaccgcggtcgccgtgctgctcctcgccgggatcgccgtcgtgctggccccctgcggcctgcggcgcaggctgcccgcggtcctggtgcggcgctggtgccggtgggtggtgcgggccgcgggcgtccgggtccgcgtcacgggggccgccgtcccccggggcgggctgctcctcgtcgccaaccacgtctcctggctcgacatcccgctgctggccgccgtacgccccgcgaggatgctggccaagagcgagatcgggcgctggccggtggcgggcggtcctacggcgcgcgccggggtgctgttcatcgaacgggaccggccgcgggccctgccgggcacggtcgacgcgatcgcgcgggccctgcgcgcgggcgccgccgtggccgccttccccgagggcagcacgtggtgcggacgggcccacggacccttccgccgggcggtgttccaggccgccctggacgccggggtaccggtccagccggtccgcatccgctaccgggccggggagcgggcggtgagcacgacgcccgcgttcgtgggcgtggacacgctgctcacctccctgtggcgggtggcgtcggcgcgcggactgaccgccgaggtggaggtgcggcccgtcgtaccgcccggccgccaccgtgaccgccgtgccctggcccgggccaccgagtacgcggtccacggtgaccaggggaaagcaccttcgaaaagtatgtgtgctttgtga

SEQ ID NO: 29404 - protein, 275 aa, Streptomyces coelicolor A3(2)
MGGWLPLAPCTPAACVDRTRAAAAVPRAVLRLTAVAVLLLAGIAVVLAPCGLRRRLPAVLVRRWCRWVVRAAGVRVRVTGAAVPRGGLLLVANHVSWLDIPLLAAVRPARMLAKSEIGRWPVAGGPTARAGVLFIERDRPRALPGTVDAIARALRAGAAVAAFPEGSTWCGRAHGPFRRAVFQAALDAGVPVQPVRIRYRAGERAVSTTPAFVGVDTLLTSLWRVASARGLTAEVEVRPVVPPGRHRDRRALARATEYAVHGDQGKAPSKSMCAL

SEQ ID NO: 29405 - DNA, 804 bp, Xanthomonas campestris pv. campestris str. ATCC 33913
  CDS (1)..(804): transl_table=11
atgagcgagtcatccctgcccgccacgcgcgatgccggcggcgcgctgcgttggttccgttatctgtatcgggtgccattgctgctcgtgcacctgacggtctgcctgccgatcaccatgctgtgtgtcgtggcgccgccgctggcgcgcatccgtaccggccgcgacgacaccctggacgagcgcatgatccgctggtggcagggcacgctgatgcgcatcttcgggtttcgcctgcgccgtttcggcaccccgttgcccggcgccaccttgttcgtggccaatcacgtcagctgggtcgacatctcgatgctgcacagccagcgggtgatgggctttgtggccaagcgcgaaatcgccggctggccgctggtgggctggctggccaccaaggggcaaaccatcttccatcagcgcggcaacaccgagtcgctgggcggggtgctgcaggaaatgctgctgcgcctgcgcagcggcaagccggtgggtgtgttcccggaagggcgcacccgcggcggtaccgaggtgggcccgttccatgcacgcatctttcaggcggcggtcgaagccggtgtgccggtgcagccggtggcgttgcgctacggcgagcgcggcaatgcacaggccgttgtggcgttcggcgagcgcgagagtttctttgccaatatcgtgcggctgctcggcgagcgctcacggctggcggaagtgcattttctcgagccgatcggcgcgctggatatcgacgggcggcgccgtctggccgacacctcgcgccagcgcatccttgccgcgatggagtcctga

SEQ ID NO: 29406 - protein, 267 aa, Xanthomonas campestris pv. campestris str. ATCC 33913
MSESSLPATRDAGGALRWFRYLYRVPLLLVHLTVCLPITMLCVVAPPLARIRTGRDDTLDERMIRWWQGTLMRIFGFRLRRFGTPLPGATLFVANHVSWVDISMLHSQRVMGFVAKREIAGWPLVGWLATKGQTIFHQRGNTESLGGVLQEMLLRLRSGKPVGVFPEGRTRGGTEVGPFHARIFQAAVEAGVPVQPVALRYGERGNAQAVVAFGERESFFANIVRLLGERSRLAEVHFLEPIGALDIDGRRRLADTSRQRILAAMES

SEQ ID NO: 29407 - DNA, 759 bp, Xanthomonas axonopodis pv. citri str. 306
  CDS (1)..(759): transl_table=11
ttgcgttggttccggtatctctaccgggtgccactgttgttgctgcatctgtgtctcggcctgccggtcaccatgctgtgcgtggtggtaccggcgctggcgcggatccgcatcgggcacgacgacactctggaggagcggatgatccgctggtggcagggcaccttgatgcgcgtgttcggcttccgcctgcgtcgcttcgggacgccgctaccgggcgcgaccctgttcgtggccaaccacgtcagctgggtggatatctccatcctgcacagccagcgggtgatggggttcgtggccaagcgcgaaattgccggctggccgctggtgggctggctggcgaccaagggccagaccatcttccaccagcgcggcaataccgaatcgctgggcggggtgctgcaggaaatgctgctgcgcctgcaaagcggcaagccggtgggggtcttcccggaaggacgtacccgtgggggtaccgaagtgggcccgttccatgcgcgcatcttccaggcagcggtggaagccggcgtgccggtacagccggtggcgctgcggtacgggttgcgcggcaacgcgcaggcggtggtggccttcggtgagcgcgagagtttcttcgccaatatcgtgcgcctgctgggcgagccgtcgcggctggccgaagtgcattttctcgagccgattcgcgcgctggatatcgagggccgtcgtcgcatggccgagacctcgcgccaacggatcgtcgcagcgatggagtcctag

SEQ ID NO: 29408 - protein, 252 aa, Xanthomonas axonopodis pv. citri str. 306
MRWFRYLYRVPLLLLHLCLGLPVTMLCVVVPALARIRIGHDDTLEERMIRWWQGTLMRVFGFRLRRFGTPLPGATLFVANHVSWVDISILHSQRVMGFVAKREIAGWPLVGWLATKGQTIFHQRGNTESLGGVLQEMLLRLQSGKPVGVFPEGRTRGGTEVGPFHARIFQAAVEAGVPVQPVALRYGLRGNAQAVVAFGERESFFANIVRLLGEPSRLAEVHFLEPIRALDIEGRRRMAETSRQRIVAAMES

SEQ ID NO: 29409 - DNA, 789 bp, Pseudomonas putida KT2440
  CDS (1)..(789): transl_table=11
atgccgaagttgcgggtactggcccgcctcatccgactgctgctggtgctggcgcagggcatgctgatggccagcattatcgccttgggcgaacgcttgggcttcaaggcgccgatcgaacggcgccagcgctggacctgcctgttcatgaagcgcctggtcgctgccctgcccttcgacgtcaaggtagtcggcgaacttccgcaacggccgatgttgtgggtcagcaaccatgtttcctggaccgacatccccctgcttggcatgctcacgccgctgtctttcctgtccaaggccgaagtgcgccactggccggtggccggctggctggcggaaaaggccggcacgctgttcattcgccgtggtggtggcgacagtcagcgcctgcgcgaacagatcgccgggcaactggggctggctcgtccgctgttgatcttccccgaaggcaccactaccagcggccgcacgttgcgcacctttcatggccgcctgcttgcaggagccatcgaccgtggcgtgtcagtgcagccagtcgctgttcagtacctgcgtgatggccagatcgacccggtagcgccgttcattggtgaggacgacctggtgtcccaccttatgcgcctgttcgccctgccgcggggcgaggtgtgcatccacctgctgcagccaataggtagcgtgggcaaggaacgtgcggtgctggcgttgcaggcgcaacaggcgattcacctggcgctgttcggggttgaagacgtggagatggcgccacgtcggcaggcgcgggctgcctga

SEQ ID NO: 29410 - protein, 262 aa, Pseudomonas putida KT2440
MPKLRVLARLIRLLLVLAQGMLMASIIALGERLGFKAPIERRQRWTCLFMKRLVAALPFDVKVVGELPQRPMLWVSNHVSWTDIPLLGMLTPLSFLSKAEVRHWPVAGWLAEKAGTLFIRRGGGDSQRLREQIAGQLGLARPLLIFPEGTTTSGRTLRTFHGRLLAGAIDRGVSVQPVAVQYLRDGQIDPVAPFIGEDDLVSHLMRLFALPRGEVCIHLLQPIGSVGKERAVLALQAQQAIHLALFGVEDVEMAPRRQARAA

SEQ ID NO: 29411 - DNA, 807 bp, Pseudomonas syringae pv. tomato str. DC3000
  CDS (1)..(807): transl_table=11
atgagccggttacgcggttatgcccgcgtgatccgtgtgctgctggtggtggcgctcgggctgacgatagccgggacgttcgcgattctggaacgcaccagaatcggcggctcgatggaacgcaggcagcgctggagccgctggttcatggcgcgcttgaccaatgccctgccgtttcgcgtgaccgtgactggcgaactgcccagccagccgatgctgtgggtcagcaaccatgtgtcctggaccgacatcgccctgctgggcatgctcgcaccgctgtcgtttctgtccaaagccgaggtgcggacctggccggtggcaggctggctggccttgaaagccggaacgctgttcattcgtcgtgggtcgggcgacagccgcctgattcagaagcagatgtgcaatcacctgcaacaaggcaacgcactgctgatcttcccggaaggcaccaccaccgacggcaaaagcctgcgcaccttccacggtcgcctgctgtccagcgccatcgaagcgggtgtgccgatccagccggtcgccatcggctattcgcgtgatggcaagccggacccgattgctccgttcattggtgacgatgatctgctgtcgcacctgcgtcggctgttcgccaacgagcaaagcgacgtgcacattcatttactgacgccgatcccgacggcggatcaggaacgcgccgccctggccttcaaggcccagcaggccgtgcagatggcattgtttggtgaacccgtgatcggcaaaccggttcaaccggctgaagtggtctcgcgcccggccagagcggcctga

SEQ ID NO: 29412 - protein, 268 aa, Pseudomonas syringae pv. tomato str. DC3000
MSRLRGYARVIRVLLVVALGLTIAGTFAILERTRIGGSMERRQRWSRWFMARLTNALPFRVTVTGELPSQPMLWVSNHVSWTDIALLGMLAPLSFLSKAEVRTWPVAGWLALKAGTLFIRRGSGDSRLIQKQMCNHLQQGNALLIFPEGTTTDGKSLRTFHGRLLSSAIEAGVPIQPVAIGYSRDGKPDPIAPFIGDDDLLSHLRRLFANEQSDVHIHLLTPIPTADQERAALAFKAQQAVQMALFGEPVIGKPVQPAEVVSRPARAA

SEQ ID NO: 29413 - DNA, 900 bp, Streptomyces avermitilis MA-4680
  CDS (1)..(900): transl_table=11
gtgcccgtccccgcgtccgcgtctgccgctcggcggccccttcccgcggggtccgccggggggcgttccgccgcgcgggtcagcgcatggctgcccaccgcgccgtgcactgcgcgtggatgcgtggagagcacggcggcctggaccgccgtgccgcgcgcggtactgcggctcaccgcgctcctgctcctggtcctggccggtgtcctgctgaccccggccgtcgggcggatgcgcgcggcggagcgcgacccgctgatccgacgatggtgccgggccgtggcgcgtgccgccggtgtgcgggtgcgcatcaccggggccgccgcccccaccggcggcctgctggtcgtggccaaccacatctcgtggctggacatcccgctgctcgccgccgtccgtccggcacggatgctcgccaaggccgaggtccgcgcgtggccggtggcgggcgcggtggcggcacgagggggcaccctcttcatcgagcgcgaccggttgcgggccctgcccgacacggtggggcggatcgccgccgccctgcgcggcggggcggccgtcgtcgccttcccggagggcagtacctggtgcggccgggcccagggccggttccggcgggccgtcttccaggccgcactcgacgccggcgtgcccgtccagcccgtgcgtatccactaccggtccgccgggggagcggcgagcaccacgcccgcgttcgtgggcgacgacccgctgctcgcgtcactgtggcgggtggcgtcggcgcgagggctggtggccgaggtcgaggtgctgccgatgccggcggccggtgaccgcgccgaccgccgggcccttgccgacgcggcgcaggaagccctgcgcagggcgagcacagggccgcagtcgacgtcgcatccctga

SEQ ID NO: 29414 - protein, 299 aa, Streptomyces avermitilis MA-4680
MPVPASASAARRPLPAGSAGGRSAARVSAWLPTAPCTARGCVESTAAWTAVPRAVLRLTALLLLVLAGVLLTPAVGRMRAAERDPLIRRWCRAVARAAGVRVRITGAAAPTGGLLVVANHISWLDIPLLAAVRPARMLAKAEVRAWPVAGAVAARGGTLFIERDRLRALPDTVGRIAAALRGGAAVVAFPEGSTWCGRAQGRFRRAVFQAALDAGVPVQPVRIHYRSAGGAASTTPAFVGDDPLLASLWRVASARGLVAEVEVLPMPAAGDRADRRALADAAQEALRRASTGPQSTSHP

SEQ ID NO: 29415 - DNA, 804 bp, Nitrosomonas europaea ATCC 19718
  CDS (1)..(804): transl_table=11
atggccgcaaccggagttaacaggttaaccagaagtatccggttcatcaggttgatcctgcatatcgcttctggattactgcaatcgtttgccttgccatacatcagtacagccaggcaaaaccgaatggcctgtaactgggcacaaaaatttcttcggattctcaaagtgaagttgtgccccggtggtgtgttgcctgtttgtggccggcaaggggtagtttttgtagccaatcacatctcatggctggatatcatggtcattctggcggtatatccggtgcatttcgttgccaaggcagaaatcggcacctggccgatactgggtcagttatgtcgcaatgccggaaccctgttcatcgaacgtgagaaacgcggggatacgttacggatcaatcagcagataagcagtattctgaaagacggacgctcggtcgtgatattccctgagggtacgaccggtgatggagatgtgctccagcattttcatgcttccctgctgcaatctgccgtaacagctgaaacattgctttatccggttgcaatccgttaccgtaaccgtgatggttcgcggaattcgagtgttgcctatgtcagcgtgacgatactgcaatccctgatgcagatattggcagagccggagattcaggtggaactgattttcagggaacccattccgggagcgggcagaaaccggcgcgagctggcgcgtctggcagaaaaagccattgcgcagaccctgtcactcaatgtcgtacgcacggtacctgaaacactttccgatcttccagccgaacggatgtaa

SEQ ID NO: 29416 - protein, 267 aa, Nitrosomonas europaea ATCC 19718
MAATGVNRLTRSIRFIRLILHIASGLLQSFALPYISTARQNRMACNWAQKFLRILKVKLCPGGVLPVCGRQGVVFVANHISWLDIMVILAVYPVHFVAKAEIGTWPILGQLCRNAGTLFIEREKRGDTLRINQQISSILKDGRSVVIFPEGTTGDGDVLQHFHASLLQSAVTAETLLYPVAIRYRNRDGSRNSSVAYVSVTILQSLMQILAEPEIQVELIFREPIPGAGRNRRELARLAEKAIAQTLSLNVVRTVPETLSDLPAERM

SEQ ID NO: 29417 - DNA, 741 bp, Bordetella pertussis Tohama I
  CDS (1)..(741): transl_table=11
ttgaaactgctgcgcttcgttttccgcgtgttcctggtggtgccctgggtgctgttcggcctgctgtgcgtgaccctggtgtaccgggggctgcgccaggaccagcgggcccggctgaaccggtgctggtcggcgtgcctgatgcggctgtgcggcattgccgtgcatgtgcgcggcgcgccgcgcctgcgaggcggcgtgctgtgggtcgccaaccatgtctcgtggatcgacatcttcgtggtcaactcggtgcgcgcgacgtcgttcgtggccaagagcgagatccgcgcctggccggtcatcggctaccttgccgccggcgcgggtaccttgttcatcgaccggacgcagcgccacgcggtgcatgccatggggcagtcgatccatgactgcttcgcccgcggcgatgccgtgggcctgtttcccgagggcacgacgaccgaaggcttcacgacccgcccgttccatgccagcctgttcgagccggcgcgcgccgaaggcgtggatatccagccggtggcgctgcggttcatgcatcgcggccagcgcagcggctttgccgctttcgtcggcgaggaaaccctggtggccaatctgtggcgggtattggggacgaccgggctggcggtggaggtggtgttcctggagcccctgcctacgcagcatgccgaagggcatcagccgacccggctggagctctcgcacatggtgcgcaacgccatcgccggcgagctgtag

SEQ ID NO: 29418 - protein, 246 aa, Bordetella pertussis Tohama I
MKLLRFVFRVFLVVPWVLFGLLCVTLVYRGLRQDQRARLNRCWSACLMRLCGIAVHVRGAPRLRGGVLWVANHVSWIDIFVVNSVRATSFVAKSEIRAWPVIGYLAAGAGTLFIDRTQRHAVHAMGQSIHDCFARGDAVGLFPEGTTTEGFTTRPFHASLFEPARAEGVDIQPVALRFMHRGQRSGFAAFVGEETLVANLWRVLGTTGLAVEVVFLEPLPTQHAEGHQPTRLELSHMVRNAIAGEL

SEQ ID NO: 29419 - DNA, 741 bp, Bordetella parapertussis 12822
  CDS (1)..(741): transl_table=11
ttgaaactgctgcgcttcgttttccgcgtgttcctggtggtgccctgggtgctgttcggcctgctgtgcgtgaccctggtgtaccgggggctgcgccaggaccagcgggcccggctgaaccggtgctggtcggcgtgcctgatgcggctgtgcggcattgccgtgcatgtgcgcggcgcgccgcgcctgcgaggcggcgtgctgtgggtcgccaaccatgtctcgtggatcgacatcttcgtggtcaactcggtgcgcgcgacgtcgttcgtggccaagagcgagatccgcgcctggccggtcatcggctaccttgccgccggcgcgggtaccttgttcatcgaccggacgcagcgccacgcggtgcatgccatggggcagtcgatccatgactgcttcgcccgcggcgatgccgtgggcctgtttcccgagggcacgacgaccgaaggcttcacgacccgcccgttccatgccagcctgttcgagccggcgcgcgccgaaggcgtggatatccagccggtggcgctgcggttcatgcatcgcggccagcgcagcggctttgccgctttcgtcggcgaggaaaccctggtggccaatctgtggcgggtattggggacgaccgggctggcggtggaggtggtgttcctggagcccctgcctacgcagcatgccgaagggcatcagccgacccggctggagctctcgcacatggcgcgcaacgccatcgccggcgagctgtag

SEQ ID NO: 29420 - protein, 246 aa, Bordetella parapertussis 12822
MKLLRFVFRVFLVVPWVLFGLLCVTLVYRGLRQDQRARLNRCWSACLMRLCGIAVHVRGAPRLRGGVLWVANHVSWIDIFVVNSVRATSFVAKSEIRAWPVIGYLAAGAGTLFIDRTQRHAVHAMGQSIHDCFARGDAVGLFPEGTTTEGFTTRPFHASLFEPARAEGVDIQPVALRFMHRGQRSGFAAFVGEETLVANLWRVLGTTGLAVEVVFLEPLPTQHAEGHQPTRLELSHMARNAIAGEL

SEQ ID NO: 29421 - DNA, 741 bp, Bordetella bronchiseptica RB50
  CDS (1)..(741): transl_table=11
ttgaaactgctgcgcttcgttttccgcgtgttcctggtggtgccctgggtgctgttcggcctgctgtgcgtgaccctggtgtaccgggggctgcgccaggaccagcgggcccggctgaaccggtactggtcggcgtgcctgatgcggctgtgcggcattgccgtgcatgtgcgcggcgcgccgcgcctgcgaggcggcgtgctgtgggtcgccaaccatgtctcgtggatcgacatcttcgtggtcaactcggtgcgcgcgacgtcgttcgtggccaagagcgagatccgcgcctggccggtcatcggctaccttgccgccggcgcgggtaccttgttcatcgaccggacgcagcgccacgcggtgcatgccatggggcagtcgatccatgactgcttcgcccgcggcgatgccgtgggcctgtttcccgagggcacgacgaccgaaggcttcacgacccgcccgttccatgccagcctgttcgagccggcgcgcgccgaaggcgtggatatccagccggtggcgctgcggttcatgcatcgcggccagcgcagcggctttgccgctttcgtcggcgaggaaaccctggtggccaatctgtggcgggtattggggacgaccgggctggcggtggaggtggtgttcctggagcccctgcctacgcagcatgccgaagggcatcagccgacccggctggagctctcgcacatggcgcgcaacgccatcgccggcgagctgtag

SEQ ID NO: 29422 - protein, 246 aa, Bordetella bronchiseptica RB50
MKLLRFVFRVFLVVPWVLFGLLCVTLVYRGLRQDQRARLNRYWSACLMRLCGIAVHVRGAPRLRGGVLWVANHVSWIDIFVVNSVRATSFVAKSEIRAWPVIGYLAAGAGTLFIDRTQRHAVHAMGQSIHDCFARGDAVGLFPEGTTTEGFTTRPFHASLFEPARAEGVDIQPVALRFMHRGQRSGFAAFVGEETLVANLWRVLGTTGLAVEVVFLEPLPTQHAEGHQPTRLELSHMARNAIAGEL

SEQ ID NO: 29423 - DNA, 816 bp, Chromobacterium violaceum ATCC 12472
  CDS (1)..(816): transl_table=11
ttgaagtcacacgccaccactacattcgccacccgctgcggccgcgtgacgcgcctgctcggccatctggccgtgggggtgttcatcgtcgccacccgctattcccgcctggcccaggccgagcgcgcggtcgtcacccgccgctgggcgcagcacgcgctgaagattctcggggtcagcatcaaggtgcagggcgtcaatccgggcttttatccgcccaacaccctgctggtcgccaaccacgtgtcctggctggacatcgtggcattgaacagctgcaccgtgtcgcgcttcgtcgccaagcgcgaaatccgcaaatggccgctgataggctggctggcctacgtggccggcacgctgttcatcgaccggggcaaccgccgcgacgccagccgcgtcaaccagatcctggccgaggcgatgcagaacggcggctgcatggcggtcttccccgaagccacgacatccgacggcagcggcctgctgccgttcaaggcctcgctgttcgaggccgcgctgctgtccggcggcaccgtgcagccggtatcgctgcgctaccagcggccggacggcagcctgctgcgcgaggccgcctacatcgacgacatctcgctgctgcagagcataggcaaggtattgagcgtgccgcagatcgaggtggaaatcagctacggccagccgctgaaagccggcgaagccggcctggacaaccgcttcctgctggccgaacaggcccgcagcgaggtggcccgcggcctgcggctgtcgctggaagaacagccgcaaccggttccggcggcggaaaccggcgcctga

SEQ ID NO: 29424 - protein, 271 aa, Chromobacterium violaceum ATCC 12472
MKSHATTTFATRCGRVTRLLGHLAVGVFIVATRYSRLAQAERAVVTRRWAQHALKILGVSIKVQGVNPGFYPPNTLLVANHVSWLDIVALNSCTVSRFVAKREIRKWPLIGWLAYVAGTLFIDRGNRRDASRVNQILAEAMQNGGCMAVFPEATTSDGSGLLPFKASLFEAALLSGGTVQPVSLRYQRPDGSLLREAAYIDDISLLQSIGKVLSVPQIEVEISYGQPLKAGEAGLDNRFLLAEQARSEVARGLRLSLEEQPQPVPAAETGA

SEQ ID NO: 29425 - DNA, 849 bp, Rhodopseudomonas palustris CGA009
  CDS (1)..(849): transl_table=11
atgctgcgattcatcctcgtcattgccgccgtcgtgccgctgacgttgaccctgctgccggtgcatctgctggcgatccggttcggctggcgcgcgcagcgcacgattccgcaactgtatcatcgcatcgtctgcgcgctgatcggcgtgcgcattcatcaggtcggccgccgctgcgacggcccggttctgatcctgtccaatcacgtgtcctggctcgacatctgcgtgatctccgcggtggcaccggtgtcgttcatcgccaagagcgaagtcgcgacctggccggtgttcggcgcgctggcacgctggcagcgcaccgtgttcatcgatcgccaggcccggcagcgcaccggcgaagccacgcgcgaaatcggcacgcggctgcaggacggcgacgccatggtgctgttcgccgagggcacctcgtccgacggcagccgggtgctgccattccgctcggcgctggtcggcgcggtgcatcatgcgatcggcgaagagaccggcgcccgcgtcgcagtacagccgatggcggtgacgtataccggtttcggcggcctgcccatcggccgcgaactgcgccagcgcgtggcgtggtacggcgacgccgagctgattccgcacttcgtcgagctgctctcggctggcgcgatcgacgtcaccgtgagctggggcgacgcggtcgcgacctcgatcgatgccgaccgcaagcagatcacccgcgaggcagaacaatcggtgcggcggatgtgcgaagctgcccgccgcgccggcatgcgcggcgcgatcgcgccgcgccccaccgcggcgccggtgacgacgcccgacgtgcagccggaagcggcatag

SEQ ID NO: 29426 - protein, 282 aa, Rhodopseudomonas palustris CGA009
MLRFILVIAAVVPLTLTLLPVHLLAIRFGWRAQRTIPQLYHRIVCALIGVRIHQVGRRCDGPVLILSNHVSWLDICVISAVAPVSFIAKSEVATWPVFGALARWQRTVFIDRQARQRTGEATREIGTRLQDGDAMVLFAEGTSSDGSRVLPFRSALVGAVHHAIGEETGARVAVQPMAVTYTGFGGLPIGRELRQRVAWYGDAELIPHFVELLSAGAIDVTVSWGDAVATSIDADRKQITREAEQSVRRMCEAARRAGMRGAIAPRPTAAPVTTPDVQPEAA

SEQ ID NO: 29427 - DNA, 747 bp, Herminiimonas arsenicoxydans
  CDS (1)..(747): transl_table=11
atgatcgttgtgccgtttgtgcgcgtgatgctgcatttgttgcgtggcctggctactgcggctttcatttttccctgggtcgctgcggcaagtcacgatagactcagccaaaaatgggcggcaggcctgctgtccatcctgcgcatcaaggtggatttgctgcccggcgcagcgccggtgcaccgggcgctgatcgtggccaatcatgtttcgtggctggatatattcgtcatcaattccctgcaaccgtgccgcttcgttgcaaaggcggatatccgcaaatggccggtgctgggctggctgtgcgcacaaggtggcacgatctttattgcacgcggcaagcagcgcgaggtaaggcgggtgtacgcaggcctggtgagcagtatggaagccggccagcgcattgcatttttccccgaaggcacgacggtcgcgcaaggagctctgttaccttttcatccgaatctgtttgaagccgcgattgaagcggatgtgccggtgcagccgtacgccatacgctatgtggatgagcacggcaatctgcatgcagcggcagattttattggcgacatgagctttgtcgacagcatgctgctgatcatgaaggcgcgcaaaatgacagcgcatttgatcgtgctgcctccgatagatacagccggcacgcacaggcgcgagctggcgcaggcagcgcgcgcggccattgcagatacgctaggccatgtcgaacctgcagagaaggtggcctag

SEQ ID NO: 29428 - protein, 248 aa, Herminiimonas arsenicoxydans
MIVVPFVRVMLHLLRGLATAAFIFPWVAAASHDRLSQKWAAGLLSILRIKVDLLPGAAPVHRALIVANHVSWLDIFVINSLQPCRFVAKADIRKWPVLGWLCAQGGTIFIARGKQREVRRVYAGLVSSMEAGQRIAFFPEGTTVAQGALLPFHPNLFEAAIEADVPVQPYAIRYVDEHGNLHAAADFIGDMSFVDSMLLIMKARKMTAHLIVLPPIDTAGTHRRELAQAARAAIADTLGHVEPAEKVA

SEQ ID NO: 29429 - DNA, 858 bp, Burkholderia vietnamiensis G4
  CDS (1)..(858): transl_table=11
atgaccgctcttcgcaagctgcgtctcgtctttcacctgctgcgcggcatggcgatcgtcgcgctgcgcttttcgcacgtcacgcccgcgcaccgcgccgagctcacacgccgctggtcgctcaagatgctgcggatctgcgggatgcggctcgtcgtgcacaacgacggcgcgcggctcgatgcgggcgcgctcgtcgtcggcaaccacgtgtcgtggcttgacatctacaccgtcaatgcatggcggccgacgccgttcgtgtcgaaggcggaggtgcggcagtggccggtcgtcggctggcttgccgagaagctcgacaccgtgtttctgcagcgcgagaagcgtaccgaggcgatgcgggtgatgcacgagatggcagaacggctgcgcaacggcggcgtcatgtgcgtgtttcccgaaggcacgacgtcggacgggcaggggctgttgccgtttcacgcgaacctgttccaggccgcagtgtcggcggggtgcgcagtgcagccggtgtgtctgatgtacgaggatgcgcaagggcggcagtcggtcgcgccggcctacacgggtgagctgtcgctcgggaagtcgctcgacatggtgttgcgcggcggcccgctcgtcgcgcatctgtacgtgtgcgagccgatcccgccgggcggggatcggcgcacgacgtcggcggcggcgcgcgacgcgatcgcggccgcgctcgaagcgatgcaggcgaaggtcggcaagccgtcgcccgaatcgctggctgaactcgagaagcacgcatatccggcgaccgaagtcggcggcggggcgacgggcgaggcggcggacgaggcgccggtgccggggcgggaggggtga

SEQ ID NO: 29430 - protein, 285 aa, Burkholderia vietnamiensis G4
MTALRKLRLVFHLLRGMAIVALRFSHVTPAHRAELTRRWSLKMLRICGMRLVVHNDGARLDAGALVVGNHVSWLDIYTVNAWRPTPFVSKAEVRQWPVVGWLAEKLDTVFLQREKRTEAMRVMHEMAERLRNGGVMCVFPEGTTSDGQGLLPFHANLFQAAVSAGCAVQPVCLMYEDAQGRQSVAPAYTGELSLGKSLDMVLRGGPLVAHLYVCEPIPPGGDRRTTSAAARDAIAAALEAMQAKVGKPSPESLAELEKHAYPATEVGGGATGEAADEAPVPGREG

SEQ ID NO: 29431 - DNA, 816 bp, Acinetobacter sp. ADP1
  CDS (1)..(816): transl_table=11
atgactgaacacacttctgcttcgacttcatcgttaaatccgctgactagattttcgttatatgccaaaaaatttgccttaagtctgggggttgtgggagagggattctatctggtctatcggcatgggctttacaagcatccaaataaccctgccaatacacgttatgttcagtatttctgtcgtcgtttatgtcatgtatttaatctggaagttcgtgtacacggagatatccctcgtcagcctgcattgtgggtcagtaatcatatttcatggttagatattgccgtactcggatctggagcacgggtattctttttatctaaagctgaagtagaaaaatggccaatactgggtaagctcgcaaaaggtggtggtaccttatttattcagcgtggttctggagattcgatccgtatccgtgaacaaattacgtcttttttaaagaaagatattccagtgttattttttccagaagccacgaccacggatggaactacggtcaagcgaattcatggacgtattctgggagcggctatcgaagcgcagaaacctgtgcaaatctgtttgatttgttatgttaatcaacaaggagaactcgatatgatcgcgccgtttattggagatatctcttttgttgagcatgttaaaaatgtattggaaatgccgaaggtcactgcacatttgatggctttagccccaatttcagttgaagggcacaccactcaaacactgacggctgaagtacaggaaaaaatgcaacaaggattacttaaactacatcaactgacagtaaaatcgaaaaatattacatga

SEQ ID NO: 29432 - protein, 271 aa, Acinetobacter sp. ADP1
MTEHTSASTSSLNPLTRFSLYAKKFALSLGVVGEGFYLVYRHGLYKHPNNPANTRYVQYFCRRLCHVFNLEVRVHGDIPRQPALWVSNHISWLDIAVLGSGARVFFLSKAEVEKWPILGKLAKGGGTLFIQRGSGDSIRIREQITSFLKKDIPVLFFPEATTTDGTTVKRIHGRILGAAIEAQKPVQICLICYVNQQGELDMIAPFIGDISFVEHVKNVLEMPKVTAHLMALAPISVEGHTTQTLTAEVQEKMQQGLLKLHQLTVKSKNIT

SEQ ID NO: 29433 - DNA, 768 bp, Methylococcus capsulatus str. Bath
  CDS (1)..(768): transl_table=11
atgccgcgcttcagacaggcctatagggccgtcctggtgacggccgcctgcctgggcggcatggcggccgtggtgctgctgttcccccccttgcgcgccctgggagaaagccgcgcccagtgcctgcgggacagggtccagatggcctggttccgcaccctcctgctcatcctcggtgtgcacgtcgaacgccgtggccgatggaaccccgacgcgccgctgtgggtcgccaaccacatttcctggctggacatcgtcgtcatcggcgctcaggctccgctgaccttcatctccaaacaggatgtcgccggttggccggtgtttggtttcctcgcccgtcgcaccggcaccttgttcctgcggcggggcgaccgcgaagatacccagcggctcggcgagcggatgacctggctgctgcgccagaaacgcaccctgctgctgttcccggaaggcaccagctccagcggagagaccgtgctgcggttccatccccgtctgttccagccggccaaacgcgccggcgtcgcagtgcagccggtcgcgctggcttaccggggggatgccggcaaaatagcgccgttcgtcggcgaagctgcgtttcttccccacctgctgaggatgctggggattccccggaccgtggccgaactgagtttcggcctcgccatcgacagcgaacatctcaaccgcgacgaactggcccacgcggcccgccagacggtcgtcggctgcctgggaaaaggcgaaacacggcggcaggtcgcctga

SEQ ID NO: 29434 - protein, 255 aa, Methylococcus capsulatus str. Bath
MPRFRQAYRAVLVTAACLGGMAAVVLLFPPLRALGESRAQCLRDRVQMAWFRTLLLILGVHVERRGRWNPDAPLWVANHISWLDIVVIGAQAPLTFISKQDVAGWPVFGFLARRTGTLFLRRGDREDTQRLGERMTWLLRQKRTLLLFPEGTSSSGETVLRFHPRLFQPAKRAGVAVQPVALAYRGDAGKIAPFVGEAAFLPHLLRMLGIPRTVAELSFGLAIDSEHLNRDELAHAARQTVVGCLGKGETRRQVA

SEQ ID NO: 29435 - DNA, 996 bp, Azoarcus sp. EbN1
  CDS (1)..(996): transl_table=11
gtgcatcgatgccgtagcgccggcgctcatcaaggggtatctgcgcgccggaccagcctgggaccccgatttcaacaccgccgacctgccgatcccgctgctgatgaaccgcatcgatggcagatacgcccgacacttcctgggacgcacagactgaacgcttccacctttcccgtcccgacgagccgcctcgtccgcgcgtggcgactcgtccgcgtcgggcttcatgtcgccggcggtgcggcggtcgtcctggcggtgtttccgctggtcggtggctcgacccggctcgcgcttcggcagcgctggtcgcgccggatgctggctgtcctcggcatcgagttgcgcgcccacggtgccgcgatcgagccgggatgcctgctcgtcgcgaaccacatctcctggctcgatatcttcgtgatcaacgcgctcgcgccgtcggccttcgtctcgaaggccgaggtgcgcggctggccgctcttcggctggctcgcggcgaagaacgagacggtgttcctgcgccggggcagccgcggccacgcgaagatcatcaacgccgagatcggcgcgctgctcgacgccgggcgcaatgtcgcgatcttccccgaaggcacgacgaccgacggtagccaggtcctgcattttcacgctgcattgctgcaaccggcgattgcatgcggccacgcggtacagccggtcgcgatctcttaccgccggccggacggcacgttcagccgcgcgccggcctacgacggcgatgtgacgctcggccagtgcctcgccgcaatgctcgccgagccgcggatcgtcgcctgcacactcgctgccgagccgttgccgtccggtcccggcatggaccgtcgcagcctcgcgcaggctgcgcgcgctgccgttgtcatcggtatcggggcggaattcgctccgatcgaacactcgccccgcgtcgaggagcgaagccctgaccgggtttccggcggaagtcccgctcaaccctga

SEQ ID NO: 29436 - protein, 331 aa, Azoarcus sp. EbN1
MHRCRSAGAHQGVSARRTSLGPRFQHRRPADPAADEPHRWQIRPTLPGTHRLNASTFPVPTSRLVRAWRLVRVGLHVAGGAAVVLAVFPLVGGSTRLALRQRWSRRMLAVLGIELRAHGAAIEPGCLLVANHISWLDIFVINALAPSAFVSKAEVRGWPLFGWLAAKNETVFLRRGSRGHAKIINAEIGALLDAGRNVAIFPEGTTTDGSQVLHFHAALLQPAIACGHAVQPVAISYRRPDGTFSRAPAYDGDVTLGQCLAAMLAEPRIVACTLAAEPLPSGPGMDRRSLAQAARAAVVIGIGAEFAPIEHSPRVEERSPDRVSGGSPAQP

SEQ ID NO: 29437 - DNA, 780 bp, Azoarcus sp. EbN1
  CDS (1)..(780): transl_table=11
gtgacggtcgcagccgaggtgtccgccgcgcggcgctgttggcggctgttgcggctcgcgcaccatctgctgctgggcgctgcggcgacgctgctcgtcgtcccggcgctccccgcacccgcacggcgtcgcgtccggcagatctggtcgcagcgcctgctgcgcgtgctcgggatccgggtcgagctcgacggcccggcgccaccgccacacagcctgatcgtcgcgaaccacgtgtcatgggtcgatgttttcgcgatcaacgcccttgcgcccgctgccttcgtcgcgaaagccgaggtgcgcacctggccgctggttggctggctcgcggcgcgccacgacacgctgttcctgcgccgcggcagcgccgcagacgcgcgacgaaccgagcaggcgatcaccgcggcaatcgccgccggcgcgtgcgtcgcggtattcccagaaggcacgacgaccgacggctcgcgacttctgcattttcacgccgcgctgctgcagggcgcggtcgccgcccggcgcccggtcgtgccgctcgcgctgcgctacgaggacgcgcgagggtcgcgcagcgcggcggccgcatacgccggcgacacgacgctctggcagagcctccagtcgatcgtgcgtacatccgacctcacgctgaagctcgccagcggggcgccgctcacgaccgcgggagcggatcgcaaggccgttgcgcggcgtgcgcgcacggtcatcgccgacgcgctgttcgtcggcgaagcggatgcgatccgccacgccgcgtga

SEQ ID NO: 29438 - protein, 259 aa, Azoarcus sp. EbN1
MTVAAEVSAARRCWRLLRLAHHLLLGAAATLLVVPALPAPARRRVRQIWSQRLLRVLGIRVELDGPAPPPHSLIVANHVSWVDVFAINALAPAAFVAKAEVRTWPLVGWLAARHDTLFLRRGSAADARRTEQAITAAIAAGACVAVFPEGTTTDGSRLLHFHAALLQGAVAARRPVVPLALRYEDARGSRSAAAAYAGDTTLWQSLQSIVRTSDLTLKLASGAPLTTAGADRKAVARRARTVIADALFVGEADAIRHAA

SEQ ID NO: 29439 - DNA, 834 bp, Silicibacter pomeroyi DSS-3
  CDS (1)..(834): transl_table=11
atggctccgctctgggacagtgaggacgatcccgatccgatcgagatcggcaccatcggctggctgctggtactggcacgcggagtgccgctggcgctgctcgtctttggtgggctgatcgtgctgctgctggtgcggctggtcgagcgtccgctgtgcggcctgcaccggcccgtcacgccgcatatcacccagttcgtctgccgaaacgcctttcgcattctcggcatcgggttcgagagcagtggcgagctgatgcgcgagcatggggcggtggtggccaatcatacctcgtggctggacatcttcgcgctcaacgcgcgcaagcgggtctatttcgtctccaaggccgaggtggcgaactggcccgggatcggctggctggcacgcgccaccggcaccgtgttcatcgagcgcaatcccaaacaggcccgcgaacagacccgcattttcatggaacgtctgggggtggggcacaaacttttgttcttccccgagggcacttcgaccgacgggctcagggtgctgccgttcaagacgacgctgtttgcggcgtttttcgcgcccgagcttcggtcgaccatgtatgtgcagccggtctcggtggtgtttcacgcccccaagggccagcccgatcggttctatggctggtggggcgacatggagttcggcccccatctgctcaagacgctggcggcgcggcggcagggacgggtcgaactgatctatcacgccccggcccgggtgagcgatttcgacaaccgcaaggcgctggccgcccattgcgaagaggcggtgcgccatgcgcacagcctggcgcggctgacgccctga

SEQ ID NO: 29440 - protein, 277 aa, Silicibacter pomeroyi DSS-3
MAPLWDSEDDPDPIEIGTIGWLLVLARGVPLALLVFGGLIVLLLVRLVERPLCGLHRPVTPHITQFVCRNAFRILGIGFESSGELMREHGAVVANHTSWLDIFALNARKRVYFVSKAEVANWPGIGWLARATGTVFIERNPKQAREQTRIFMERLGVGHKLLFFPEGTSTDGLRVLPFKTTLFAAFFAPELRSTMYVQPVSVVFHAPKGQPDRFYGWWGDMEFGPHLLKTLAARRQGRVELIYHAPARVSDFDNRKALAAHCEEAVRHAHSLARLTP

SEQ ID NO: 29441 - DNA, 795 bp, Pseudomonas syringae pv. syringae B728a
  CDS (1)..(795): transl_table=11
atgagccggttgcgcggctatgcccgcgtagtccgggtgctactggtcgtagcgctcggattgacgattgccagcgcgttcgcggtcctggaacgtaccagaatcggaggttcgatggagcgcagacagcgctggagccgctggttcatggcgcgactgaccaacgccctgccgtttcgcgtcaccgtgacaggtcaactgccgacccagcccatgctgtgggtcagcaatcatgtgtcatggaccgacatcgccctgctcggcatgctcgcgccgctgtcgtttctgtcgaaggccgaagtacgcacctggccggtagcgggctggctggcgctgaaggccggtacgctgttcattcgtcgcggatcgggcgacagccgtctgatccagaagcagatgtgcaaccacctgcaacaaggcaacgcactgctgatcttccccgaaggcaccaccacggacggcaaaagcctgcgcacctttcacggtcgtctgctgtccagcgccatcgacgctggcgtgccgattcagccggtggccattggttactcgcgtgacggcaaaccggacccgatagccccgttcattggcgacgatgacctgctgtcgcatttgcgccgactgttcgccaacgagcagagcgacgtgcatattcacttgctgacaccgatcccgaccgctgaccaggaacgtgccgcactggccttcaaggcccagcaggcggttcaagtggcgttgtttggcgagccgcaggctcagccgagcgaagtggtttcgcggccggcccgagcggcctga

SEQ ID NO: 29442 - protein, 264 aa, Pseudomonas syringae pv. syringae B728a
MSRLRGYARVVRVLLVVALGLTIASAFAVLERTRIGGSMERRQRWSRWFMARLTNALPFRVTVTGQLPTQPMLWVSNHVSWTDIALLGMLAPLSFLSKAEVRTWPVAGWLALKAGTLFIRRGSGDSRLIQKQMCNHLQQGNALLIFPEGTTTDGKSLRTFHGRLLSSAIDAGVPIQPVAIGYSRDGKPDPIAPFIGDDDLLSHLRRLFANEQSDVHIHLLTPIPTADQERAALAFKAQQAVQVALFGEPQAQPSEVVSRPARAA

SEQ ID NO: 29443 - DNA, 795 bp, Pseudomonas fluorescens Pf-5
  CDS (1)..(795): transl_table=11
atgcgccggctgcgggtctacgggcgtatcgcccgagtgctgctggtggtggcgctgggcctgagcatggccagtatcttcggtttgctggaacgcttgggggtcgccaactccatggtccggcgccagcgctggtcgcgcttcttcatggcacgcttgagcaatgccctgccctttcaggtctcggtgcatggcgagctgccccgccaaccgatgctctggatcagcaaccatgtgtcctggaccgatatcccgctgctgggcatgctgacgccgctgtccttcctgtccaaggccgaagtgcgcacctggccggtggccggttggctggccgccaaggccggcagcctgttcatccgccgcggcgccggtgacagccagttgatccgcaagcagatgacccggcatttgcaggagcagcacccactgctgctgttccccgaaggcaccaccaccgatggccgtggcctgcgcaccttccacgggcgcttgctggccagcgccatcgatgccgacgtctgcctgcaaccagtggcgatccgttacctgcgcgacggccagatcgataccctggcgcccttcatcggcgacgacgatctgctctcgcacctgatgcgcctgttcgccaatgaccggggccaggtggagatccacctgctcaagccgattgcctgccagggccaggaacgtgcggcgctggccttccaggcccagcaagcagtgcagaaggcgctgttcggtgatgtcatgctgcccgccgaaccacgccgcaacggcgaactggtcgcggcctga

SEQ ID NO: 29444 - protein, 264 aa, Pseudomonas fluorescens Pf-5
MRRLRVYGRIARVLLVVALGLSMASIFGLLERLGVANSMVRRQRWSRFFMARLSNALPFQVSVHGELPRQPMLWISNHVSWTDIPLLGMLTPLSFLSKAEVRTWPVAGWLAAKAGSLFIRRGAGDSQLIRKQMTRHLQEQHPLLLFPEGTTTDGRGLRTFHGRLLASAIDADVCLQPVAIRYLRDGQIDTLAPFIGDDDLLSHLMRLFANDRGQVEIHLLKPIACQGQERAALAFQAQQAVQKALFGDVMLPAEPRRNGELVAA

SEQ ID NO: 29445 - DNA, 801 bp, Psychrobacter arcticus 273-4
  CDS (1)..(801): transl_table=11
atgagccaacccaaatcaggcttttcaatcaaacagcaattggggcgcggcaaacagattgctggcatgaccaccacgatcgctggtgggttacgcgccgcccaacgtattggggcatttaaacagccgccacgcgaaacactgccacgctatatccaagctttttgccgtaaaatggcaggctcttttggcgtcaaggttattgctgttgagcgagtagagcaacatcacgggttatgggtctctaaccatgtatcatggatggacatccctgtggtcggtacagtaagccctgccttctttttatccaaagctgaaattggtgagtggcctatctttggtaaactggcacacgcggcaggcacggtatttatcgaacgtggttccggtgatgtaggctcagtcgcctcgcaaatcgccaactttctaaccaaaggtttttcggttatcttttttcctgaagcgaccaccacagatggcaaaaaaatcaaacgtattcatggcaccttactacaagctgcaatagatgctgacgtacctgtgcgcccgctggtgattgcttatgtcaataaagatggcacgttaagtgaagcattaccctattacggcaagcttacgatgaaagacagcttaaagaaggtattagatagtaaagatgtcaccgcttacgtcttaccactagaagctatcgatcctaaaggtttgaccaaaagtcagctgacggatttattacaagcacgtatgcgagaaggcttagctgaattacattcgcgcgtattgaccaaaatagcgaaagtttaa

SEQ ID NO: 29446 - protein, 266 aa, Psychrobacter arcticus 273-4
MSQPKSGFSIKQQLGRGKQIAGMTTTIAGGLRAAQRIGAFKQPPRETLPRYIQAFCRKMAGSFGVKVIAVERVEQHHGLWVSNHVSWMDIPVVGTVSPAFFLSKAEIGEWPIFGKLAHAAGTVFIERGSGDVGSVASQIANFLTKGFSVIFFPEATTTDGKKIKRIHGTLLQAAIDADVPVRPLVIAYVNKDGTLSEALPYYGKLTMKDSLKKVLDSKDVTAYVLPLEAIDPKGLTKSQLTDLLQARMREGLAELHSRVLTKIAKV

SEQ ID NO: 29447 - DNA, 837 bp, Pseudomonas syringae pv. phaseolicola 1448A
  CDS (1)..(837): transl_table=11
atgagccgggcacgcggctatgcccgcgtagtccgggtgctgctggtcgtggcgctcggcttgacgattgccggaacgttcgcggttctggaacgcaccagaatcggtgggtcgatggagcgcaggcagcgctggagccgttggttcatggcgcgcctgaccaatgccctgccgtttcgcgtcaccgtgacaggtcagttgccaacccagccaatgctgtgggtcagtaaccatgtgtcgtggaccgacattgcactgctgggcatgctggcaccgctgtcgtttctgtcgaaggccgaagtccggacctggccggtagcgggctggctggcactggaggctggtacgctgttcattcgtcgcggatcgggcgacagccgtctgattcaaaagcagatgtgcaatcacctgcaacaaggcaacgcactgctgatcttcccggaaggcaccaccaccgatggcagaagcctgcgcaccttccacggccgtctgctgtccagtgccattgaagccggcgtaccgatccagccagtggccatcggttactcgcgtgacggcaaaccggacccgattgccccgttcattggcgacgacgatttgctgtcccatttgcgccggttgttcgccaatgagcagagcgatgtgcacattcacctgctgaccccgattccgacggcggatcaggagcgcgctgcactggcgttcaaggcccagcaagccgttcaggtggcgctgttcggtgaacctgtcacgggggagtcagtgatcggtaaacaagtatccggcgagcctgctcaaccgagcgaagtggcttcgcgctcggccagggcagcctga

SEQ ID NO: 29448 - protein, 278 aa, Pseudomonas syringae pv. phaseolicola 1448A
MSRARGYARVVRVLLVVALGLTIAGTFAVLERTRIGGSMERRQRWSRWFMARLTNALPFRVTVTGQLPTQPMLWVSNHVSWTDIALLGMLAPLSFLSKAEVRTWPVAGWLALEAGTLFIRRGSGDSRLIQKQMCNHLQQGNALLIFPEGTTTDGRSLRTFHGRLLSSAIEAGVPIQPVAIGYSRDGKPDPIAPFIGDDDLLSHLRRLFANEQSDVHIHLLTPIPTADQERAALAFKAQQAVQVALFGEPVTGESVIGKQVSGEPAQPSEVASRSARAA

SEQ ID NO: 29449 - DNA, 822 bp, Thiobacillus denitrificans ATCC 25259
  CDS (1)..(822): transl_table=11
atgaccgaggcgcctgcaaccgagtcgttgcgcgtcaccgtgcgccgcagctaccgcattctccggctgttgctgcacgtgctgtggggcgtggccctggcgggggccgtgttcccgctgctcggatcacgccagcgcgatgcgctgatcgtcggctggtcgcgccgcctgctcgcggtgctcggcgtcgaactgcgcgccggggcggtgccgcacctgtccgggggcgcgctgctcgtctgcaatcacgtgtcctggctcgacatctacctgatctacgccgcgcggcgcgtgcatttcgtctccaaggccgaggtcaggaagtggcctatcgccggctggctcgcgcacaagtcgggaacgctgtttctggaacgcagccgccgtgccgatacggcgcgcgtcaacggcgagatgcgcgcgctgatgacctcgggcgcctgggtcgccgtgtttcccgagggtacgacaagcgacggccgcggtctgcggcgtttcctgccttcgctgctgcagccggcggtcgaactgaattgcccgatcgtgcctgccgccttgcgctaccgcacgctccacggcgaacaaagcacggcaccggcctatatcgacggcgtcggcatgtggcagagcctccggcagatcgcaagcgaaccgggcctcgtcgccgagctccagttcggcgaaccgatcgcgcccgacggccatcgccgcgaactcgccgcgcaggccgagcgcgccgttgccgacctgcttggcgtcagcccgtcggcgaccgcgcctgacggcacttcaccgcgaacacctgccgatcctcgagcctga

SEQ ID NO: 29450 - protein, 273 aa, Thiobacillus denitrificans ATCC 25259
MTEAPATESLRVTVRRSYRILRLLLHVLWGVALAGAVFPLLGSRQRDALIVGWSRRLLAVLGVELRAGAVPHLSGGALLVCNHVSWLDIYLIYAARRVHFVSKAEVRKWPIAGWLAHKSGTLFLERSRRADTARVNGEMRALMTSGAWVAVFPEGTTSDGRGLRRFLPSLLQPAVELNCPIVPAALRYRTLHGEQSTAPAYIDGVGMWQSLRQIASEPGLVAELQFGEPIAPDGHRRELAAQAERAVADLLGVSPSATAPDGTSPRTPADPRA

SEQ ID NO: 29451 - DNA, 795 bp, Pseudomonas fluorescens PfO-1
  CDS (1)..(795): transl_table=11
atgagccggctgcgggtgtacgcgcggatcgcgcgagtgctgctggtggtgacgctgggcttgagcatggccagtgttttcggggttttcgaacgtctggggctggcccattcgatggagcgtcggcagcgctggtcgcggtttttcatggcgcgcctgagcaatgccctgccctttcgcgtgaccgtgcatggcgagcttccgaaacagccgatgctgtgggtcagcaaccatgtgtcgtggaccgacattccgctgctcgggatgctcacgccgctgtcgtttctgtccaaggccgaagtgcgcacctggccggtggccggttggctcgcggcgaaggccggcagtctgttcatccgtcgcggttcgggcgacagccagttgatccgcaagcagatgacccgtcacctgcaaaccgatcatccgctgctgatgttccccgaaggcaccaccaccgatggccgttcgctgcgtacctttcacggtcgcctgctgtcggcggcgattgattccgaggtgaaactgcagccggtggcgatccgttatctgcgtgagggcaagatcgattcgctggcgccgttcattggtgacgatgatctgctgtcgcacctgatgcgcctgttcagcaacgattgcggcgatgtcgagattcatctgctcaaaccgattgcctgccagggccgggaacgcgcggcgctggcgttcgaggcacaacaggcggtgcagaaagccttgttcggcgatgtgctcaaaccggtcgaagcgcaacacgcccgcgatctgatcgccgcctga

SEQ ID NO: 29452 - protein, 264 aa, Pseudomonas fluorescens PfO-1
MSRLRVYARIARVLLVVTLGLSMASVFGVFERLGLAHSMERRQRWSRFFMARLSNALPFRVTVHGELPKQPMLWVSNHVSWTDIPLLGMLTPLSFLSKAEVRTWPVAGWLAAKAGSLFIRRGSGDSQLIRKQMTRHLQTDHPLLMFPEGTTTDGRSLRTFHGRLLSAAIDSEVKLQPVAIRYLREGKIDSLAPFIGDDDLLSHLMRLFSNDCGDVEIHLLKPIACQGRERAALAFEAQQAVQKALFGDVLKPVEAQHARDLIAA

SEQ ID NO: 29453 - DNA, 741 bp, Rhodobacter sphaeroides 2.4.1
  CDS (1)..(741): transl_table=11
atggcgcttctcgtctatggcggcctcatcctcctgctgatcctgcgccagatcgagcggccgctctgcgggctcgcgcgccccgtgacgcccttcatcacgcagggcgtctgccgcggggcgctggcgatcctcggtctccgggtggtgacggaaggccgcccgatgcaggtgccgggtgcggtggtggccaaccacggctcgtggctcgacatcttcacgctgaacgcggtgcagcgggtctatttcgtctcgaaatccgaggtggcgggctggcccggcatcggctggctcgcgcgggcgacgggcacggtcttcatcaaccgcaggggctccgaggctctggtccagcagcggctgttcgaagagcggctgcgcgccgggcacaggcttctgttcttccccgaggggacgagcaccgacacgctgcgcgtcctgcccttcaagtcgacgctcttcgcggccttcttcacccacggtctcgaacatgcgctgcacatccagccggtgacggtgacctacagtgcccccgagcgcgaggatccgcgcttctacggctggtggggcgacatggatttcggcagccatctggtgaagctgctcgcggcgccccggcaggggcgggtgcggatcaccttccacacgccagtgcccgccgatgggttcgcggggcggaagggcctcgccgcccgctgcgaggcgctggtgcgcgaggccttcccgcccgagcctgtcggctga

SEQ ID NO: 29454 - protein, 246 aa, Rhodobacter sphaeroides 2.4.1
MALLVYGGLILLLILRQIERPLCGLARPVTPFITQGVCRGALAILGLRVVTEGRPMQVPGAVVANHGSWLDIFTLNAVQRVYFVSKSEVAGWPGIGWLARATGTVFINRRGSEALVQQRLFEERLRAGHRLLFFPEGTSTDTLRVLPFKSTLFAAFFTHGLEHALHIQPVTVTYSAPEREDPRFYGWWGDMDFGSHLVKLLAAPRQGRVRITFHTPVPADGFAGRKGLAARCEALVREAFPPEPVG

SEQ ID NO: 29455 - DNA, 858 bp, Burkholderia sp. 383
  CDS (1)..(858): transl_table=11
atgattgcccttcgcaagctgcgtctcgttttccacctgttgcgcggcatggcgatcgtcgcgctgcgtttctcgcacgtcacgcccgcgcggcgcgccgagatgacgcgccgctggtcgctcaagctgctgcggatctgcgggatgcgcctcgtcgtccacaacgacggcgcgcggctcgacgcgagcgcgctcgtggtcggcaatcacgtgtcgtggctcgacatctacacggtcaacgcgtggcggccgacgccgttcgtgtcgaaggccgaggtgcggcagtggccggtcgtcggctggctcgccgagaagctcgacaccgtgttcctgcagcgcgagaagcgcaccgaggcgatgcgggtcatgcacgagatggccgagcgcctgcgtaacggcgggctgatgtgcgtgtttccggaagggacgacgaccgacgggcaggaactgctgccgttccacgcgaacctgttccaggccgcggtatcggctggctgcgcggtgcagccgatctgcctgatgtatgaggacgggcagcggcggcagtcggtcgcgccggcctacacgggcgagctggcgctcggcaagtcgctcgacatggtgttgcgcggcggcccgatcgtcgcgcacctgtacgtgtgcgaaccgatcgcgccgggcggcgaccggcgggcgacgtccgccgcggcgcgcgatgcgatcgcggctgcgctcgcgacgctgcaggcgaaggtcgacaagccgacggccgagtcgcttgcggaattgcagaagcatgcttatccggcgaccgaggttggcgccggagcggcaggcggcgaggcggccgatgcgcccgtgccggggcgcgagggttga

SEQ ID NO: 29456 - protein, 285 aa, Burkholderia sp. 383
MIALRKLRLVFHLLRGMAIVALRFSHVTPARRAEMTRRWSLKLLRICGMRLVVHNDGARLDASALVVGNHVSWLDIYTVNAWRPTPFVSKAEVRQWPVVGWLAEKLDTVFLQREKRTEAMRVMHEMAERLRNGGLMCVFPEGTTTDGQELLPFHANLFQAAVSAGCAVQPICLMYEDGQRRQSVAPAYTGELALGKSLDMVLRGGPIVAHLYVCEPIAPGGDRRATSAAARDAIAAALATLQAKVDKPTAESLAELQKHAYPATEVGAGAAGGEAADAPVPGREG

SEQ ID NO: 29457 - DNA, 822 bp, Burkholderia thailandensis E264
  CDS (1)..(822): transl_table=11
atggcgcttgtcgcgctgctcttcgagcgtgtggcgcccgagcgccgccaggagatcacgcggcgctggacgttgaagatgctgcagctctgcgggatgcgactcgtcgtgcacaacgatgcggcgcggctcgatgcacgcgcgctcgttgtcggcaatcacgtgtcgtggctcgacatctacgtgatcaacgcgtggcggccgacgccgttcgtgtcgaaggccgaggtgcgcgcgtggcccgtcgtcggctggctggcggagcgcctcggcaccgtgttcatccagcgcgagaagcgcagcgaggcgaagcggatcatgcacgagctgtccgagcgtctcggcaacggcgagctgatgtgcgtgtttccggagggcacgacatccgacggcctcgggctgctgccgtttcattcgaacatgttccaggcggtggtgtcggcgggctgctcggtgcagccgatctgcctgatgtacgaggacgcgcgcgggcgacagtcggtcgcgcccgcctatgtcggcgatctgccgctcggcaagtcgctcgacatggtattggcgaacgggccgctcaccgcgcacctgtatgtaggcgagccgatcgccgcgacgggtgaccggcgcgagatggccgcgcgcgcgcgcgccgcggttgcggatgcgctcgcgcacatgcagcggaacgtcgagcgcccgctcgacgcggatctcgcgcggctcgcggccgtcgcgtactcgacgcccgaggcgccggcgggcgaacccgaagccgtgggcgagcccgaagtcggcgtcgacgcgatttcgcgccgcgaagggtag

SEQ ID NO: 29458 - protein, 273 aa, Burkholderia thailandensis E264
MALVALLFERVAPERRQEITRRWTLKMLQLCGMRLVVHNDAARLDARALVVGNHVSWLDIYVINAWRPTPFVSKAEVRAWPVVGWLAERLGTVFIQREKRSEAKRIMHELSERLGNGELMCVFPEGTTSDGLGLLPFHSNMFQAVVSAGCSVQPICLMYEDARGRQSVAPAYVGDLPLGKSLDMVLANGPLTAHLYVGEPIAATGDRREMAARARAAVADALAHMQRNVERPLDADLARLAAVAYSTPEAPAGEPEAVGEPEVGVDAISRREG

SEQ ID NO: 29459 - DNA, 774 bp, Novosphingobium aromaticivorans DSM 12444
  CDS (1)..(774): transl_table=11
ttgaacgcgacggctgatgccataagcaagccggtcatttcgctggccggccggttgcgcatcgcgcggcgactgctggcgatggttctgctgcttctggcctgcgtgccgctctactatgtctggcgcatccttcgcctgcacaacccttggccgcgcctgttcctcggcggcatcggatgggctgcgggcgcacgcgtcaaggtcgagggggcgccaagccgcaagggcgcgttcctgctcgccaaccacgtaagctggctcgacattccggtcatcgccggcgccagtggcagcgcgttcgtggcgcattccgggcttgccgggcacggcctgctcaagtggttgtgcgacatgaacgacaccgtcttcgtcgcacggcacgaccgccgttcggtccacacccaggtcgaacaggtccgcgcggccctgaccgataccggggcgctgacggtctttcccgaaggtaccaccagtgacggccgcagccttttgcctttcaaatcgtcgttgctgtccgcgctcgatcccccgccgccgggaatcgcgatccagccggtctggctggattacggaccagacgttgcagacatggcatgggtcggcgacgaacacggtctcgacaacttcctcaagatcctcgcacggcgaaagtcactgcccgtcacggtccatttccttgcgccactccagcccgaagaaaccgccagccgcaaactgatggcaactgcctcgcgtgaacggatcctcgccgcgatgggccgcaacaggtag

SEQ ID NO: 29460 - protein, 257 aa, Novosphingobium aromaticivorans DSM 12444
MNATADAISKPVISLAGRLRIARRLLAMVLLLLACVPLYYVWRILRLHNPWPRLFLGGIGWAAGARVKVEGAPSRKGAFLLANHVSWLDIPVIAGASGSAFVAHSGLAGHGLLKWLCDMNDTVFVARHDRRSVHTQVEQVRAALTDTGALTVFPEGTTSDGRSLLPFKSSLLSALDPPPPGIAIQPVWLDYGPDVADMAWVGDEHGLDNFLKILARRKSLPVTVHFLAPLQPEETASRKLMATASRERILAAMGRNR

SEQ ID NO: 29461 - DNA, 780 bp, Methylobacillus flagellatus KT
  CDS (1)..(780): transl_table=11
ttgcctgaaaaaaagacgcccctgcccatacagctattccgcctgacgcgcctggtgctgcatacactctacggtatcaccgtcgcagcgaccatcctgccgcgagtcagtgctgcaacccgcgaccagatcatccgtggttggagcaggcagctgcttggcattctcaacatacaagtgattgccaagagccatatcccaggagaagatgtgcgtagcgtgatgtttgttgccaaccacatctcctggcttgacatctatgcactcaacagcatccgcacagtacgcttcattgccaaatcggacattcgctcctggccggtgcttggctggctggtcgcccaggcaaacacactattcattgatcgcgaaaaaaaacaggatgtcagccgtatggttgaaacagtggcaaaaagcatcatggccggtgactgcctatgctactttcccgaaggcacaacgacagacggcactgaattgaggcccttcaagggtagcctgatgcaggctgcgattgatacgaacacggccattcgccccgtgttgatccgttaccccaaaccggatggcagtatcaataccgccatggcctaccatggagaaaccacactctggcaatcccttcgtagggtattggcacaaccacggtcaacggtagaactggatttcgccccgcccatcgcgagcacaggacatgaaagacgcggtttgtgcctcatggcaagacaatcgattgccgccaggctgaacctgggctcaccggaagagagggagccctga

SEQ ID NO: 29462 - protein, 259 aa, Methylobacillus flagellatus KT
MPEKKTPLPIQLFRLTRLVLHTLYGITVAATILPRVSAATRDQIIRGWSRQLLGILNIQVIAKSHIPGEDVRSVMFVANHISWLDIYALNSIRTVRFIAKSDIRSWPVLGWLVAQANTLFIDREKKQDVSRMVETVAKSIMAGDCLCYFPEGTTTDGTELRPFKGSLMQAAIDTNTAIRPVLIRYPKPDGSINTAMAYHGETTLWQSLRRVLAQPRSTVELDFAPPIASTGHERRGLCLMARQSIAARLNLGSPEEREP

SEQ ID NO: 29463 - DNA, 879 bp, Burkholderia xenovorans LB400
  CDS (1)..(879): transl_table=11
atgaagctcgcgttacgcaaggcccgtctcgtcgttcatctgctgcacggcatgtggaccgtggcgacgcgctttcccaaagccagcgcggacgtgcgccacacgctcaaccgcgaatggtcgctgaaaatgctgcgcctgtgcggcatgcggctcgtcgtgcataacgacagcgcgcggctcgatcgcggcgcgctggtggtcgccaaccacatctcgtggatcgacatctacgtgatcaacgcgtggcggcccacgccgttcgtctcgaaggccgagatccggcaatggccggtggtcggctggctcgcgcagcaactggacacggtgttcattcagcgcgagaagcgcagcgacgcgaagcgcatcatgcatgaactgtccgaccgcctgggcgcgggcgagttgatgtgtgtgtttcccgagggcaccacgtccaatggtctcgcggtgttgccgtttcacgcgaacatgtttcaggcggccgtgtcggcgtccgtgccggtgcagccgctgtgcatcatgtatgaggacgcgcagggccggcaatctaccgcgccggcttatatcgacgatctgtcgctcgccgattcgctgaatctgctgctgcgcggcggcccgctgaccgcgcatgttcatgtcggtgcgccgctggcgccgggcgcggaccggcgtacgctggcggcggaagcggaaggcgtgatcgtggccgcgttacggcagatgcaaagcggcagcgcgattagcggtgcggtcatggccgggcaggccgccacgcccgcgcccacggccacgcggatcgaaccggccaaccaggccggccaggcgggtcaggtggatgaggtcgatcagatcgatcagtcagggcgatcggcctag

SEQ ID NO: 29464 - protein, 292 aa, Burkholderia xenovorans LB400
MKLALRKARLVVHLLHGMWTVATRFPKASADVRHTLNREWSLKMLRLCGMRLVVHNDSARLDRGALVVANHISWIDIYVINAWRPTPFVSKAEIRQWPVVGWLAQQLDTVFIQREKRSDAKRIMHELSDRLGAGELMCVFPEGTTSNGLAVLPFHANMFQAAVSASVPVQPLCIMYEDAQGRQSTAPAYIDDLSLADSLNLLLRGGPLTAHVHVGAPLAPGADRRTLAAEAEGVIVAALRQMQSGSAISGAVMAGQAATPAPTATRIEPANQAGQAGQVDEVDQIDQSGRSA

SEQ ID NO: 29465 - DNA, 837 bp, Ralstonia metallidurans CH34
  CDS (1)..(837): transl_table=11
atgatctggttacgcaaggcgcggctgacatttcacctgctgcgtggggtgctgttctgtgccactgtctttccgtgggcgagcgcgcgtctgcgcgaacgtctgatccgagcatggtcccgcaagctcctggccatctgcggcatcgaggtggaagtcttgggcctggcgccagggcaggcggcccccaaaggcgcaatgctggtgtcgaaccatatctcgtggctcgacatctatgtcatccatagctggcagcccgtgcgcttcgtcgccaagtcggagatccgcaactggcccgtagttggctggctgtgcgacaagaccggcacgatctttatcgagcgcgcccgcaagcgcgacgcgcaccgagtgctccaccacatcaccgaagtgatgcagcaaggcgacctggtgtgcgtgttccccgagggcacgaccaccgatggcagcaaggtgctgccgtttcacgcgaatttgatgcaggcgccagtggccgggaaactgccggtgcagccggtagggttgtcctacctggacgcggcaactggcaagccgacgctggcaccggcctacatcgacgacatatcgctggtgcagtgcctgaacgctattctcaagtcgccaccgatcaaggcgaggctggtgatcgggccgcagttgcatgctgcatcagccggacgaagggagctggcggagtcggcgcgggaggtggtgacgcatctggtggagggcgcgcatgaggcggcccacggtgctgccgaggcatttcattccctgccagtcgcggcaacgccgccggtcctgacgtcggtcgccgcgcctgccgcaggccactga

SEQ ID NO: 29466 - protein, 278 aa, Ralstonia metallidurans CH34
MIWLRKARLTFHLLRGVLFCATVFPWASARLRERLIRAWSRKLLAICGIEVEVLGLAPGQAAPKGAMLVSNHISWLDIYVIHSWQPVRFVAKSEIRNWPVVGWLCDKTGTIFIERARKRDAHRVLHHITEVMQQGDLVCVFPEGTTTDGSKVLPFHANLMQAPVAGKLPVQPVGLSYLDAATGKPTLAPAYIDDISLVQCLNAILKSPPIKARLVIGPQLHAASAGRRELAESAREVVTHLVEGAHEAAHGAAEAFHSLPVAATPPVLTSVAAPAAGH

SEQ ID NO: 29467 - DNA, 861 bp, Silicibacter sp. TM1040
  CDS (1)..(861): transl_table=11
atgagtgtcagctggcagagcgagacgccccccgagaagacccggatcacggcgcttggttggggcagggtggtgctgcggggcagtgcgcttgcggtgcttgtttttggctgtctggcgctgttgctgatggtccgtctcgttgagcgcccgctttttggggttcagagaccgctgacgccgttcatcaccgtgtttgtgtgccgcaacgcctttcgcattcttggcatgcggtttcacacccgtggccgcagcatgcgcgcaccgggaattgtggtggcgaaccattcgtcctggctcgacatttttgcgctgaacgccaagaagcggatttattttgtttcaaagtccgaggtcgcgggctggcccggcatcggctggctggcgcgggcgacggggaccgtgttcatcgaacgcaaccgagccaaggcccaagagcaaaaggcgctgtttgccgcacgcctcaaggccgggcacaagctgttgttttttcccgaaggcacctctaccgacgggctgagggtcttgccgttcaagaccacgctgtttgcctccctctttgaagatgatctgcgtgaagagatgcatgtgcagcctgtctcggttgtctttgatgcccccaaaggcgccgagcgccggttttatggctggtggggcgacatggactttggctcgcatcttctaaaagtgcttgcggcgcagccacagggcggggtggagatcctttatcatccgccggttcgggtggcggattttgccgatcgcaaggcgttggcggcctattgcgaagaagtggtgcgcgacggacatgcctctgcgctgcctctggtggtcgacgcggtagccaaagatcacccctga

SEQ ID NO: 29468 - protein, 286 aa, Silicibacter sp. TM1040
MSVSWQSETPPEKTRITALGWGRVVLRGSALAVLVFGCLALLLMVRLVERPLFGVQRPLTPFITVFVCRNAFRILGMRFHTRGRSMRAPGIVVANHSSWLDIFALNAKKRIYFVSKSEVAGWPGIGWLARATGTVFIERNRAKAQEQKALFAARLKAGHKLLFFPEGTSTDGLRVLPFKTTLFASLFEDDLREEMHVQPVSVVFDAPKGAERRFYGWWGDMDFGSHLLKVLAAQPQGGVEILYHPPVRVADFADRKALAAYCEEVVRDGHASALPLVVDAVAKDHP

SEQ ID NO: 29469 - DNA, 789 bp, Mesorhizobium sp. BNC1
  CDS (1)..(789): transl_table=11
atgctcggcaagctccgcctgatcggaaggatactgctcgttgccggctacacgccgccgcttatcctgatacaggaattggcgctgcgcacccggtggtggagcgatcgtgtggcgcctcgcctttggcacaggctcacgcttaaagtgctggggatcagggttcaggtaaagggtgcgcccacggcggagcgtccgctgcttctcgtttccaatcacgtatcgtggaccgatatacttgtgctgggctccatcaccggcgtgcatttcgtcgctaaggccgaaatgcgaggctggccggtgctcggcactttcgcccgccttcaacgctcggtattcgtcgaccgggagcgcaagcgaagcgctcccgagcaagcgcgcgaaatcgcctcgcggctggcggacggcgatccgatggtgcttttcgccgaaggcacgactggcgacgggaccagcgttctgccgttcaaaagcaccctttttggcgcggcctatatggcgctcggtcaggcaaagagcagccaggtcattgtacagcccgtggccatcgcctatctgcgccggagcgggctgccgcttgaccggcgtgagcgcggggcgctcgcctggatcggcaacatggatttcgtgccccatcttttggcgttgcttcgcctcaaggccatcgacgtagaagtccatttcggggaatccatctccttttccgcggacggggacaggaaagcgttggcacgcacagccgaggcagaggtgcggcgcatgctggtcggcgcattgcgtcagcggtga

SEQ ID NO: 29470 - protein, 262 aa, Mesorhizobium sp. BNC1
MLGKLRLIGRILLVAGYTPPLILIQELALRTRWWSDRVAPRLWHRLTLKVLGIRVQVKGAPTAERPLLLVSNHVSWTDILVLGSITGVHFVAKAEMRGWPVLGTFARLQRSVFVDRERKRSAPEQAREIASRLADGDPMVLFAEGTTGDGTSVLPFKSTLFGAAYMALGQAKSSQVIVQPVAIAYLRRSGLPLDRRERGALAWIGNMDFVPHLLALLRLKAIDVEVHFGESISFSADGDRKALARTAEAEVRRMLVGALRQR

SEQ ID NO: 29471 - DNA, 798 bp, Rhizobium leguminosarum bv. viciae 3841
  CDS (1)..(798): transl_table=11
ttgatcgcctggctgcgcatcgccttcgccgcggtcgtcatccttgccgtcagcatcgtgctcatgccgctgcaggtattggcgctgcggttcgactggcggctgcggcgccggcttccgcgcgcttggcaccggatcgtctgctattgcctcggcatccgcgtccgcgtgagcggcaagctggaagatcgccggccgctgatgctctgttccaaccattcctcctggctggatatcatggtgatgtcggccgttgccgacgtcgtcttcatcgccaagatcgaggtgcgcgaatggccgatcttcggcacgctcgccaagctgcagaagagcgtcttcgtcgtgcgcgaggagcggcgcaagaccggtcatcaggcaaatgagatcgccgggcgaatggccgacggtgagatcgtcgtgctcttccccgagggcacgacctcggatggcaaccggctgctggaggtcaagtcctcgctattcggtgccgccgcgatggccgtgccttattcgccgacgggaacggtcgtggtgcagccggtggcggttgcctataccagggttcacggcatcgccatggggcgttatcaccggccgctcgccgcctggccgggtgatatcgagctgctgccgcacctcctcgacatcgtgcgctgcggcgccatcgacgccgaggtttccttcggcgaggcggtggattaccgcgccgagaccagccgcaaggaggtgagcgcaacgatctccttgcgcatccgcaacctcctgaacagccgcctgcgcgggcgggaaatctcttag

SEQ ID NO: 29472 - protein, 265 aa, Rhizobium leguminosarum bv. viciae 3841
MIAWLRIAFAAVVILAVSIVLMPLQVLALRFDWRLRRRLPRAWHRIVCYCLGIRVRVSGKLEDRRPLMLCSNHSSWLDIMVMSAVADVVFIAKIEVREWPIFGTLAKLQKSVFVVREERRKTGHQANEIAGRMADGEIVVLFPEGTTSDGNRLLEVKSSLFGAAAMAVPYSPTGTVVVQPVAVAYTRVHGIAMGRYHRPLAAWPGDIELLPHLLDIVRCGAIDAEVSFGEAVDYRAETSRKEVSATISLRIRNLLNSRLRGREIS

SEQ ID NO: 29473 - DNA, 777 bp, Pseudomonas aeruginosa UCBPP-PA14
  CDS (1)..(777): transl_table=11
atggcgcggctgcgcctgctgctgcgcagcgcccgcctgctcgggctggtcgcgctcggactgggcctggccgcttgggtcagcctgcgcgagcggctgcccggcgccgacgtcacgccgctgcgccagcgcctgacccgctggtggctggcgcgcctctgcgcggccctgcccttcgaggtcagggtcagcggcgaagcgccccggcaacccatgctgtgggtagccaaccatgtgtcctggaccgatatcccgctgctcggcgccctggcgccgctgaccttcctgtccaaggccgaggtgcgtgcctggccgctggccggctggctggcggaaaaggccggcaccctgttcatccgccgcggctcgggcgacagccggctgatcaaccagcgcttggccgaacagctgcaccgcggacgcaacctgctgatcttcccggaagggaccaccaccaacggcgaaagcctgcgcaccttccacggtcgcctgatggccagcgccctggaagccggcgtggcggtgcagccggtggcgatcagctaccgccgcgacggcgtgcccgatgcgcaggcgccgttcatcggcgacgacgacctgctcagccacctcggccgcctgctgcgcggcgagcgcggcagcgtgcatatccaactgctggaaccgatccccagccagggcctggaccgcgccgaactggcccgccaggcccagcaggcggtgcgcctggcgctgttcggcactgccgcccctacgcaaacccggcgcgccgcctag

SEQ ID NO: 29474 - protein, 258 aa, Pseudomonas aeruginosa UCBPP-PA14
MARLRLLLRSARLLGLVALGLGLAAWVSLRERLPGADVTPLRQRLTRWWLARLCAALPFEVRVSGEAPRQPMLWVANHVSWTDIPLLGALAPLTFLSKAEVRAWPLAGWLAEKAGTLFIRRGSGDSRLINQRLAEQLHRGRNLLIFPEGTTTNGESLRTFHGRLMASALEAGVAVQPVAISYRRDGVPDAQAPFIGDDDLLSHLGRLLRGERGSVHIQLLEPIPSQGLDRAELARQAQQAVRLALFGTAAPTQTRRAA

SEQ ID NO: 29475 - DNA, 792 bp, Azoarcus sp. BH72
  CDS (1)..(792): transl_table=11
gtgcggctggctctccacatcctgcagggcgtcctgacgatcgcgctgctctacccgttctgcgccccggcgcggcagcgcaacctgcgccagcgctggtcgcgccggctgctgcgcacggtgggcgtggaggtgcgtatcgagggcgccgcggttgcgccgggcgcactgctggttgccaatcacatctcgtggctggacatctacgccatcaacagcctgaccccatcggccttcgtatcgaaggcggaagtgcgcgactggccggtgatcggctggctcgcggcgcgcagcgaaacggtattcctgcgccgcggcagccgcggccacgcgcgcatcatcaatggcgaaatcgcggcgctgctggatgcgggccggaacgtggcgatctttcccgaaggcaccaccagcgacggcaaccgcgtgctgcctttccacgccgcgctgctgcaggccgcggtggaatccgcccacccggtgcagccggtggcggtgtcgtatcacgacgccgacggcaggcgcaccaccgcggcggcttacgacggcgagctgagcctgggcgcctgccttggcaacatcgtgtcgcaccgccggctgcaggtccgcatccgggtgggcgcggcgatcgacaccgccggcgcggaccgcaagacggtgtgccgggacgcgcgcgcggcgatcgttgcgctgtgcgggctgacggaagccggcacagagatggaacgcaagacgggcgccgcggcaatgccggcgacccccgccgcggcacaggaagcggtacaggtacgctga

SEQ ID NO: 29476 - protein, 263 aa, Azoarcus sp. BH72
MRLALHILQGVLTIALLYPFCAPARQRNLRQRWSRRLLRTVGVEVRIEGAAVAPGALLVANHISWLDIYAINSLTPSAFVSKAEVRDWPVIGWLAARSETVFLRRGSRGHARIINGEIAALLDAGRNVAIFPEGTTSDGNRVLPFHAALLQAAVESAHPVQPVAVSYHDADGRRTTAAAYDGELSLGACLGNIVSHRRLQVRIRVGAAIDTAGADRKTVCRDARAAIVALCGLTEAGTEMERKTGAAAMPATPAAAQEAVQVR

SEQ ID NO: 29477 - DNA, 741 bp, Acidovorax sp. JS42
  CDS (1)..(741): transl_table=11
atgctgcggggattacgggcctgctggcgggtgttgcggctggtgctgcacgctgcacaggggctgctggtggtggcgtggcgcttcccccgcctatcggtggagcagcagcaggcgcgggtgcaggcgtgggcgctgggcctgctggcctgcgcgggggtcacgctggaggtgcgcggcaccccgccgagccaggggccggtgctgctggtggccaaccatctgtcctggctcgacatcccggtgatgcatgcggcgcgctactgccgcttcatctccaagtccgacgtgcaggcctggcccatcgtcggcacgctcgccacggcagcgggcacgctgtacatcgagcgcgcgtcgcggcgcgatgccctgcgcatggtgggcagcatgcgggatgccctgttgcggggcgaaatactggcggtgtttcccgaaggcacgaccggcgacgggcgcacgctgctgccctttcaccccaacctgttgcaggctgcactgcaggcggacgtgcccgtgcagcccatcggcctgcgcttcgtggaccgcgcaagcggccagaccacccacgccccgagctacatcggcgacgaaacgctggtgggctccatctggcgcacgctcaccgcgccgcccatcacggcggtggcgcatttcggcatgcccgagcgtgcgcaggggcgcgaccgccgggtgtggggccaggcattgcatgccgcagtggacgatctgcgccagcgctga

SEQ ID NO: 29478 - protein, 246 aa, Acidovorax sp. JS42
MLRGLRACWRVLRLVLHAAQGLLVVAWRFPRLSVEQQQARVQAWALGLLACAGVTLEVRGTPPSQGPVLLVANHLSWLDIPVMHAARYCRFISKSDVQAWPIVGTLATAAGTLYIERASRRDALRMVGSMRDALLRGEILAVFPEGTTGDGRTLLPFHPNLLQAALQADVPVQPIGLRFVDRASGQTTHAPSYIGDETLVGSIWRTLTAPPITAVAHFGMPERAQGRDRRVWGQALHAAVDDLRQR

SEQ ID NO: 29479 - DNA, 810 bp, Magnetospirillum magnetotacticum MS-1
  CDS (1)..(810): transl_table=11
atgatctccactcccatcgccattttgcgcttcctcggcttcgtgctgtggaccctgctcctgctgccgccctttctggtgctgcgccttgcggcgcgtccgcgcatgccgacttacacccgcttctactggaagggagtcatggccatcatcggctatgacgtggtggtccatggccgcccgctggaagacggatcaccggtgctttacgtggccaaccacgccagctatctcgacatcatcgtgttgggcagcctgctgcatgcctatttcgtcgccaagaacgaggttgcgggctgggccggtttcggcttcctggcccgcatttcgcgcaccgtgttcatcgagcgcagccgcggcgccacggcgcgggaaaagaacggcctgctcgaccgctttgatctgggcgagtcgctgatcctgttcgccgagggcacgtcgaacgacggcaatcacgtcatgccgttcaaaagctcgttcttctcggtggcagaaggcgaggtgcggggcgccgacgggatgccgcgcgccgtttcggtgcagccagtctcggtggcctatgccaggctggacggcctgcccatcacccgcgcgcttcgcccctttctggcctggtacggcgatatgaccctggccgggcatctggtgggcgcgctgggcatgggacgcatcaccgtggaggtggagttccatccgccggtcaccgtagccgaattcggctcgcgcaaggtgctgtcggcccattgccacaaggtgatcagccacggtgtgacccgccttctggccgggcgccctgctgcgaatccttga

SEQ ID NO: 29480 - protein, 269 aa, Magnetospirillum magnetotacticum MS-1
MISTPIAILRFLGFVLWTLLLLPPFLVLRLAARPRMPTYTRFYWKGVMAIIGYDVVVHGRPLEDGSPVLYVANHASYLDIIVLGSLLHAYFVAKNEVAGWAGFGFLARISRTVFIERSRGATAREKNGLLDRFDLGESLILFAEGTSNDGNHVMPFKSSFFSVAEGEVRGADGMPRAVSVQPVSVAYARLDGLPITRALRPFLAWYGDMTLAGHLVGALGMGRITVEVEFHPPVTVAEFGSRKVLSAHCHKVISHGVTRLLAGRPAANP

SEQ ID NO: 29481 - DNA, 855 bp, Sulfitobacter sp. EE-36
  CDS (1)..(855): transl_table=11
atgagcgcggcctgggacagcgccgaccacccgacactagtatccgtcgggccccttggctgggtgctgatgctgctgcgaggggtggtgctggcgacggtggttcttgtggggctggtgatcctgctcgcgatccgcttgatagagcgtccgctatatgggcagggccggcccgtgaccccgcatatcacccagatcgtctgcaaaatcgcattctggatcatggggttacgccgcgcggttgtcggcaccccgatgcgccacaggggcgctgtcgtcgccaatcacaccagttggcttgatatcttcagcttgaacgcggcgcagcggatatactttgtgtccaaatccgaagtcgccagctggcccggcattggctggctcgccaaggcgacgggcacgttgttcatcgaacgcaacccgaaacacgcgcgcaaacagaccgaggtgttccagcagcgcttgctcgacaaccaccggctgttgttcttccccgaaggcaccagcaccgatggcctgcaggtcttgccgttcaagaccacgctcttccagtccttcttcgcgcccgaactgcgcgacgtgatctgggtgcagcctgtgaccgtgctctataccgcgcccgatgggaccgatccgcggttttatggttggtggggcgacatgagctttggcggccatctgctgcgcaccttggcgtccctgcggcaggggcaggtgacgacgatctatcacacgccgctggccgtcgccgatttcgagaaccgcaaagccctggcccaagcctgtgaagcacaggtgcgcgcggcccatccctcgggcgggattgcagcgccaaaccccgctgaattgcgctga

SEQ ID NO: 29482 - protein, 284 aa, Sulfitobacter sp. EE-36
MSAAWDSADHPTLVSVGPLGWVLMLLRGVVLATVVLVGLVILLAIRLIERPLYGQGRPVTPHITQIVCKIAFWIMGLRRAVVGTPMRHRGAVVANHTSWLDIFSLNAAQRIYFVSKSEVASWPGIGWLAKATGTLFIERNPKHARKQTEVFQQRLLDNHRLLFFPEGTSTDGLQVLPFKTTLFQSFFAPELRDVIWVQPVTVLYTAPDGTDPRFYGWWGDMSFGGHLLRTLASLRQGQVTTIYHTPLAVADFENRKALAQACEAQVRAAHPSGGIAAPNPAELR

SEQ ID NO: 29483 - DNA, 837 bp, Roseovarius nubinhibens ISM
  CDS (1)..(837): transl_table=11
gtgaatgtgacctgggacgggggcggcgacgagacgcctgtccggatcagcgcggcgggctggctgcgggttgggctgcgggcgctggcgctgagcaccatcttgctggccggggtgatcgtgaagctgctgctgcggctggttgagtacccgatttttcgcgagaaacgcccgataaccccttgggtgacaaggacagtgtgccgtcaggcgctctgggtgatcgggctgcggctgcgggtcattgggcggccgatgaagatgcgcggggcatgggtggctaaccatgcgtcatggctcgatattttcgtgctgaatgcggtcaagtcggtctatttcgtgtccaaggccgaggtggcgggatggccggggatcgggttcctggcgaagatcaccgggacggtgtttatcgcgcgcgatccgcggcaggcgaaggcgcagacggcgctgttcgttgagcggctccgggcggggcatcggttggtgttttttcccgaaggcacctcgacggatgggttccgggttttgcctttcaaaacaacgctctttcagtcgttctttaccgaggaattgcgcggagaaatggccattcagccggtcagcgtggtctatcatgcgccggagggcgaagacccgagattctatggctggtggggcgatatgagctttggcgcgcatctgctcaagaccctgtcggcggggcggcggggacgggtcgagctgcgctatcacagccctgtaaaattggcggatgcggtggatcgcaaggcgctggcgcgggagctggaagaggcggtgcgcggcggcatgcccgaggcgcggcgggtcgcgagctag

SEQ ID NO: 29484 - protein, 278 aa, Roseovarius nubinhibens ISM
MNVTWDGGGDETPVRISAAGWLRVGLRALALSTILLAGVIVKLLLRLVEYPIFREKRPITPWVTRTVCRQALWVIGLRLRVIGRPMKMRGAWVANHASWLDIFVLNAVKSVYFVSKAEVAGWPGIGFLAKITGTVFIARDPRQAKAQTALFVERLRAGHRLVFFPEGTSTDGFRVLPFKTTLFQSFFTEELRGEMAIQPVSVVYHAPEGEDPRFYGWWGDMSFGAHLLKTLSAGRRGRVELRYHSPVKLADAVDRKALARELEEAVRGGMPEARRVAS

SEQ ID NO: 29485 - DNA, 834 bp, Oceanicola batsensis HTCC2597
  CDS (1)..(834): transl_table=11
atgacctggaacccggacgcggtcggtatcgaccaggcgcctcatggctgggcgacgctggtgcggttctggctgcgcgcgatcccgttcggcatcgtctgcttcggcagcctgggcatcctgctgatcctgcggcagccggagcggtggatctacgggatgcgccgtccggtgacgccctacctcacgcagttcgtctgccgcatgttctttgccatttccggcctgcgcctgcgagtgaccgggcggccgatgaccgatcacggcgccatcgtgtcgaaccatgcctcctggaccgacatattcgccctgcatgcggccaagcgcgtcttcttcgtctccaaggccgaggtgcgcggctggttcggcatcggctggctggcgcgggccaccggcacgatcttcatcaaccgggtgcggggcgaggcgaaacggcagcagcaatacctgagcgaacggctggccctgggccacaagctgctgttctttcccgagggaacctcgaccgacgcgatgcgcgtcctgccgttcaagaccacgctgttcgcggcgttcttcgaggcggacttacaccgtaacctgaagatccagccggtcaccgtgatctaccgcgccccgcccgacaaggcgccgaccttctacggctggtggggcgacatgagctttggctggcacctcgtgcaggtcctgggcgccagtccccagggggcggtcgaggtgatctaccatccgcccgtcaaggtcgcggactatcccgaccgcaaggccctggcccgcgcctgcgagaggatcgtacgggacggcatgccggccgagcggcaaatctcagggtga

SEQ ID NO: 29486 - protein, 277 aa, Oceanicola batsensis HTCC2597
MTWNPDAVGIDQAPHGWATLVRFWLRAIPFGIVCFGSLGILLILRQPERWIYGMRRPVTPYLTQFVCRMFFAISGLRLRVTGRPMTDHGAIVSNHASWTDIFALHAAKRVFFVSKAEVRGWFGIGWLARATGTIFINRVRGEAKRQQQYLSERLALGHKLLFFPEGTSTDAMRVLPFKTTLFAAFFEADLHRNLKIQPVTVIYRAPPDKAPTFYGWWGDMSFGWHLVQVLGASPQGAVEVIYHPPVKVADYPDRKALARACERIVRDGMPAERQISG

SEQ ID NO: 29487 - DNA, 942 bp, Xanthobacter autotrophicus Py2
  CDS (1)..(942): transl_table=11
gtgacgccggcccgcgagccggcgggcgaggccacgcgcctgccccttgaattcggcggccttgagcccctggggccagagcagccggcggtctcgcggtttctcgatcgcctgagggcggcggctgtgctggtcccggtggcagtggtgacggcggtcggcattcccctgcaatggctgtcgctcaagctctccctgcccacgcgccgcagcatcccgcagctttaccaccgcatcctcctcaagttcatcggagtgcgggtgacggtgaagggggcgccggcggccgaccggccgttgctcatcctcgccaaccattgctcctggatcgatattccggtgatcgggtcgcttacgcccctcgtcttcgtggcgaagagcgaggtggggcgctggccgctcatcggacttctggcgaagttccagcgcacggtgttcgtggatcggcagcgccggcacgccaccggcgaagtcaaccgcaccatcgccgagcgcctccaggacggcgacccggtggtgctgttcgccgagggtacttccagcgacggcaaccgcgtgctgccgttccgcacggcgctggtgggtgcggtgcgcgaagccatcgctgatggcgccgaggtgacggtgcagcccctcgcggtgtcctatgtgcgtcttcagggcctgcccatggggcgccttcaccgtcacatcgccgcctggtatggcgacatggatctggtgccgcacctgctggaggtgctgtgccacggctccatcgacgtggaggtctccttcggcgagccggtgcggctcgacgaggcccacgaccgcaagaccgtcacccgccagtgcgaggaggcggtgcggctcatgagcgtggaagctctcaccggccgcccgcccgactcgggcgaggatgaatctcacgttgctccggttctggtgtcccctgtttcatga

SEQ ID NO: 29488 - protein, 313 aa, Xanthobacter autotrophicus Py2
MTPAREPAGEATRLPLEFGGLEPLGPEQPAVSRFLDRLRAAAVLVPVAVVTAVGIPLQWLSLKLSLPTRRSIPQLYHRILLKFIGVRVTVKGAPAADRPLLILANHCSWIDIPVIGSLTPLVFVAKSEVGRWPLIGLLAKFQRTVFVDRQRRHATGEVNRTIAERLQDGDPVVLFAEGTSSDGNRVLPFRTALVGAVREAIADGAEVTVQPLAVSYVRLQGLPMGRLHRHIAAWYGDMDLVPHLLEVLCHGSIDVEVSFGEPVRLDEAHDRKTVTRQCEEAVRLMSVEALTGRPPDSGEDESHVAPVLVSPVS

SEQ ID NO: 29489 - DNA, 834 bp, Oceanobacter sp. RED65
  CDS (1)..(834): transl_table=11
atgcggataattcgttgtcttttggctccacttaagctcttgagcatcttggtactactgatcaccttgttgctcactctcattatcatttatctttgtgttggcaatagtcaacgccgtcaagaatggatgcaaaacagtaagtcctttatttgtcagcgtttgctcagcgtattgaacattcgtattcaacgcattggacaagctgatccacaagcaaaactctgggttgctaatcacatctcttggctcgatattctgatgttcacctcgctcaaaaagatgcacttcattgccaagtctgaggttcgatcttggccacttgtggggttcgtcacgagcttattggggaccgtgttcattcgccgtcacaacaagtttcaggtctatcgctccttaccgcgggcacagtcgattattagtaagcaagaacgtttatttgtatttccagaaggtacaaccagtagtggccgaaaaaccgaatttttctaccctatgatgtttgaaatcgcagtgcgtgaacgaactcgcgtacaacctatcgccctgcgctattggaatgccgatgataaaccttgtgactctgcaccgtttgtagacgatgatggcattgtcgggaatattctagaactagctcgacaaaagcatactctggtggaggtatattatttaccgagtttagatggggaaaccatggaccgaaaacagcttgcacaaaccagtcaggccaatatcgatcgcattttaaaacgccaacatccctattatagttacgatgacttgtcggcttttgaatctgaaagcaacccaaattcaaaatatgagttagaatag

SEQ ID NO: 29490 - protein, 277 aa, Oceanobacter sp. RED65
MRIIRCLLAPLKLLSILVLLITLLLTLIIIYLCVGNSQRRQEWMQNSKSFICQRLLSVLNIRIQRIGQADPQAKLWVANHISWLDILMFTSLKKMHFIAKSEVRSWPLVGFVTSLLGTVFIRRHNKFQVYRSLPRAQSIISKQERLFVFPEGTTSSGRKTEFFYPMMFEIAVRERTRVQPIALRYWNADDKPCDSAPFVDDDGIVGNILELARQKHTLVEVYYLPSLDGETMDRKQLAQTSQANIDRILKRQHPYYSYDDLSAFESESNPNSKYELE

SEQ ID NO: 29491 - DNA, 789 bp, Pseudomonas putida GB-1
  CDS (1)..(789): transl_table=11
atgccgaagttgcgggtgttggcccgcctgactcgactgctgctggtactggcgctgggcatgctgatggccagcatgattgccttgagcgagcgactgggcttcaagacgccgatcgagcgccgtcaacgctggacctgcctgttcatgaagcgcttggtcgctgccctgcccttcgacgtgaaagtcatcggcgagctgccgcagcggccgatgctgtgggtcagcaaccatgtgtcctgggccgacatccctctgctgggcatgctgatgccgctgtcgtttctgtccaaggccgaagtgcgccactggccggtggccggctggctggcggaaaaagccggcacgcttttcattcgtcggggcggtggcgacagccagcgcctgcgcgaacagatcgccgggcagttgggcctggctcgaccgctgctgatcttccccgaaggcaccacgaccaacggtcgcaccttgcgcaccttccatggccgcctgctggccggagccatcgaccgaggtgtggcggtgcagccggtggctatccagtatttgcgcgatggccagctcgatccgattgcgccgttcatcggtgatgacgacctggtatcgcacctgatgcgcttgtttgcccaaccgcgggccgaggtgtgcattcacctgctgcagccgattggtagtgtgggcaaggaacgtgcggtgctggcgttgcaggcacagcaggcgatccatttggcgttgttcggggttgaagaagttgagctggcgccacggcggcaggcacgggctgcctga

SEQ ID NO: 29492 - protein, 262 aa, Pseudomonas putida GB-1
MPKLRVLARLTRLLLVLALGMLMASMIALSERLGFKTPIERRQRWTCLFMKRLVAALPFDVKVIGELPQRPMLWVSNHVSWADIPLLGMLMPLSFLSKAEVRHWPVAGWLAEKAGTLFIRRGGGDSQRLREQIAGQLGLARPLLIFPEGTTTNGRTLRTFHGRLLAGAIDRGVAVQPVAIQYLRDGQLDPIAPFIGDDDLVSHLMRLFAQPRAEVCIHLLQPIGSVGKERAVLALQAQQAIHLALFGVEEVELAPRRQARAA

SEQ ID NO: 29493 - DNA, 795 bp, Pseudomonas fluorescens
  CDS (1)..(795): transl_table=11
atgagtcggttgcgggtgtacgcgcgtatcgcgcgagtgttgctggtggtgatgctgggcctgagcatggccagcgtcttcggtctgttcgaacgcctgggtatcgccaactcgatggtccgtcgccagcgctggtcgcggttcttcatggcacggctgagccgtgccctgcccttttcagtcaccgtccacggtcaactgccacaacggccgatgctgtgggtcagcaaccacgtgtcctggaccgacatcccgttgctgggcatgctcacgccgctgtcgttcctgtccaaggccgaagtgcgcacctggccggtcgccggctggctggcagccaaggccggcagtctgtttatccggcgcggttcgggcgacagccaattgatccgcaagcagatgagccgccatctggaacaggctcattcgctgttgatgttccccgaagggaccaccaccgatggccagaccttgcgcactttccatggtcgcctgctgtcagcggccatcgacgccgatgtcgcattgcagccggtggcgatccgttacctgcgcaacggtgaaccggattcactggcgccgttcattggcgatgatgatttgctctcgcacttgatgcgtttgtttgccaatgatcgggctgaggtggaaatccatctgctggaaccgattgcctgccacggccaggagcgcgcggcactggccttccaggcgcagcaggcggtacacaaggcgttgttcggggcgcttccagagaaacagcaagcgccgatgcgacctgctgcgattgcggcctga

SEQ ID NO: 29494 - protein, 264 aa, Pseudomonas fluorescens
MSRLRVYARIARVLLVVMLGLSMASVFGLFERLGIANSMVRRQRWSRFFMARLSRALPFSVTVHGQLPQRPMLWVSNHVSWTDIPLLGMLTPLSFLSKAEVRTWPVAGWLAAKAGSLFIRRGSGDSQLIRKQMSRHLEQAHSLLMFPEGTTTDGQTLRTFHGRLLSAAIDADVALQPVAIRYLRNGEPDSLAPFIGDDDLLSHLMRLFANDRAEVEIHLLEPIACHGQERAALAFQAQQAVHKALFGALPEKQQAPMRPAAIAA

SEQ ID NO: 29495 - DNA, 20 bp, Artificial sequence
  primer
atgcccgccatttcaaggcg

SEQ ID NO: 29496 - DNA, 20 bp, Artificial sequence
  primer
tcaggcggcgaccggcaggg

SEQ ID NO: 29497 - protein, 177 aa, Artificial sequence
  consensus sequence
  Variant (2)..(2): Xaa in position 2 is any amino acid
  Variant (5)..(5): Xaa in position 5 is any amino acid
  Variant (8)..(8): Xaa in position 8 is any amino acid
  Variant (11)..(20): Xaa in position 11 to 20 is any amino acid
  Variant (22)..(23): Xaa in position 22 to 23 is any amino acid
  Variant (25)..(25): Xaa in position 25 is any amino acid
  Variant (27)..(29): Xaa in position 27 to 29 is any amino acid
  Variant (32)..(33): Xaa in position 32 to 33 is any amino acid
  Variant (35)..(35): Xaa in position 35 is any amino acid
  Variant (38)..(41): Xaa in position 38 to 41 is any amino acid
  Variant (43)..(43): Xaa in position 43 is any amino acid
  Variant (45)..(46): Xaa in position 45 to 46 is any amino acid
  Variant (48)..(71): Xaa in position 48 to 71 is any amino acid
  Variant (72)..(72): Xaa in position 72 is any or no amino acid
  Variant (78)..(80): Xaa in position 78 to 80 is any amino acid
  Variant (82)..(86): Xaa in position 82 to 86 is any amino acid
  Variant (88)..(90): Xaa in position 88 to 90 is any amino acid
  Variant (92)..(102): Xaa in position 92 to 102 is any amino acid
  Variant (103)..(111): Xaa in position 103 to 111 is any or no amino acid
  Variant (114)..(117): Xaa in position 114 to 117 is any amino acid
  Variant (119)..(128): Xaa in position 119 to 128 is any amino acid
  Variant (129)..(137): Xaa in position 129 to 137 is any or no amino acid
  Variant (139)..(144): Xaa in position 139 to 144 is any amino acid
  Variant (145)..(145): Xaa in position 145 is any or no amino acid
  Variant (147)..(170): Xaa in position 147 to 170 is any amino acid
  Variant (171)..(176): Xaa in position 171 to 176 is any or no amino acid
VXNHXSWXDIXXXXXXXXXXFXXKXEXXXWPXXGXLAXXXXTXFXXRXXXXXXXXXXXXXXXXXXXXXXXXXFPEGTXXXGXXXXXFXXXLXXXXXXXXXXXXXXXXXXXXQPXXXXYXXXXXXXXXXXXXXXXXXXGXXXXXXXLXXXXXXXXXXXXXXXXXXXXXXXXXXXXXXR

SEQ ID NO: 29498 - protein, 46 aa, Artificial sequence
  protein pattern
  Variant (3)..(3): Xaa in position 3 is any amino acid
  Variant (5)..(5): Xaa in position 5 is Trp or Tyr
  Variant (6)..(6): Xaa in position 6 is any amino acid
  Variant (8)..(8): Xaa in position 8 is Ile or Val
  Variant (9)..(10): Xaa in position 9 to 10 is any amino acid
  Variant (11)..(11): Xaa in position 11 is Ile, Leu, Met or Val
  Variant (12)..(18): Xaa in position 12 to 18 is any amino acid
  Variant (20)..(20): Xaa in position 20 is Ile, Leu or Val
  Variant (21)..(21): Xaa in position 21 is Ala or Ser
  Variant (23)..(23): Xaa in position 23 is any amino acid
  Variant (24)..(24): Xaa in position 24 is Asp or Glu
  Variant (25)..(25): Xaa in position 25 is Ile or Val
  Variant (26)..(27): Xaa in position 26 to 27 is any amino acid
  Variant (29)..(29): Xaa in position 29 is any amino acid
  Variant (30)..(30): Xaa in position 30 is Gly, Ile, Leu or Val
  Variant (31)..(31): Xaa in position 31 is any amino acid
  Variant (33)..(33): Xaa in position 33 is any amino acid
  Variant (35)..(35): Xaa in position 35 is any or no amino acid
  Variant (37)..(41): Xaa in position 37 to 41 is any amino acid
  Variant (42)..(42): Xaa in position 42 is any or no amino acid
  Variant (44)..(44): Xaa in position 44 is any amino acid
  Variant (45)..(45): Xaa in position 45 is any or no amino acid
NHXSXXDXXXXXXXXXXXFXXKXXXXXWXXXGXLXAXXXXXXFXXR

SEQ ID NO: 29499 - protein, 23 aa, Artificial sequence
  protein pattern
  Variant (2)..(3): Xaa in position 2 to 3 is any or no amino acid
  Variant (6)..(6): Xaa in position 6 is Ala or Gly
  Variant (8)..(8): Xaa in position 8 is Ser or Thr
  Variant (9)..(9): Xaa in position 9 is Gly, Ser, Thr or Val
  Variant (10)..(10): Xaa in position 10 is Ala, Asp, Glu, Asn or Ser
  Variant (11)..(11): Xaa in position 11 is Ala, Gly, Gln or Thr
  Variant (12)..(16): Xaa in position 12 to 16 is any amino acid
  Variant (17)..(17): Xaa in position 17 is Phe, Ile or Val
  Variant (18)..(18): Xaa in position 18 is any amino acid
  Variant (19)..(19): Xaa in position 19 is Ala, Gly, Pro, Ser or Thr
  Variant (20)..(20): Xaa in position 20 is any amino acid
  Variant (21)..(21): Xaa in position 21 is Ile, Leu or Met
  Variant (22)..(22): Xaa in position 22 is Phe, Leu or Met
  Variant (23)..(23): Xaa in position 23 is Ala, Glu, Gly, Gln or Ser
FXXPEXTXXXXXXXXXXXXXXXX

SEQ ID NO: 29500 - DNA, 1050 bp, Azotobacter vinelandii
  CDS (1)..(1050): transl_table=11
atgagcacactcttcgaccccatcgagatcggcgatctccaactgcccaaccgtatcgtcatggctccgctgacccgctgccgcgccgagcccggccgcgtgcccggcgcgctgatggccgaatactacgtgcagcgcgccagcgccggcctgatcatcagcgaagccacttcggtctgcccgacgggtgtcggctaccccgacacgcccggcatctggtcggatgagcaggtcgccggctggaagaacgtcacccaggcggtgcacgccgccggcgggcgcatcgtcctgcagctctggcacgtgggccggatctccgatccgctctatttgaacggagaactgccggtggcgccgagcgccatccagcccaagggtcatgtcagcctggtccgcccgcagaaagccttcgagaccccgcgcgccctggaaaccgacgagatccccggcctcgtcgaggcctaccgccagggtgccgagaacgccaggaaggccggcttcgacggcgtggagatccatgcggccaacggttacctgctcgaccagttcctccaggacagcaccaaccggcgcaccgaccgctacggcggcagcctggaaaaccgcgcccgcctgctgctcgaggtgaccgacgcggcgatctcggtatggggcgccggccgggtcggcgtgcatctggcgccgcgcgccgacctgcacgacatgggcgactccaaccgtgccgagaccttcagccacgtagcccgcgaactgggcaagcgcggcatcgccttcatctgcacccgcgagaaggaagacgccgacagcctgaccccacagatcaagcaagccttcggcggcgcggtgatcgccaacgaacgtttcaccaaggagcaggccgaccgctggctggccgagagcaaggccgacgccgtggccttcggcgtccccttcatcgccaatcccgatctgccggcgcgcttggcggccgatgcgccgctcaacgaggcgcatccggaaaccttctacagttccggcccgcagggctacctggactatccgaccctgtag

SEQ ID NO: 29501 - protein, 349 aa, Azotobacter vinelandii
MSTLFDPIEIGDLQLPNRIVMAPLTRCRAEPGRVPGALMAEYYVQRASAGLIISEATSVCPTGVGYPDTPGIWSDEQVAGWKNVTQAVHAAGGRIVLQLWHVGRISDPLYLNGELPVAPSAIQPKGHVSLVRPQKAFETPRALETDEIPGLVEAYRQGAENARKAGFDGVEIHAANGYLLDQFLQDSTNRRTDRYGGSLENRARLLLEVTDAAISVWGAGRVGVHLAPRADLHDMGDSNRAETFSHVARELGKRGIAFICTREKEDADSLTPQIKQAFGGAVIANERFTKEQADRWLAESKADAVAFGVPFIANPDLPARLAADAPLNEAHPETFYSSGPQGYLDYPTL

SEQ ID NO: 29502 - DNA, 1380 bp, Zea mays
  CDS (56)..(1228)
ccgggacacaaacagcacatctgtttagccaagctgtggccaacctctgcgaggaatggagatggagtcgactcctctcttgacaccatacaagatgggcgatttcaacctggcacacagggttgtgctggcgccgctgacgaggtgccgggcgttcgggaacgtgccgcagccggagcacatggctctctactaccgccagcgggcgacgcccggcggcttcctcatcgccgaggcctgcgccgtgtcggagagcgcgcgcgggtacccggacgttccggggctgtggacccaccaacaggtcgtggcctggaagccgatcgtcgacgccgtccacgccagcggtgccgtcttcttcgcccagctctggcacaccggccgggcctccccctcagcgcatcgtccggtcatcttgtggcccagtgccagtggccactgctggctacagcaattccaaccaaatgggcaggcaccgatctctagcacggacaagcaaatcccagcacaggtgaaccattccggtgacgtcaacacgttcgcggtgcctcggagactagagacagaggagataccacacgtcgtcaatgacttccgggttgccgccagaaacgccatcaaagcaggctttgatggagtggagatccacgcggcaaacgggtacctgttcgatcagttcatgaaggacagcaccaatgaccgagacgactcctacgggggcagcttggagaaccggtgccgtttcacagccgaggtgatggcagccgtcgcggacgaggtcggtgccaaccgcctcggtgtgcgcctctctccgttcgcggattatatggactgccacgactccaacccagaggcgctcgcgcttcatgtcatcgacgagacgctgaacccgctcggcgtgctttactgccacatggtagagccaaggatgcgggtgaacccagacgacggtattatgactctcgagcacatgctgctaccgttcaggagggcgtttcgcgggacgttcattgctaatggaggctacgaccgtgaggaaggcaatgacgccattgcccgtggccgtggctatgcagatctcatcgcatacggccggatattccttgccaacccggaccttccgatgcgttttgccaagaatgccccgctgaacaagtatgataggagcaccttctatacctctgatccggtggttgggtacacagattatccatttctcgatcaactctaggatgattggcttataaacaatttccccacctggagtactatcttgaccttaaaataaaatgagtgtcactatagtattagtgtcgatcaaagttttctaagtttaactaaatctacaaaaattacttattaagcatttgtcaaagtatctat

SEQ ID NO: 29503 - protein, 390 aa, Zea mays
MEMESTPLLTPYKMGDFNLAHRVVLAPLTRCRAFGNVPQPEHMALYYRQRATPGGFLIAEACAVSESARGYPDVPGLWTHQQVVAWKPIVDAVHASGAVFFAQLWHTGRASPSAHRPVILWPSASGHCWLQQFQPNGQAPISSTDKQIPAQVNHSGDVNTFAVPRRLETEEIPHVVNDFRVAARNAIKAGFDGVEIHAANGYLFDQFMKDSTNDRDDSYGGSLENRCRFTAEVMAAVADEVGANRLGVRLSPFADYMDCHDSNPEALALHVIDETLNPLGVLYCHMVEPRMRVNPDDGIMTLEHMLLPFRRAFRGTFIANGGYDREEGNDAIARGRGYADLIAYGRIFLANPDLPMRFAKNAPLNKYDRSTFYTSDPVVGYTDYPFLDQL

SEQ ID NO: 29504 - DNA, 1274 bp, Zea mays
  CDS (86)..(1204)
ctacaaatatatggctgcagctgaggtccgacaccacacaaacagcacatctgtttagccaagctgtggccaacctctgcgaggaatggagatggagtcgactcctctcttgacaccatacaagatgggcgatttcaacctggcacacagggttgtgctggcgccgctgacgaggtgccgggcgttcgggaacgtgccgcagccggagcacatggctctctactaccgccagcgggcgacgcccggcggcttcctcatcgccgaggcctgcgccgtgtcggagagcgcgcgcgggtacccggacgttccggggctgtggacccaccaacaggtcgtggcctggaagccgatcgtcgacgccgtccacgccagcggtgccgtcttcttcgcccagctctggcacaccggccgggcctccccctcagaattccaaccaaatgggcaggcaccgatctctagcacggacaagcaaatcccagcacaggtgaaccattccggtgacgtcaacacgttcgcggtgcctcggagactagagacagaggagataccacacgtcgtcaatgacttccgggttgccgccagaaacgccatcaaagcaggctttgatggagtggagatccacgcggcaaacgggtacctgttcgatcagttcatgaaggacagcaccaatgaccgagacgactcctacgggggcagcttggagaaccggtgccgtttcacagccgaggtgatggcagccgtcgcggacgaggtcggtgccaaccgcctcggtgtgcgcctctctccgttcgcggattatatggactgccacgactccaacccagaggcgctcgcgcttcatgtcatcgacgagacgctgaacccgctcggcgtgctttactgccacatggtagagccaaggatgcgggtgaacccagacgacggtattatgactctcgagcacatgctgctaccgttcaggagggcgtttcgcgggacgttcattgctaatggaggctacgaccgtgaggaaggcaatgacgccattgcccgtggccgtggctatgcagatctcatcgcatacggccggatattccttgccaacccggaccttccgatgcgttttgccaagaatgccccgctgaacaagtatgataggagcaccttctatacctctgatccggtggttgggtacacagattatccatttctcgatcaactctaggatgattggcttataaacaatttccccacctggagtactatcttgaccttaaaataaaatgagtgtcact

SEQ ID NO: 29505 - protein, 372 aa, Zea mays
MEMESTPLLTPYKMGDFNLAHRVVLAPLTRCRAFGNVPQPEHMALYYRQRATPGGFLIAEACAVSESARGYPDVPGLWTHQQVVAWKPIVDAVHASGAVFFAQLWHTGRASPSEFQPNGQAPISSTDKQIPAQVNHSGDVNTFAVPRRLETEEIPHVVNDFRVAARNAIKAGFDGVEIHAANGYLFDQFMKDSTNDRDDSYGGSLENRCRFTAEVMAAVADEVGANRLGVRLSPFADYMDCHDSNPEALALHVIDETLNPLGVLYCHMVEPRMRVNPDDGIMTLEHMLLPFRRAFRGTFIANGGYDREEGNDAIARGRGYADLIAYGRIFLANPDLPMRFAKNAPLNKYDRSTFYTSDPVVGYTDYPFLDQL

SEQ ID NO: 29506 - DNA, 1098 bp, Klebsiella pneumoniae subsp. pneumoniae MGH 78578
  CDS (1)..(1098): transl_table=11
atgtcggaagcaaaattattcagcccactgaaagtcggtgcggtcaccgtccctaatcgcgtatttatggcgccgttgacgcgtctgcgcagcattgagccgggcgatatccctactccgctgatgggcgaatactaccgccagcgcgccagttccgggctgatcatcaccgaagcgacgcagatctccgcgcaggccaaaggctacgccggcgcgcctgggctgcacagcccggagcagattgccgcctggcagaaaattaccgccggcgttcatgccgaaaacggtcatatcgccgtccagctgtggcacaccgggcgtatttcccatagcagcctgcagcctggcggcgccgccccggtagcgccttccgcgctgagcgcgggcacccgtacctcactgcgtgacgaaaacggccacgccattcgcgtcgacacctcaatgccccgcgccctggaaaccgcagagatcccagggatcgtcaacgatttccgtcaggcggtcggcaatgcccgtgacgccggcttcgatctggttgagctgcactcagcccacggctatctgctgcaccaattcctctcgccatcggcgaaccagcgtaccgatcagtacggcggcagcgtggagaaccgtgcccgtctggtgctggaagtggttgacgccgtgagtcaagagtggagcgccgagcgcattggcatccgcgtgtcgccgattggcagcttccagaatgtggataatggcccgaacgaagaagaagacgcgctgtatctgattagcgagctggcgaaacgcggtatcgcctatctgcacatgtccgagccggactgggcgggcggcaaaccttacagtgaagctttccgtcagaaagtccgcgaccgcttcccgggggtgatcattggcgctggcgcttacacagtagaaaaagccaacgatcttatcaataaagggctgattgatgccgtggcctttggccgcgattacatcgccaacccggatctggtggctcgcctgcagaaaaaagcgccgcttaacccgcaacgcccggaatccttctacggcggcggcgcggaaggctacaccgattacccgactctgtaa

SEQ ID NO: 29507 - protein, 365 aa, Klebsiella pneumoniae subsp. pneumoniae MGH 78578
MSEAKLFSPLKVGAVTVPNRVFMAPLTRLRSIEPGDIPTPLMGEYYRQRASSGLIITEATQISAQAKGYAGAPGLHSPEQIAAWQKITAGVHAENGHIAVQLWHTGRISHSSLQPGGAAPVAPSALSAGTRTSLRDENGHAIRVDTSMPRALETAEIPGIVNDFRQAVGNARDAGFDLVELHSAHGYLLHQFLSPSANQRTDQYGGSVENRARLVLEVVDAVSQEWSAERIGIRVSPIGSFQNVDNGPNEEEDALYLISELAKRGIAYLHMSEPDWAGGKPYSEAFRQKVRDRFPGVIIGAGAYTVEKANDLINKGLIDAVAFGRDYIANPDLVARLQKKAPLNPQRPESFYGGGAEGYTDYPTL

SEQ ID NO: 29508 - DNA, 1080 bp, Kineococcus radiotolerans SRS30216
  CDS (1)..(1080): transl_table=11
atggatctgttctcccccgtcgccctgggcgacctccagctctcgaaccgcctcgtcatggccccgctcacccgcatgcgctcgggctccgagggggtgccggggccgctggtcgccgagcactacgcccagcgggcgagcctggggctcatcgtcaccgaggggacctacctcaacggcgagtcgcagggcttcgtggggcagccgggcatcgtcaccgacgcccagcaggagggctggcgggccgtggccgaggcggtgcacgccggcggcgggaagatcgtcatgcaggtcatgcacgccgggcgggtgacccaccccgagaccaccggcggcgaccggatcgtcgggccgagcgcgatcgccatccagggcgagacccacaccccgaccggcaagcagccctacccggtcccgcacgcgctgaccaccgaggaggtcgccggggtggtggccgacttcgtggccgcctcccgccgcgccgtcgacgccggcctggacggggtcgagatccactccgccaacgggtacctgctgcacgagttcctcgcccccagctccaaccaccgcgacgaccagtacggcggctcgccggagaaccgggcccgcctcgtggtcgagatcgccacggccgtggccgccgagatcggcgccggccgcgtcggggtgcgcatctcccccgagcacaacatccaggacgccctggagaccgaccccgccgacgtcgaggcgacgtactcggcgctggtcgagggcctgcgcccgctcggcctggcctacctgtccgtgctgcacgccgacccctccggcggcctcgtgcagggcctgcgcaagcagttcgagggccacctcatggtcaacagcggtttcggggtcgtgacctcgcgccaggacgcgctggacctggtcgccgagggcaccgccgactccgtggccgtgggccgcatggccatcgcgaacccggacctggtgcgccgctggcaggaggacctgcccgagaacgagccgaacccggccacgttctacgccgacggggccgagggctacaccgactaccccttcgtggacgccccggcctga

SEQ ID NO: 29509 - protein, 359 aa, Kineococcus radiotolerans SRS30216
MDLFSPVALGDLQLSNRLVMAPLTRMRSGSEGVPGPLVAEHYAQRASLGLIVTEGTYLNGESQGFVGQPGIVTDAQQEGWRAVAEAVHAGGGKIVMQVMHAGRVTHPETTGGDRIVGPSAIAIQGETHTPTGKQPYPVPHALTTEEVAGVVADFVAASRRAVDAGLDGVEIHSANGYLLHEFLAPSSNHRDDQYGGSPENRARLVVEIATAVAAEIGAGRVGVRISPEHNIQDALETDPADVEATYSALVEGLRPLGLAYLSVLHADPSGGLVQGLRKQFEGHLMVNSGFGVVTSRQDALDLVAEGTADSVAVGRMAIANPDLVRRWQEDLPENEPNPATFYADGAEGYTDYPFVDAPA

SEQ ID NO: 29510 - DNA, 1095 bp, Xanthobacter autotrophicus Py2
  CDS (1)..(1095): transl_table=11
atgagcgcgcccaccctgttcgacagcttccgcctcggcgacatgaccctgcccaaccgcatcgtcatggcgccgctgacccgtaaccgcgccggtgccggcttcgtgccgagcccgctggctcctgaatattacgcccagcgcgccgacgcgggcctgctcatcaccgaggcctcgcagatctcccagcagggccagggctatcaggacacccccggcatctacaccgacgcccaggtcgagggctggaaggccgtgaccgacgccgtgcatgcccgcggcgggcacatcgtcatccagctctggcacgtgggccgggtctcccacacgtcgctgcagccgaacggcggcgcgccggtggcgccttccgccatcacggccgcgaccaagaccttcgtgaacaacgccttcgccgacacctccgagccccgcgcgctggagcgctccgagatccccggcatccttgaggattatcgccgcgccgccgccaacgccatcaaggccggcttcgacggggtggagatccacggcgccaatggctacctgatcgaccagttcctgaaggatggctcgaacaagcgcaccgacgactacggcggctccatcgagaaccgcgcgcgcttcctgctggaggtggtggacaccatcgtcgccgagatcggcgccaaccgcaccggcctgcgcctgtcgccggtatccccggccaacggcatcagcgacagcaacccgcaggccctcttcaaccatgtggccgagcagctggaaaagcgccacctgctcttcgtccatgtggtggaaggtgccaccggcggcccgcgcgacgtggcgccggacttctccttcgatgcgctgcgccagcgcttcaccggcccctggatcgtcaacaacggctatgacctggagctggcccagagcgcgatcggcgctggcaaggcggacctcgtcgccttcggcaagccgttcatcgccaatccggacctggtggagcgcctgcgccgcaatgcgccgctgaacgagcccgaccgcgacaccttctacggcggcggcgccaagggctataccgactatcccacccttgcggacgcggcggcgtga

SEQ ID NO: 29511 - protein, 364 aa, Xanthobacter autotrophicus Py2
MSAPTLFDSFRLGDMTLPNRIVMAPLTRNRAGAGFVPSPLAPEYYAQRADAGLLITEASQISQQGQGYQDTPGIYTDAQVEGWKAVTDAVHARGGHIVIQLWHVGRVSHTSLQPNGGAPVAPSAITAATKTFVNNAFADTSEPRALERSEIPGILEDYRRAAANAIKAGFDGVEIHGANGYLIDQFLKDGSNKRTDDYGGSIENRARFLLEVVDTIVAEIGANRTGLRLSPVSPANGISDSNPQALFNHVAEQLEKRHLLFVHVVEGATGGPRDVAPDFSFDALRQRFTGPWIVNNGYDLELAQSAIGAGKADLVAFGKPFIANPDLVERLRRNAPLNEPDRDTFYGGGAKGYTDYPTLADAAA

SEQ ID NO: 29512 - DNA, 1125 bp, Oryza sativa (japonica cultivar-group)
  CDS (1)..(1125)
atggcgcgcgaggcggagaaggacgcggcggcggcggcggagatcccgctgctgacgccgtacaagatggggcggttcgagctctcccaccgtgtggtgctcgcgccgctcacgcggaaccgctcctacggcaacgtgctgtactacacgcagcgcgccaccagcggcggcctcctcgtcacggaggccaccggcgtctccgacaccgcgcagggctacccggacacccccggcatctggacgcagcagcaggtcgaggcgtggaagcccatcgtcgacgccgtccaccgcaagggcgccctcttcatctgccagctctggcacgtcggcagggtctccaccaacgaataccaacctgacgggcaggcgcccatctcaagcacagacaggcagatcacaccggacgattcaggcatcgtctactcgaaaccccgacggctgaggacggaggagatccctcagatcatcgacgacttcaggcgagccgcgcggaacgccatcgaggccgggttcgacggcgtggagatccacggcgcgcacggctacctcctggagcagttcatgaaggacagcgccaacgaccgcagcgacgagtacggtggcagcctcgagaaccggtgccgcttcgttgtcgaggtgatcgacgccatcgtcgccgaggttggagcgcaccgtgtggggatcaggctgtcaccgttcatcgactatatggactgcgtcgactccgacccggtggctctcggctcgtacatggtgcagcagctcaacaagcacccggggtttctctactgccacatggtggagccaagaatggccatcgtggaaggacgcaggaagatcacccatggcctcctgccattccggaagctgttcaatggcactttcatcgctgccggaggatacgatcgggaggaaggaaacaaggtgatagccgatggatatgctgacctcgtcgcctacgggaggcacttcttggccaatccggacttgcccaagaggttcgcgatcaacgcaccattgaacaagtataataggtccaccttttacatacaggatcctgttgttggctacacggactatcctttccttgatgagaaagacgagggcgctgctacttatgcttaa

SEQ ID NO: 29513 - protein, 374 aa, Oryza sativa (japonica cultivar-group)
MAREAEKDAAAAAEIPLLTPYKMGRFELSHRVVLAPLTRNRSYGNVLYYTQRATSGGLLVTEATGVSDTAQGYPDTPGIWTQQQVEAWKPIVDAVHRKGALFICQLWHVGRVSTNEYQPDGQAPISSTDRQITPDDSGIVYSKPRRLRTEEIPQIIDDFRRAARNAIEAGFDGVEIHGAHGYLLEQFMKDSANDRSDEYGGSLENRCRFVVEVIDAIVAEVGAHRVGIRLSPFIDYMDCVDSDPVALGSYMVQQLNKHPGFLYCHMVEPRMAIVEGRRKITHGLLPFRKLFNGTFIAAGGYDREEGNKVIADGYADLVAYGRHFLANPDLPKRFAINAPLNKYNRSTFYIQDPVVGYTDYPFLDEKDEGAATYA

SEQ ID NO: 29514 - DNA, 1131 bp, Oryza sativa (japonica cultivar-group)
  CDS (1)..(1131)
atggtgcacgcacctgcgaaagaggcgatcccgctgctgacgccgtacaagatggggcagctggagctgtcccaccgggtggtgctcgcgccgctgacgcggtgccgctcctacggccacgtgccgcagccgcacgccgcggtgtactactcgcagcgcgccaccaacggcggactcctcatcgcggaggccactgtcatctcccccaccgcgcagggctacccggacacccccggcatctacacgcagcagcagatcgaagcgtggaaacccatcgtcgacgccgtccaccgcaagggcgccctcttcttcctacagatatggcacgtcggcagggtctccaccacagatttccagccaaatggacaggcgccgatctcgagcaccgataagcagatcacaccggacgattcaggcatggtgtactccaagccccggcggctccggacagacgagatccctcagatcgtcgacgacttcaggcgagccgcgcggaacgccatcgagtcggggttcgacggcgtggagatccatggcgcgcacggctacctcctcgaccagttcatgaaggacagcgccaacgaccgcaccgacgagtacggtggcaacctcgagaaccggtgccgcttcgccgtcgaggtgatcgatgccgtcgtcgccgaggtgggagcgcaccgtgttggaatcagattatcgccattcgacaactacatggactgcttcgactccaacccggtagctctcggctcatacatggtgcagcaactcaacaagcacccaggctttctctactgccacatggtggagccaggaatggccatcgtcgaaggacggaggaagatcacccatggtctcctgccattcaggaagcagttcaatggcactttcatcgctgctggcgggtatgaccgggaggaagggaacaaggtggtggctgatggctatgccgatctcgtcgcctacgggaggctcttcttggctaaccctgacttgccgaggaggtttgagcttgacgcaccattgaacaggtatgacaggtctaccttttatacacaggatcccgttgttggttatacagattacccttttcttgaggagattgatgaggagtcaacaactacctatgcttaa

SEQ ID NO: 29515 - protein, 376 aa, Oryza sativa (japonica cultivar-group)
MVHAPAKEAIPLLTPYKMGQLELSHRVVLAPLTRCRSYGHVPQPHAAVYYSQRATNGGLLIAEATVISPTAQGYPDTPGIYTQQQIEAWKPIVDAVHRKGALFFLQIWHVGRVSTTDFQPNGQAPISSTDKQITPDDSGMVYSKPRRLRTDEIPQIVDDFRRAARNAIESGFDGVEIHGAHGYLLDQFMKDSANDRTDEYGGNLENRCRFAVEVIDAVVAEVGAHRVGIRLSPFDNYMDCFDSNPVALGSYMVQQLNKHPGFLYCHMVEPGMAIVEGRRKITHGLLPFRKQFNGTFIAAGGYDREEGNKVVADGYADLVAYGRLFLANPDLPRRFELDAPLNRYDRSTFYTQDPVVGYTDYPFLEEIDEESTTTYA

SEQ ID NO: 29516 - DNA, 1116 bp, Mesorhizobium loti MAFF303099
  CDS (1)..(1116): transl_table=11
atgactaccctgtttgatcccttgcgggccggcgacctgacgctggcgaaccgcatcgtcatggcgccgctgacgcgcaatcgctcgcccaatgcggtgcccggcgacctctcggtgacctattacagccagcgcgccacggctggtctcatcgtgaccgaggccaccgccatcagccatcagggccagggctatgccaacgtgcccggcctctatggcgcggatcagctggccggctggaggcgtgtcacggacgccgtccatagaggcggcggcaagattgtggtgcagctctggcatgtcgggcgcatctcgcacaacacattgcagcccggcggcggcaagccggtggcgccgtcggcgatcagggcaaactccaagaccttcctggtcaagccggatggcagcggcgagttcgccgagacctccgagccgcgcgcgctcgatgcggccgaacttcccggcatcgtcgatgatttccgccgcgccgccaaggcggcgatcgaggtggcgggtttcgacggcgtcgagatccatggcgccaacggatatctcatcgaccagttcctgcgttcaggcaccaatcatcgtaacgacgcgtatggcgggtcgatcgagaaccggacgcgcttcctgttcgaggtggtcgacgcggtcacgggcgcagtcggtgccggcaggaccgggatcaggctgtcgccggtgacgcccgccaacgacgcttcggatagcgatccgcagccgctgttcaaccatgtggtggcgggcctcggaggtcgcgggctggcctatatccacatcgtcgaaggcgcgaccggcggcgcgcgcgacttcagccagggcgacaggccgttcgattacgaggaactcaaggccacctatcgcaaggccggcggcgctggcgcctggctggtgaacaatggctacgacaaggaactggccgaaaaagcggtcggtgacggctatgccgagcttgtcgcgttcggcaagctgttcatcgccaaccccgacctcgtcagccggctgaagcgcaatgccgaactgaatgcccctgacaaggcgacgttctatggcggcgatgccaggggctatacggattacccgacggcggcctga

SEQ ID NO: 29517 - protein, 371 aa, Mesorhizobium loti MAFF303099
MTTLFDPLRAGDLTLANRIVMAPLTRNRSPNAVPGDLSVTYYSQRATAGLIVTEATAISHQGQGYANVPGLYGADQLAGWRRVTDAVHRGGGKIVVQLWHVGRISHNTLQPGGGKPVAPSAIRANSKTFLVKPDGSGEFAETSEPRALDAAELPGIVDDFRRAAKAAIEVAGFDGVEIHGANGYLIDQFLRSGTNHRNDAYGGSIENRTRFLFEVVDAVTGAVGAGRTGIRLSPVTPANDASDSDPQPLFNHVVAGLGGRGLAYIHIVEGATGGARDFSQGDRPFDYEELKATYRKAGGAGAWLVNNGYDKELAEKAVGDGYAELVAFGKLFIANPDLVSRLKRNAELNAPDKATFYGGDARGYTDYPTAA

SEQ ID NO: 29518 - DNA, 1104 bp, Vibrio cholerae O1 biovar eltor str. N16961
  CDS (1)..(1104): transl_table=11
atgagcagattatttgaaccaaccgatttaaaacaactcacgctgcaaaaccgtgtggtgatggctccgatgactcgcgcacgcagtagccaaccggggaatattcccaacccaatgatggcaacctattaccaacagcgcgccagtgcagggttaatcatttccgaagcgacccagatctccgatgatgcgcaaggctattcattcactcccggcgtttataccgatgagcaaacctcaggttggaaaaccgtaactcaagcggtcaaacaacaaggtgcagcgatgttttgccaactttggcatgtcggacgagtttcccaccctgtttttcaaaaagggcagttgccgattgccccgtcagccctcaaaccggttgaaactcaagtttggatcgccgatgaacaaggtaatggccagatggtggattgcgttgaaccccgcgctatgactcaagccgatattgatagagtggtgaacgacttcgctcaggcggcaaaatgtgccattgaagcaggatttgatggtgtagaaatccacggtgggaatggttatctcatcgatcagtttttgcgtaccaactcgaatcatcgtaccgatagttatggtggtagccgtgaaaatcggatgcgatttttgctcgaagtggtggatgcggtcagtcaagcgattggtgccagccgagtaggcgttcgcttagcgccgtttattactttcaaagacatggactgccccgacatagtgccaacaattttggaggcatcgaagcagttgcaagcacgagatattgcgtatctgcacttatcagaagcggattgggatgatgctcctaccattccagaaagctttcgcattgagctacgcaagcatttcactaacgcgattatcgtcgctggtcgctacacccttgagcgcgcggaagaggtgctacaaaaaggctatgccgatttagtcgcattcgggcgtccttttgtcgccaaccccgatctggtttctcgcctcaagcaccagcaaccgctggcgcaactggatggtaaaaccctgtttggtggcggtgagcaaggctataccgattaccccaaaatccctgaacagccaatctag

SEQ ID NO: 29519 - protein, 367 aa, Vibrio cholerae O1 biovar eltor str. N16961
MSRLFEPTDLKQLTLQNRVVMAPMTRARSSQPGNIPNPMMATYYQQRASAGLIISEATQISDDAQGYSFTPGVYTDEQTSGWKTVTQAVKQQGAAMFCQLWHVGRVSHPVFQKGQLPIAPSALKPVETQVWIADEQGNGQMVDCVEPRAMTQADIDRVVNDFAQAAKCAIEAGFDGVEIHGGNGYLIDQFLRTNSNHRTDSYGGSRENRMRFLLEVVDAVSQAIGASRVGVRLAPFITFKDMDCPDIVPTILEASKQLQARDIAYLHLSEADWDDAPTIPESFRIELRKHFTNAIIVAGRYTLERAEEVLQKGYADLVAFGRPFVANPDLVSRLKHQQPLAQLDGKTLFGGGEQGYTDYPKIPEQPI

SEQ ID NO: 29520 - DNA, 1113 bp, Pseudomonas aeruginosa PAO1
  CDS (1)..(1113): transl_table=11
atgctgttcagcccctatacccttggccacctgaccctccccaatcgcatcgtcatgccgccgatgacccgttcccgcgccgccagtggcgaagtcgccaccgcgctgatggccgagtactacagccagcgcgccggcgccggcctgattgtttccgaaggcacccagatcagccggcagggccagggctacgcctggacgccgggcatccacagcgccgagcaggtcgccggctggcgccaggtcaccgacgcggtgcacgccgccggcgggcgcatcttcgcccagctctggcacgtcggcagggtctcgcacacctcgctgcaaccgggcaacgccgccccggtgtcctcctcggcgctggtggccgaaggcgtgaaggtcttcgtcgatccccagggccgcggagcgcaggccggcggcggcgagatggtccagcactcggcgccgcgcgcactggcagtggaggaaatccgggagatcgtcgccgactatgcccaggccgcacgcaacgccctcgacgccggcttcgacggggtcgaactgcacggcgccaacggctacctgatcaaccagttcatcgactcccaggccaatgcgcgcaacgaccaatacggcggctcgctggagaaccgcctgcgcttcctccgcgaagtcgccgaggcggtcaccgcggtggtcggcagggagcgcatcggcgtgcgcctggcgccgctgaccaccctgcagggcgcggtcgacgacaccccgcaagccacctacctggccgcggcgcggctactggacgagatcggcgtggcctacatccacatcgccgaggccgactgggaagacgccccggccatgccggcggcgttcaaggaagcgttgcgcatcgtctaccgtggcagcctgatctactccggcatgtacaccaaggcgcgcgccgaggaagccctggccaggggctgggccgacctggtcggcttcggccggccgttcatcgccaaccccgacctgccctaccgcctggagcacgacctggcgctggccgacggtgaccgctcgacctacttcggtggcggcgccgccggctacaccgactacccgagcctaccgcaggcggccggttga

SEQ ID NO: 29521 - protein, 370 aa, Pseudomonas aeruginosa PAO1
MLFSPYTLGHLTLPNRIVMPPMTRSRAASGEVATALMAEYYSQRAGAGLIVSEGTQISRQGQGYAWTPGIHSAEQVAGWRQVTDAVHAAGGRIFAQLWHVGRVSHTSLQPGNAAPVSSSALVAEGVKVFVDPQGRGAQAGGGEMVQHSAPRALAVEEIREIVADYAQAARNALDAGFDGVELHGANGYLINQFIDSQANARNDQYGGSLENRLRFLREVAEAVTAVVGRERIGVRLAPLTTLQGAVDDTPQATYLAAARLLDEIGVAYIHIAEADWEDAPAMPAAFKEALRIVYRGSLIYSGMYTKARAEEALARGWADLVGFGRPFIANPDLPYRLEHDLALADGDRSTYFGGGAAGYTDYPSLPQAAG

SEQ ID NO: 29522 - DNA, 1101 bp, Halobacterium sp. NRC-1
  CDS (1)..(1101): transl_table=11
atggcagacagtttttcgccactggagctccgagacacgacgatccgcaaccggttcgccatgtcgccgatgtgccagtactcctgtgaggaccgcgacggcctcgcgaccgactggcaccgcgtccacctggggtcgcgggcggtcggcggcgccggcgtcgtgatgaccgaagccaccgccgtcgaggagcgcggccgcatctcccccgaggacctcggcatctggagcgacgagcacggcgaggcgctggcacccgtcgccgagttcatcagcgaccagggcgcgacgcccgccatccagctcgcccacgccggccgaaaggccggtaccgcgcgcatctggggcgacgacagcggccccgtcccgcttgacgagggtggctgggacccggtcgcaccgagcgccgatccctacccctacgaggacgacgagcgcgacacccggaagctctccacggcggacatagaagacgtcgtggaggcgttccgcgacgccgcgcggcgcgccaacgaggccggcttcgaggtcgcggagatccacgccgcccacggctacctcatccaccagttcctgtcgccggtgtcgaaccaccgcgacgacgagtacggcggcagcttcgagaaccgcacgcggctggcccgcgaagtcacgtcggcggtccgcgaggagtggcccgacgacaagcccgtgttcgtgcgcatctccgcgaccgactggatcgacgaccgcgactcctggaccgtcgaggagtccgtccagctcgctgacgacctgcacgcgctgggcgcggacctgatcgacgtctccaccgccggcatccaccccgaccaggacatccagtccggcgggcccaactaccagctgcagttcgccgagcgcatcaacgccgacaccgagcgcgacgtcgccgtcggcaccgtgggcggcatccagagcgccgagcaggccgacgccatcgtgcgcaacgaccgcgccgacctcgcgatcgtgggtcgggagttcctccgcgatccgtacttccccctgcacgccgcccgcgaactcggccgcgaggacgccgccgacgtgcccccgcagtaccgccgcgggttccagtga

SEQ ID NO: 29523 - protein, 366 aa, Halobacterium sp. NRC-1
MADSFSPLELRDTTIRNRFAMSPMCQYSCEDRDGLATDWHRVHLGSRAVGGAGVVMTEATAVEERGRISPEDLGIWSDEHGEALAPVAEFISDQGATPAIQLAHAGRKAGTARIWGDDSGPVPLDEGGWDPVAPSADPYPYEDDERDTRKLSTADIEDVVEAFRDAARRANEAGFEVAEIHAAHGYLIHQFLSPVSNHRDDEYGGSFENRTRLAREVTSAVREEWPDDKPVFVRISATDWIDDRDSWTVEESVQLADDLHALGADLIDVSTAGIHPDQDIQSGGPNYQLQFAERINADTERDVAVGTVGGIQSAEQADAIVRNDRADLAIVGREFLRDPYFPLHAARELGREDAADVPPQYRRGFQ

SEQ ID NO: 29524 - DNA, 1098 bp, Escherichia coli O157:H7 EDL933
  CDS (1)..(1098): transl_table=11
atgtcatctgaaaaactgtattccccactgaaagtgggcgcaataactgcggcaaaccgtatttttatggcaccgctgacgcgtctgcgcagtattgaaccgggtgacatccctaccccgttgatggcggaatactatcgccaacgtgccagtgccggtttgattattagcgaagccacgcaaatttctgcccaggcaaaagggtatgctggtgcacctggcatccatagtccggaacaaattgccgcatggaaaaaaattaccgctggcgttcatgctgaaaatgggcatatggccgtacagctgtggcacaccggacgcatttctcacgccagcctgcaacctggcggccaggcaccagtagcgccttcagcacttagcgcgggaacacgtacttctctgcgcgatgaaaatggtcaggcgatccgtgttgaaacatccatgccgcgtgcgcttgaactggaagagattccaagtatcgtcaatgatttccgtcaggctattgctaacgcgcgtgaagccggttttgatctggtagagctccactctgctcatggttatttgctgcatcagttcctttctccttcttcaaaccatcgtaccgatcagtacggcggcagcgtggaaaatcgcgcacgtttggtactggaagtggtcgatgccgggattgaagaatggggtgccgatcgcattggcattcgcgtttcgccaatcggtactttccagaacacggataacggcccgaatgaagaagccgatgcactgtatctgattgaacaactgggtaaacgcggcattgcttatctgcatatgtcagaaccagattgggcggggggtgaaccgtatactgatgcgttccgcgaaaaagtacgcgcccgtttccacggtccgattatcggcgcaggtgcatacacagtagaaaaagctgaaacgctgatcggcaaagggttaattgatgcggtggcatttggtcgtgactggattgcgaacccggatctggtcgcccgcttgcagcgcaaagctgagcttaacccacagcgtgctgaaagtttctatggtggcggtgcggaaggctacactgattacccgacgttgtaa

SEQ ID NO: 29525 - protein, 365 aa, Escherichia coli O157:H7 EDL933
MSSEKLYSPLKVGAITAANRIFMAPLTRLRSIEPGDIPTPLMAEYYRQRASAGLIISEATQISAQAKGYAGAPGIHSPEQIAAWKKITAGVHAENGHMAVQLWHTGRISHASLQPGGQAPVAPSALSAGTRTSLRDENGQAIRVETSMPRALELEEIPSIVNDFRQAIANAREAGFDLVELHSAHGYLLHQFLSPSSNHRTDQYGGSVENRARLVLEVVDAGIEEWGADRIGIRVSPIGTFQNTDNGPNEEADALYLIEQLGKRGIAYLHMSEPDWAGGEPYTDAFREKVRARFHGPIIGAGAYTVEKAETLIGKGLIDAVAFGRDWIANPDLVARLQRKAELNPQRAESFYGGGAEGYTDYPTL

SEQ ID NO: 29526 - DNA, 1113 bp, Deinococcus radiodurans R1
  CDS (1)..(1113): transl_table=11
atgaccgtgtcttccgccgctgcacctcaacccgccagtcccgccgcgccgctgctgtttaccccgctgaaacttcgcagcctggaactgcccaaccgggtggtcgtctcgcccatgtgcacctactcggcgaccgacggcgtcgccaacgaatttcacctcgtccacctcggccagtacgcgctcggcggggcagggctgattctggccgaggccaccgccgtctcgcccgagggccgcatcacccccgaggacctgggcctgtgggacgaccgccagatcgtgccgctgggccacatcactgatttcgtgcaccagcacggcgggcacattggggtgcagctcgcgcacgccggacgtaaggcgagcacctacgccccctggcgcggcaagggcgcggtgcccgccgagttgggcggctggcaggtcatcggacctgacgagaacagctttcacgacctcttccccaccccggcgatgatgggcgccgacgagctgcgcggcgtggtggacgccttcagtgccgccgcccgccgcgctcaggtcgcggggttcgacgctgtggaagtccacgccgcgcacggctacctgctgcaccagttcctctcgccgctggccaacacccgcaccgacgattacggcggctccttcgaaaaccgcacccggctgctgctcgaagtcgtccgcgccgtgcggcacgtctggcccgcccacctgccgctgttcgtgcgcctgagcgccacggactgggccgagggcggctgggacctggaacagacggtgcaactcagcaaactgctcaagtacgagggcgtggacgtgctcgacatcagcagcgggggattgaccgccgcgcagcagatcgaggtcggccccggctatcaggtgccgtttgccgccgccgtgagccgcgccgaaaccgaaatctcggtgatggcggtcggcctcatcgagacgggcgcgcaggccgaggccatcttgcaggcaggcgacgccgacctgatcgcgctcggccgccccttcctgcgcgacccccactgggcgcagcgcgcggcgcgggaactcgggttgcgcccggtgtccatcgaccagtacgcgcgggcggggtggtaa

SEQ ID NO: 29527 - protein, 370 aa, Deinococcus radiodurans R1
MTVSSAAAPQPASPAAPLLFTPLKLRSLELPNRVVVSPMCTYSATDGVANEFHLVHLGQYALGGAGLILAEATAVSPEGRITPEDLGLWDDRQIVPLGHITDFVHQHGGHIGVQLAHAGRKASTYAPWRGKGAVPAELGGWQVIGPDENSFHDLFPTPAMMGADELRGVVDAFSAAARRAQVAGFDAVEVHAAHGYLLHQFLSPLANTRTDDYGGSFENRTRLLLEVVRAVRHVWPAHLPLFVRLSATDWAEGGWDLEQTVQLSKLLKYEGVDVLDISSGGLTAAQQIEVGPGYQVPFAAAVSRAETEISVMAVGLIETGAQAEAILQAGDADLIALGRPFLRDPHWAQRAARELGLRPVSIDQYARAGW

SEQ ID NO: 29528 - DNA, 1107 bp, Xylella fastidiosa 9a5c
  CDS (1)..(1107): transl_table=11
atggctgacacgtcatccatgccgtccatcgtcggcttgttggagcccacaaccttcggggccattcctctgaacaatcgagtggtcatggcgccaatgacccgcctgcgggcgcaggccgatggtgcgccgggcgacctgatggtggagtactaccgtcaaagggccggcatggggttgatcgtgaccgaggggacgtaccccagcctggagtcccagacgggtgtgggccagcctgggatcgccacggaagagcaggctggcggctggcggaagatgaccgatgccgtgcatctggcgggaggccacatcgtgcttcagatcatgcacggtggccgaaccgcacatccgggcgtcaacggtggtcgccgcgtcatcgcgcccagcgccgtgacgctcggcggtgaggtgtacacggcgaatgggaaagaagccttcacgacgcccgcccccatggcggaagccgacatccgggacgtgatcgcggagcatgtcgccgccgcgcagcgtgccgtcgccgccgggttcgatggcgtggaaatacatggcgcgaacggctacctggggcaacagttcctgtcgccggcgtcgaaccagcggactgaccagtatggtggctccccggagaaccgcgcccgcttcgtggtggaactggtccaggcggttgccgaggcggtcggcccgggtcgagtgggactgaggatctcccctgagcacaactatcaggagaccttcgagcccgaccgcagcgacgtacttgccacctacggggcactgctggacgccttgcgcccgctcggcctggcgtatctgtccgtgttgcaccaagagccgactggagccctggtggaagagcttgcccgccgttttgcaggcaaggtcgccgccaacagcggattcgcgaccttcacctcgctcgaagaggctgaacagatcgtcgcggcaccgttcatcgatgcggtcgtcgtaggccgggccgcactcgccaatcccgatctcatcgagcgatggaaaagcgagcagcccctgaccgaacctcgatacgaccttttctatacgcacgacgcggcgggctacaccgactacccgactttggccgggcgctga

SEQ ID NO: 29529 - protein, 368 aa, Xylella fastidiosa 9a5c
MADTSSMPSIVGLLEPTTFGAIPLNNRVVMAPMTRLRAQADGAPGDLMVEYYRQRAGMGLIVTEGTYPSLESQTGVGQPGIATEEQAGGWRKMTDAVHLAGGHIVLQIMHGGRTAHPGVNGGRRVIAPSAVTLGGEVYTANGKEAFTTPAPMAEADIRDVIAEHVAAAQRAVAAGFDGVEIHGANGYLGQQFLSPASNQRTDQYGGSPENRARFVVELVQAVAEAVGPGRVGLRISPEHNYQETFEPDRSDVLATYGALLDALRPLGLAYLSVLHQEPTGALVEELARRFAGKVAANSGFATFTSLEEAEQIVAAPFIDAVVVGRAALANPDLIERWKSEQPLTEPRYDLFYTHDAAGYTDYPTLAGR

SEQ ID NO: 29530 - DNA, 1122 bp, Sinorhizobium meliloti 1021
  CDS (1)..(1122): transl_table=11
atggcctctctcttcgacccgatcacgatcggcgatatcagcctcagcaaccgcgtggtgatggcacctctgacccggaaccgttcaccccaggcagtgcccaatgatcttaacgtcgcctattacgagcagcgcgcatccgccggcctgctgatcaccgaagggacggcaataagccaccagggccagggctatgccgacgtgcccgggctttacaaaccggaggccctcgccggctggcgcaaggtcacggattcggtccacaaagccggtggcaagatcgtcgtgcagatgtggcatgtcgggcggatatcccacgactcgctccagccgcagggcggcaaaccggtcgccccttcggctatccgcgccaaatcgaagacctacctcgtcaatcccgatgggacgggcagctttgccgaaacctccgagccgagggcgctcgaaccggcggagatcgccggcatcgtcgaggattaccgcaaggcctctcgggccgcgatcgaagccggattcgacggcgtcgagatccatgctgccaacggctatctgatcgaccagttcctgcgctccggctccaatgaacgcacggacgcctatggcggctcgatcgagaaccgcgcccgctttctcttcgaggtggtcgatgccgttaccaaggagatcggcgctggccgggtcgggatccgcatctctcccgtgacccccgccaacgacgccttcgatccggacccgcagccgctcttcacctatgtcgtcgaaggcctcgcccgatatccgctcgcctatgtgcacgtcatcgaaggcgccaccggcggagcgcgtgaccaccagcagggcgatcgccccttcgactacacaagcctccgtgccgcctacgcagcggccggcggcagggcggcctggatgacgaacaacggatacgatcgcggtctggcgctgaagacggtcgaaagcggcgaagccgatttggttgctttcggcaaacccttcatcgccaatccggatctcgttcgtcgtttgagagacaacgtggccctgaatgcaccggaccaggcgaccttctatggcggtggcgccaagggttatacggattatccgtcgctcgaaaacgtcgcctga

SEQ ID NO: 29531 - protein, 373 aa, Sinorhizobium meliloti 1021
MASLFDPITIGDISLSNRVVMAPLTRNRSPQAVPNDLNVAYYEQRASAGLLITEGTAISHQGQGYADVPGLYKPEALAGWRKVTDSVHKAGGKIVVQMWHVGRISHDSLQPQGGKPVAPSAIRAKSKTYLVNPDGTGSFAETSEPRALEPAEIAGIVEDYRKASRAAIEAGFDGVEIHAANGYLIDQFLRSGSNERTDAYGGSIENRARFLFEVVDAVTKEIGAGRVGIRISPVTPANDAFDPDPQPLFTYVVEGLARYPLAYVHVIEGATGGARDHQQGDRPFDYTSLRAAYAAAGGRAAWMTNNGYDRGLALKTVESGEADLVAFGKPFIANPDLVRRLRDNVALNAPDQATFYGGGAKGYTDYPSLENVA

SEQ ID NO: 29532 - DNA, 1095 bp, Agrobacterium tumefaciens str. C58
  CDS (1)..(1095): transl_table=11
atgactgacaagacacttttcgaaccctacgccctcggcgctatcagcctttcaaaccggatcgtcatggccccgctcacccgcaaccgggcaggggcgggtttcgtgcccggcgatctgaccgccgagtattacacccagcgcgcttccgcagggctgatcatctccgaagccacccagatttcgcagcagggacaaggctatcaggacacacccggcatctacacccgggcgcagatcgacggctggcgcaaggtgaccgcagccgtgcacgaaaaaggcggacgcatcgtgctgcagctgtggcatgttggccgcatcagccatatcgacctccagcccaatggtggccagccagtcgcgccgtccgccattcgcgccgcgaccaagacctttgtcaacaatgccttcgtcgatgtatccgagccccgtgcactcgagattgaggaactcgccggcatcgtcaacgacttccgcaaggctgccgccaatgccatcgatgccggtttcgatggggtcgaaattcacggggcgaatggctatctcctggagcagtttgccaaggacggtgcaaatgtccgcaccgatgcctatggtggctccgtggaaaaccgcgcgcgtctgatgctggaagtcaccgctgcggtggcgcaggaaatcgggcctgcgcgcactggtatcaggatctcgccagtctcgcccgccaacggtatctcctgtagcgatgcccaggcgcagtatgactatatcgtcgatcagctcgatgcgctcggcgtcgcctatatccatgtcgttgaaggtgcgacgggcggcccgcgcgacgtcgcacccttcgattatggatcgttgcgccgccgcttctccaagacctatatagccaataatggctacgatcttgagctggcagcgacgcatatagccgagggcaaggcggatctcatcgctttcggtcgtccgttcattgccaatccggatttggtgaaacggttgcagagcggcgctccgctggctgagatcgatcctgccaccatctatggcggcggtgctgagggctacacggattatccccgcttcaacgaggcttccggcagttga

SEQ ID NO: 29533 - protein, 364 aa, Agrobacterium tumefaciens str. C58
MTDKTLFEPYALGAISLSNRIVMAPLTRNRAGAGFVPGDLTAEYYTQRASAGLIISEATQISQQGQGYQDTPGIYTRAQIDGWRKVTAAVHEKGGRIVLQLWHVGRISHIDLQPNGGQPVAPSAIRAATKTFVNNAFVDVSEPRALEIEELAGIVNDFRKAAANAIDAGFDGVEIHGANGYLLEQFAKDGANVRTDAYGGSVENRARLMLEVTAAVAQEIGPARTGIRISPVSPANGISCSDAQAQYDYIVDQLDALGVAYIHVVEGATGGPRDVAPFDYGSLRRRFSKTYIANNGYDLELAATHIAEGKADLIAFGRPFIANPDLVKRLQSGAPLAEIDPATIYGGGAEGYTDYPRFNEASGS

SEQ ID NO: 29534 - DNA, 1098 bp, Salmonella enterica subsp. enterica serovar Typhi str. CT18
  CDS (1)..(1098): transl_table=11
atgtcatcagcaaaactgtttacccccctcaaggtgggtgccatcacggcgacaaatcgcgtatttatggcgcctttgacgcgtttgcggagtattgaaccgggcgacattcctacgccgttaatggcggaatattaccgtcaacgcgccagcgccggattgatcatcagcgaagccacacaaatctccgcgcaggcgaaaggctatgccggcgcaccgggattacacagcgatgagcagatcgccgcctggaaaaaaatcactcagggagtccatgcccagggcggccatatggcggtgcaactgtggcatacgggccgtatttcacacgccagcctgcaaccaggcggacaagcgcccgtcgcgccatccgctatcaatgcgggaacccgcacctctttgcgtgacgaaaacggccaggccatccgcgtagaaacttccacgccgcgcgcgctggatactcatgagatccccgggatcgtcaacgatttccgccaggctatcgccaatgcccgagaggcaggcttcgatctggtggagctgcactccgcgcacggttatctgctgcaccagttcctctcaccgtcttctaatcaccgtaccgatcggtacggcggcagcgtagagaatcgcgcccgtctggtgctggaggtggttgatgccggcattaaggaatggggcgcggaccgtatcggcatccgcctttctcctgtcggcactttccagaatgtcgataacggcccgaatgaagaagctgacgccctttatctgattgaagcgttaggcaaacgcggcatcgcttatctgcatatgtctgaaccagactgggcgggcggcgaaccgtacagcgacgcgttccgtgaaaaagtgcgcgcgcgtttccacggtcccatcatcggcgctggcgcctatacgccagaaaaagcggaagatctgatcgaaaaagggctgattgacgccgtggcgtttggtcgcgattacatcgctaacccggatctggtggcgcgtctgcaacgtaaagcggaacttaatccacagcgtcccgaaagtttttatggcggcggcgcggaaggctacactgactaccctactctgtaa

SEQ ID NO: 29535 - protein, 365 aa, Salmonella enterica subsp. enterica serovar Typhi str. CT18
MSSAKLFTPLKVGAITATNRVFMAPLTRLRSIEPGDIPTPLMAEYYRQRASAGLIISEATQISAQAKGYAGAPGLHSDEQIAAWKKITQGVHAQGGHMAVQLWHTGRISHASLQPGGQAPVAPSAINAGTRTSLRDENGQAIRVETSTPRALDTHEIPGIVNDFRQAIANAREAGFDLVELHSAHGYLLHQFLSPSSNHRTDRYGGSVENRARLVLEVVDAGIKEWGADRIGIRLSPVGTFQNVDNGPNEEADALYLIEALGKRGIAYLHMSEPDWAGGEPYSDAFREKVRARFHGPIIGAGAYTPEKAEDLIEKGLIDAVAFGRDYIANPDLVARLQRKAELNPQRPESFYGGGAEGYTDYPTL

SEQ ID NO: 29536 - DNA, 1098 bp, Salmonella typhimurium LT2
  CDS (1)..(1098): transl_table=11
atgtcatcagcaaaactgtttacccccctcaaggtgggtgccatcacggcgacaaatcgcgtatttatggcgcctttgacgcgtttgcggagtattgaaccgggcgacattcctacgccgttaatggcggaatattaccgtcaacgcgccagcgctggattgatcatcagcgaagccacacaaatctccgcacaggcgaaaggctatgccggcgcaccgggattacacagcgatgagcagatcgccgcctggaaaaaaatcactcagggagtccatgcccagggcggccatatggcggtgcaactgtggcatacgggccgtatttcacacgccagcctgcaaccaggcggacaagcgcccgtcgcgccatccgctatcaatgcgggaacccgcacctctttgcgtgacgaaaacggccaggccatccgcgtagagacttccacgccgcgcgcgctggatactcacgagatccccgggatcgtcaacgatttccgccaggctatcgccaatgcccgagaggcgggcttcgatctggtggagctgcattccgcgcacggttatctgctgcaccagttcctctcaccgtcttctaatcaccgtaccgatcggtacggcggcggcgtagagaatcgcgcccgtctggtactggaggtggttgatgccggcattaaggaatggggcgcggaccgtatcggcatccgcctttctcctgtcggcactttccagaatgtcgataacggcccgaatgaagaagctgacgccctttatctgattgaagcgttaggcaaacgcggcatcgcttatctgcatatgtctgaaccagactgggcgggcggcgaaccgtacagcgacgcgttccgtgaaaaagtgcgcgcgcgtttccacggtcccatcatcggcgctggcgcctatacgccagaaaaagcggaagatctgatcgaaaaagggctgattgacgccgtggcgtttggtcgtgattacatcgctaacccggatctggtagcgcgtctgcaacgtaaagcggaacttaatccacagcgtcccgaaagtttttatggcggcggcgcggaaggctacactgactaccctactctgtaa

SEQ ID NO: 29537 - protein, 365 aa, Salmonella typhimurium LT2
MSSAKLFTPLKVGAITATNRVFMAPLTRLRSIEPGDIPTPLMAEYYRQRASAGLIISEATQISAQAKGYAGAPGLHSDEQIAAWKKITQGVHAQGGHMAVQLWHTGRISHASLQPGGQAPVAPSAINAGTRTSLRDENGQAIRVETSTPRALDTHEIPGIVNDFRQAIANAREAGFDLVELHSAHGYLLHQFLSPSSNHRTDRYGGGVENRARLVLEVVDAGIKEWGADRIGIRLSPVGTFQNVDNGPNEEADALYLIEALGKRGIAYLHMSEPDWAGGEPYSDAFREKVRARFHGPIIGAGAYTPEKAEDLIEKGLIDAVAFGRDYIANPDLVARLQRKAELNPQRPESFYGGGAEGYTDYPTL

SEQ ID NO: 29538 - DNA, 1209 bp, Nostoc sp. PCC 7120
  CDS (1)..(1209): transl_table=11
gtgtctgatgaagcagagaggcaaaggggaaataacctgtataagaactctcctctgctccctgtttctatctctcaagtatccacatcccaattacgagaaactgagattatgtctaccaacatcaacctattctcttcctaccaattgggagaactagaattacccaaccggatagtgatggctcctttaaccagacaaagagctggtgagggaaatgtaccgcatcaacttaatgctatctactatggtcaacgtgcttcagcaggattaattattgccgaagctacccaggtgacaccccaaggacaagggtatccccatacaccaggcatccattccccagaacaagtagcagggtggaaactagtaactgatactgtacatcaacaagggggcagaatttttctgcaactgtggcacgtcggcagaatatctcaccctgacttgcagccagatgggggattacctgtagcaccttcagccattgcgcctaaaggtgaggtattaacttatgaaggcaagaaaccttatgttacgcctcgtgctttggacacatcagaaattcccgctattgtcgaacaatatcgccaaggggctgcaaacgccctagcggctgggtttgatggtgtagaaattcatgctgccaatggttatttaatcgaccagtttcttagagatgggacgaatcaacgtacagacgagtatgggggtgcgattgagaatcgcgcccgacttttattagaagtaaccgaggcgataacaagtgtgtgggattcccaaagggtaggagtcagactatcgcctagtgggacatttaacgatatccgtgactctcatcctttagaaacatttggttacgtagctcaagcactgaaccgcttcaacttatcctatttacatatctttgaagctatagacgcagacattagacatggtggcacagttgtacctactagccatctacgcgatcgctttacaggtacactcattgttaatggtggttatacccgtgaaaaaggcgatactgtcatagccaacaaagcagcagatttagttgcctttgggacgctgtttatctccaatcctgatttacctgaacgcctagaggtgaacgcaccactcaatcaggcagaccccacaaccttttatggtggtggtgaaaaaggctatacagattatccatttttagcagttgctaataagtaa

SEQ ID NO: 29539 - protein, 402 aa, Nostoc sp. PCC 7120
MSDEAERQRGNNLYKNSPLLPVSISQVSTSQLRETEIMSTNINLFSSYQLGELELPNRIVMAPLTRQRAGEGNVPHQLNAIYYGQRASAGLIIAEATQVTPQGQGYPHTPGIHSPEQVAGWKLVTDTVHQQGGRIFLQLWHVGRISHPDLQPDGGLPVAPSAIAPKGEVLTYEGKKPYVTPRALDTSEIPAIVEQYRQGAANALAAGFDGVEIHAANGYLIDQFLRDGTNQRTDEYGGAIENRARLLLEVTEAITSVWDSQRVGVRLSPSGTFNDIRDSHPLETFGYVAQALNRFNLSYLHIFEAIDADIRHGGTVVPTSHLRDRFTGTLIVNGGYTREKGDTVIANKAADLVAFGTLFISNPDLPERLEVNAPLNQADPTTFYGGGEKGYTDYPFLAVANK

SEQ ID NO: 29540 - DNA, 1137 bp, Ralstonia solanacearum GMI1000
  CDS (1)..(1137): transl_table=11
atgttccagtctctctttccaggagccgagatgacacaacaactgctttctccgatccaagtcggccagacggccctcgccaaccgcgtcgtgatggcgccgctcacgcgctcgcgcgcagcccagcccggcgacgtgcccaccgagctcaacgggacgtactacgcgcagcgcgccaccgcgggcctgatcgtcaccgaggccacgcaggtctcccggcagggccagggctatgcctggacgccgggcatgtataccgatgcgcaggaagccggctggaaggccgtggtcgatgccgtgcatgccaagggcggccgtatttcgcaacagttgtggcatgtgggccgcatctcgcacacgctgctgcaggagggcggccaggcgccggtcgcaccgtcggcgattgtcgcccagggcgcgcagagcttcgtcgtgcagccggacggcacgcccgccaacgtgccgaccagcgagccgcgcgcgctggccacggaggagatccccggcatcatcgcgcagtaccgccaggccgtgcagcgcgcccgccgcgccggtttcgacttcgtcgaaatccatgccgccaacggctacctgctgcatcagttcctgtcgaccaacagcaaccagcgcgccgaccagtacggcggctcgctggagaaccgggcgcggctgatcctggaggtggtcgacgcggccatcgccgagatcggcgccgagcgcgtgggcatccgcctgtcgccgcacttcgtcgcgcacgacatcgccgatgccgaggccgagaccagcgcgctgtacctcgcgcgtgaactgacccggcgcggcgtcgcctacctgcatatcgccgagccggactgggcgggcggcccggagctgtcggacgcgttccgccggcaactgcgcgatgcgttcaagggtgcactgatcgtctgcggccagtacaccgcggaagagggcgagcagatgatcgcctcgggcctggccgatgccgtcgcctttggccgccccttcatcgccaatccggacctggtggcgcgcttccgtgccggcgccggcctgaacacgccggaccgctcgaccttctacggcggtcaggagaagggctacaccgactacccgacactggaagaagccgcctga

SEQ ID NO: 29541 - protein, 378 aa, Ralstonia solanacearum GMI1000
MFQSLFPGAEMTQQLLSPIQVGQTALANRVVMAPLTRSRAAQPGDVPTELNGTYYAQRATAGLIVTEATQVSRQGQGYAWTPGMYTDAQEAGWKAVVDAVHAKGGRISQQLWHVGRISHTLLQEGGQAPVAPSAIVAQGAQSFVVQPDGTPANVPTSEPRALATEEIPGIIAQYRQAVQRARRAGFDFVEIHAANGYLLHQFLSTNSNQRADQYGGSLENRARLILEVVDAAIAEIGAERVGIRLSPHFVAHDIADAEAETSALYLARELTRRGVAYLHIAEPDWAGGPELSDAFRRQLRDAFKGALIVCGQYTAEEGEQMIASGLADAVAFGRPFIANPDLVARFRAGAGLNTPDRSTFYGGQEKGYTDYPTLEEAA

SEQ ID NO: 29542 - DNA, 1113 bp, Agrobacterium tumefaciens str. C58
  CDS (1)..(1113): transl_table=11
atgaccagtcttttcgaaccggcacaggccggcgatatcgcactcgccaaccgtatcgtcatggctcccctcacccgcaaccgttcgccgggggcaattcccaacaatctcaacgccacctattacgagcagcgcgccacggctgggctgatcgtcaccgaaggtacgccgatttcccagcagggtcagggttacgctgacgttccgggcctctacaagcaggaagcgatcgagggctggaaaaagatcaccgacggcgtgcactcggccggcggcaagatcgttgcgcagatctggcatgtgggccgcatttcccatacttcgctgcagccgcatggcggccagccggtcgcaccatcagccattcctgccaagtcgaagacctatatcatcaatgatgacggcaccggcgcctttgccgagacctccgagccccgcgcgctcaccatcgacgatatcggcctcatcctcgaggattatcgtagcggtgcacgcgcagccctggaggccggtttcgacggcgtcgaaatccatgccgccaacggttacctgatcgagcagttcctgaaatccagcaccaaccagcgcacggatgattacggcggctcgatcgaaaaccgcgcccgcttcctgctggaagttgtcgacgcggttgcggaagagatcggcgcgggccgcaccggcatccgcctctcccccgtcaccccggccaacgatattttcgaggccgatccgcagccgctttataattacgtggtggaagaactcggcaagcgcaatctcgccttcatccatgtggtcgaaggcgcaacgggcggaccgcgtgatttcaaacagggcgacaagccgttcgattacgcgaccttcaagggcgcctatcgcaatgcaggcggcaagggcctgtggattgccaataatggttacgaccgcgagagcgccatcgaagccgtggaaagcggcaaagtcgatgccgtcgccttcggcaaggccttcatcgccaatccggatctggtgcgtcgcctcaaagacaacgcgcccttgaacgaaccgaaccagccgaccttctatggcggcggagccgaaggttataccgactatccggcactcggctga

SEQ ID NO: 29543 - protein, 370 aa, Agrobacterium tumefaciens str. C58
MTSLFEPAQAGDIALANRIVMAPLTRNRSPGAIPNNLNATYYEQRATAGLIVTEGTPISQQGQGYADVPGLYKQEAIEGWKKITDGVHSAGGKIVAQIWHVGRISHTSLQPHGGQPVAPSAIPAKSKTYIINDDGTGAFAETSEPRALTIDDIGLILEDYRSGARAALEAGFDGVEIHAANGYLIEQFLKSSTNQRTDDYGGSIENRARFLLEVVDAVAEEIGAGRTGIRLSPVTPANDIFEADPQPLYNYVVEELGKRNLAFIHVVEGATGGPRDFKQGDKPFDYATFKGAYRNAGGKGLWIANNGYDRESAIEAVESGKVDAVAFGKAFIANPDLVRRLKDNAPLNEPNQPTFYGGGAEGYTDYPALG

SEQ ID NO: 29544 - DNA, 1116 bp, Brucella melitensis 16M
  CDS (1)..(1116): transl_table=11
atggcctcattgttcgaccccattaccatcggtgatctgaagcttgcaaaccgtatcgtcatggcgccgctgacgcgcaaccgctcgccgcacgccgtgcccaatgatttgaacgtcatctattacgaacagcgcgccagtgctggtcttatcatcaccgaggcaacgccgatcagccaacagggacagggctatgcggatgttccgggcctttattcggcggaacaacttgccggatggcggcgggtgagcgatgccgtgcataatgcgggcggcaagatcgtcgcgcagatgtggcatgtgggccgtatctcgcataattccctgcaaccgaacggcgagaagccggtcgccccgtcagcgatcacggccaagtcgaagacctatctggtccacccggacggcgctggcgaattcgtgccgacttccgaaccgcgtgcgctggaaaagagcgagcttccggggatcgttgcagactatgccagggcggccaaggatgcggttgagactgccggatttgatggcgtggagattcactcggccaatggctatctgatcgaccagttcctgcgtgggggcagcaatcagcgcaccgatgaatatggcggctcaatcgaaaatcgcgcgcgctttctgtttgaagttgtggatgccgtgacgaaggccattggggccggaaaagttggcattcgcctgtcgccggtcacgcccgccaatgatgcttccgatcccgatccgcaaccgcttttcgactatgtgatcgggaaactggcggcttgtggtctggcctatatccacatcatcgaaggggcaaccggtggtccgcgtgatttccagcaggggccgcagccttttgactatgcgcgcttcaagcaggtttatcgcgatgcgggcggcaaggctgcatggatggtcaataatggctatgatcgcaagatggcggaggaagaagtcgaggcggggcgtgcagacctcgtggctttcggcaagccgttcattgccaatcctgatctggtgcgccgcctgaaggaaaacgcgccgctgaacgaactcgaccagaaacatatgtatggtggcggggcaaagggctatacggattatcccgttctggcatga

SEQ ID NO: 29545 - protein, 371 aa, Brucella melitensis 16M
MASLFDPITIGDLKLANRIVMAPLTRNRSPHAVPNDLNVIYYEQRASAGLIITEATPISQQGQGYADVPGLYSAEQLAGWRRVSDAVHNAGGKIVAQMWHVGRISHNSLQPNGEKPVAPSAITAKSKTYLVHPDGAGEFVPTSEPRALEKSELPGIVADYARAAKDAVETAGFDGVEIHSANGYLIDQFLRGGSNQRTDEYGGSIENRARFLFEVVDAVTKAIGAGKVGIRLSPVTPANDASDPDPQPLFDYVIGKLAACGLAYIHIIEGATGGPRDFQQGPQPFDYARFKQVYRDAGGKAAWMVNNGYDRKMAEEEVEAGRADLVAFGKPFIANPDLVRRLKENAPLNELDQKHMYGGGAKGYTDYPVLA

SEQ ID NO: 29546 - DNA, 1101 bp, Methanosarcina acetivorans C2A
  CDS (1)..(1101): transl_table=11
atggtcatcatggcagaagacacggaccttttttcacagtatcggatgggcgatttaacgctgccaaaccgcatggtgatggcgccgatgactcgcagccgcgcaggggatgacgacatcccggtcccactgacggccacttactacgtgcagcgagcctcggccggcatgattatcaccgagggttcgcaggttagcccgcagggtgtaggcttcatgcatacaccgggcatatactctgcagcacaggccgccagctggaagaagataacggatgccgtccacaaggctggaggcaggattttcatccagctctggcacgtaggaagagtttcccactccgacttacttggtggcgctctgccggtcgctccatccgcactacccgtcgaaggctatatccacacaccgggtggaaaaaaaccaattccggtgcccagagccctaaaaaccgacgaggtgccggacattgtcaggcagttccggcaggcggcagagaacgccagagccgccggcttcgatggtgtagagatccatggcgctaatacctacctgctggatcaatttctgcggagcgggtccaacaaacgaaccgacaaatacggtggcagccttgagaaccgggcccgtctgccgcttgaggtcacaaaagccgtcatagaggtatggggtggcgaccgtgtcggctaccgtatctctccgcacaacatcgcacactctatgtcggacgcaaatcccggggagaccttttcctattttgccaaggagctgaacaaaacgggtctgggataccttcatttaatcgaacccataggaggccggtcggggttcgtgccacccgaggcacggcttgggcctattctgcgcagaatttttgaaaggacgttcatactgaacggtggctatggcctccaaagcgggaatgaagccattgacagcggtgaagctgacctgatagcctttggagtgcctttcctggccaatcctgacctgccagagcgtttcaggcagaatgcgcctctgaacgagccaaaattggataccttctacgtgggcggagagaaaggctatacggactatccggcactggtcaatagatga

SEQ ID NO: 29547 - protein, 366 aa, Methanosarcina acetivorans C2A
MVIMAEDTDLFSQYRMGDLTLPNRMVMAPMTRSRAGDDDIPVPLTATYYVQRASAGMIITEGSQVSPQGVGFMHTPGIYSAAQAASWKKITDAVHKAGGRIFIQLWHVGRVSHSDLLGGALPVAPSALPVEGYIHTPGGKKPIPVPRALKTDEVPDIVRQFRQAAENARAAGFDGVEIHGANTYLLDQFLRSGSNKRTDKYGGSLENRARLPLEVTKAVIEVWGGDRVGYRISPHNIAHSMSDANPGETFSYFAKELNKTGLGYLHLIEPIGGRSGFVPPEARLGPILRRIFERTFILNGGYGLQSGNEAIDSGEADLIAFGVPFLANPDLPERFRQNAPLNEPKLDTFYVGGEKGYTDYPALVNR

SEQ ID NO: 29548 - DNA, 1080 bp, Streptomyces coelicolor A3(2)
  CDS (1)..(1080): transl_table=11
atgagcgccctcttcgagcccttccgactccgtgacaccacgatcccgaaccggatctggatgccgccgatgtgccagtactccgcggcaccggaaggcccgtcggcgggtgtgcccggcgactggcacttcgcgcactacggcgcccgcgcggtgggaggcaccggcctgatcgtcgtggaggccacgggcgtgtcgcccgagggccgcatctccccgcaggacctcgggctgtggaacgacacgcaggtcgaggcgttccgccggatcacgggcttcctgcgctcgcagggcacggttccggcggtccagctggctcacgcgggccggaaggcctccaccgcgcagccctggaggggcggggcgccggtgggggcggacgcgtacggctggcagccgctggccccgagcgcactcgcgttcgacgagcggcatccggtgccgaccgagctgacggtcccgcagatccaggaagccgtcggccggttcgcggacgccgcacgccgggccctggccgccggtttcgagatcgccgagatccacggcgcccacggctacctgatccacgagttcctgtcgccgcactccaaccagcgcaccgacgcctacggcggctcgtacgcgaaccgcaccaggttcgccctggaggtcgtggacgcggtacgggaggtctggcccgacgacaagccgctgttcttccgcgtctcggcgaccgactggctggaggagggcggctggacgccggacgacaccgtccgcttcgcccgcgacctcgaggcccacggcatcgacctgctcgacgtgtccaccggcggcaacgtcccgcgcgtccggatcccgaccgggcccggctaccaggtcccgttcgccgcgcgcgtgaaggccggatccacgctgccggtcgccgccgtagggctgatcaccgagcccgggcaggccgagaagatcctggccaacggcgaggccgacgcggtgctgctgggccgcgagctgctgcgcaatccgtcctgggcccagcacgcggcgcgggagctgggcgtggacgcgcggatgccggaccagtacggctggggcatgtga

SEQ ID NO: 29549 - protein, 359 aa, Streptomyces coelicolor A3(2)
MSALFEPFRLRDTTIPNRIWMPPMCQYSAAPEGPSAGVPGDWHFAHYGARAVGGTGLIVVEATGVSPEGRISPQDLGLWNDTQVEAFRRITGFLRSQGTVPAVQLAHAGRKASTAQPWRGGAPVGADAYGWQPLAPSALAFDERHPVPTELTVPQIQEAVGRFADAARRALAAGFEIAEIHGAHGYLIHEFLSPHSNQRTDAYGGSYANRTRFALEVVDAVREVWPDDKPLFFRVSATDWLEEGGWTPDDTVRFARDLEAHGIDLLDVSTGGNVPRVRIPTGPGYQVPFAARVKAGSTLPVAAVGLITEPGQAEKILANGEADAVLLGRELLRNPSWAQHAARELGVDARMPDQYGWGM

SEQ ID NO: 29550 - DNA, 1074 bp, Streptomyces coelicolor A3(2)
  CDS (1)..(1074): transl_table=11
atgacgtccctcttcgacagttaccggctgggcgaactgacactgcccaaccggatggtcatggccccgatgtcgcgggtgcgtgccgccgggggcggcctggccacgccgtcgatggccacgtactacgcccagcgcgccaccgccggactgatcgtctccgagggagtgcagccgaacgaggtcggccagtccaacccggggaccccggggctgcacaccgacgagcaggtggccgcgtggcgccccgtcaccgccgccgtgcacaccaacggcgggcggatcttcgcgcagatcatgcacggcggccgcgtctcgcaccccgacaccacgggcatgctgccggtcggcccctcggccgtcccggccgtcggggaggtgttcacgccgaccgggccgcagcccgtgccgacgccccgcgccctggagaccgccgaagtgccggaacaggcccggtcctacgccgaagcggcccgccgcgccgtcgacgccggcttcgacggcgtcgagctgcacggcgccaacggctacctcatctcccagttcctctccacgaacgcgaacctgcgcaccgaccgctacggcggcccggtggcccaccggatccgcttcgccgtcgaggccgtgtccgcgaccgtcgaggccgtcggcgccgaccggaccggtatccgcctctccccggcgggcaccttctggggcgtcgaggagaccgacgtgctcgacctctacaccgagctgctcaccgagctgtcccgcctcggcatcgcctacgtgcacatcgaggccaccgccgacgaggagctgctggtcgccctgcgccgcgtgtggccgggcacgctcgtcatgaacccggtgctgccgatgggacccaagcagaccggccgcgaggacgccgaccactggctcgggctcggggcggacctcatcagcttcggccgcggcttcatcgccaacccggacctggtcgagcggctgcgcacgggcctgccggtggcgccggtcgacgagtccacgtactaccagggcggtgacgcgggctacctgacctacccggcgtaccagcacacggtctga

SEQ ID NO: 29551 - protein, 357 aa, Streptomyces coelicolor A3(2)
MTSLFDSYRLGELTLPNRMVMAPMSRVRAAGGGLATPSMATYYAQRATAGLIVSEGVQPNEVGQSNPGTPGLHTDEQVAAWRPVTAAVHTNGGRIFAQIMHGGRVSHPDTTGMLPVGPSAVPAVGEVFTPTGPQPVPTPRALETAEVPEQARSYAEAARRAVDAGFDGVELHGANGYLISQFLSTNANLRTDRYGGPVAHRIRFAVEAVSATVEAVGADRTGIRLSPAGTFWGVEETDVLDLYTELLTELSRLGIAYVHIEATADEELLVALRRVWPGTLVMNPVLPMGPKQTGREDADHWLGLGADLISFGRGFIANPDLVERLRTGLPVAPVDESTYYQGGDAGYLTYPAYQHTV

SEQ ID NO: 29552 - DNA, 1095 bp, Xanthomonas campestris pv. campestris str. ATCC 33913
  CDS (1)..(1095): transl_table=11
atgtccacttccactccttctccgttgttttcgccggtgcgcctgggcgcgctggatctgtccaaccgcgtgatcatggcgccgctgacgcgcaaccgcgccgttgctggcgcagtgccgtcgccgctggcggtggagtactacgcccagcgcgccactgccggcctgatcatcgccgaaggcacccagatcagcccgctcggccagggctacctggatacccccggcatccacacgcccgcgcaggtcgaaggctggcgcgcggtcaccgatgctgtgcaccggcagggcggcaagatcgcgctgcagctgtggcacgtgggccgcgtctcgcacaccagcctgttgccgccgggcgaagtgccggtggcccctagcgccatccgctccaccggcaagaccttcaccgcgcagggcttttctgatgtctccgagccgcgtgcactggcgctggaggaaattcccgcgctgatcgaggactaccgcgcagctgcgcgtaacgccatcgatgctggcttcgacggcgtggaagtgcacgcggccaacggctacctgatcgaccagttcctgcgcgacggctccaaccagcgcaccgatgcctacggcggcgatatcgaaaaccgcacgcgcctgctcgccgaagtggtgcaggccattgccgacgagatcggcgccgagcgcaccggtgtgcggctctcgccggtgacgccggtgtatgacatgcacgactccgacccgcaggccttgttcgagcgcgcggtggagcggctgaacctgatcggcgggctggctttcgtgcacgtgatcgagggcgccaccggcggcccgcgcgacaacatcgctttcgactacaccgcgctgcgggccaagttcgatggcgcatggatcagcaacaacggctatgacaaggcgatggccgaacaggcgatcagccgtggcgacaccgatgcggtctccttcggccgtgcctacattgccaacccggacctggtacgccgcctgcgcgaggacgcgccgctggcggaaccgaaccaggccacgctgtacggcggcggcgccgaaggctacaccgactacccggcactgccggcgtaa

SEQ ID NO: 29553 - protein, 364 aa, Xanthomonas campestris pv. campestris str. ATCC 33913
MSTSTPSPLFSPVRLGALDLSNRVIMAPLTRNRAVAGAVPSPLAVEYYAQRATAGLIIAEGTQISPLGQGYLDTPGIHTPAQVEGWRAVTDAVHRQGGKIALQLWHVGRVSHTSLLPPGEVPVAPSAIRSTGKTFTAQGFSDVSEPRALALEEIPALIEDYRAAARNAIDAGFDGVEVHAANGYLIDQFLRDGSNQRTDAYGGDIENRTRLLAEVVQAIADEIGAERTGVRLSPVTPVYDMHDSDPQALFERAVERLNLIGGLAFVHVIEGATGGPRDNIAFDYTALRAKFDGAWISNNGYDKAMAEQAISRGDTDAVSFGRAYIANPDLVRRLREDAPLAEPNQATLYGGGAEGYTDYPALPA

SEQ ID NO: 29554 - DNA, 1164 bp, Streptomyces coelicolor A3(2)
  CDS (1)..(1164): transl_table=11
atgcacgtgcccagcacagctccgcctcctgccacggcagcgccactgttcgggcccttcaccgtgggttcactggcgctggagaaccggatcgtcatggcgccgatgacacgagagctctcccctggaggagtacccgggcccgaggtggctgcgtactacgcgcgccgcgcccgaaacggcgtgggtctgatcatcaccgagggagcggccatcgggcacccctcttccgagcgtcgtgccgcagttccccggatccacagtgctgacgcgctggccggatggacgagagtgacccaggcagtccatgcggccggcggccggatcgcggcccaactcatgcacgtgggactggatccgctgttgtgggggatgactcccgcggagatggacgccgcctcaccggccgggttcgagctgctcagtccgtcgggcgtcgatccatcacagcccgcggcggccaccgtggggcgcgagatgagcgacgtggacatctcgagtgtgatcgaggcctatgctcgtgctgcagcggaggcccggcaggccgggttcgacgcaatcgagttgcacgccgctcacggctacctcatcgaccagttcttctgggcggtcaccaatcggcgcaaagaccgctacggcggggatctgtcggcccgcacgcgtttcggcgccgatgtcgtgcgggcctgccggcacgcagtgggagaggacttcccgatcttcctgcgattctcgcagtggaaggtcggccactacgcagcgcggctcgccgacagtccggacgagcttgcagccgtgctcggcccgctggtgcaggcgggggtggacgccttccactgctcgacgcgccggttctggcagcccgaattcgagggatcggacctcaatctggcgggctggacgaagaaggtgacgggccggcctgtcatcgcggtcggctcggtcgggctgaaggacagcgacttcctctcctatcttgacggcaagggagccgatgtcggagatgtgagtgtggtggccgacaggctcgcacagggcgagttcgatctcgtcgctgtggggcgtgccctgatcgccgatcccgcgtggcccgccaaggtgcggggcgggcgctcggccgacttgattcccttcgacgcgcgcatgctcaccagcctgcactga

SEQ ID NO: 29555 - protein, 387 aa, Streptomyces coelicolor A3(2)
MHVPSTAPPPATAAPLFGPFTVGSLALENRIVMAPMTRELSPGGVPGPEVAAYYARRARNGVGLIITEGAAIGHPSSERRAAVPRIHSADALAGWTRVTQAVHAAGGRIAAQLMHVGLDPLLWGMTPAEMDAASPAGFELLSPSGVDPSQPAAATVGREMSDVDISSVIEAYARAAAEARQAGFDAIELHAAHGYLIDQFFWAVTNRRKDRYGGDLSARTRFGADVVRACRHAVGEDFPIFLRFSQWKVGHYAARLADSPDELAAVLGPLVQAGVDAFHCSTRRFWQPEFEGSDLNLAGWTKKVTGRPVIAVGSVGLKDSDFLSYLDGKGADVGDVSVVADRLAQGEFDLVAVGRALIADPAWPAKVRGGRSADLIPFDARMLTSLH

SEQ ID NO: 29556 - DNA, 1101 bp, Xanthomonas axonopodis pv. citri str. 306
  CDS (1)..(1101): transl_table=11
ttgctgatgtccaaatccactcaatcccccttgttctccccggtgcgcctgggcgcactggatcttgccaaccgcgtgatcatggccccgctgacgcgcaaccgcgccgtcgccggccaggtgccctcgccgcttgctgccgagtactacggccagcgcgccaccgccggcctgatcgtggccgaaggcacccagatcagtccgctgggccagggctatctcgatacgcccggcatccataccaggcaacaaatcgagggctggcgcgctgtcactgacgaagtgcatcgtcgcggcggcaagatcgtgctgcagctgtggcacgttggccgcgtctcgcacaccagtgtgctgcccccgggcgaagtgccggttgcgcccagcgccattcgcgcggagggcaagaccttcaccccaaacgggttcgaagacgtgtccgagccgcgcgcgctggcattggacgaaatccccggcttgatcgaggactaccgcatcgcggcgcgcaacgcgatcgatgccggcttcgacggcgtggaagtgcatgcggccaacggctatctgctggaccagttcctgcgcgacagctccaacaagcgcaccgacgcctacggtggcgatatcgaaaaccgcacccgcctgcttgccgaggtggtgcaggcgattgccgatgaaatcggcgccgagcgcaccggcgtgcgcttgtcgccggtgaccccggtgtacggcgcgcacgactccgacccgcagccgctgttcgaacgtgcggtcgagcgcctcaacctgatcggcgggctggctttcgtgcacgtgatcgagggtgcgaccggcggcccgcgcgacaacatcgccttcgactacgccgcgctgcgcgccaagttcgacggcgcctggatcgccaacaacggctacgaccgcggcatgtccgaacacgccatcagcagcggctacgccgatgcgatcgcctatggccgcccgttcatcgccaacccggacctggtgcgtcgcctgcgcgagaacgcgccactggccgagctcgaccaggcaacgatgtacggcggcggtgccaagggctataccgattaccccgcattgcccgagtaa

SEQ ID NO: 29557 - protein, 366 aa, Xanthomonas axonopodis pv. citri str. 306
MLMSKSTQSPLFSPVRLGALDLANRVIMAPLTRNRAVAGQVPSPLAAEYYGQRATAGLIVAEGTQISPLGQGYLDTPGIHTRQQIEGWRAVTDEVHRRGGKIVLQLWHVGRVSHTSVLPPGEVPVAPSAIRAEGKTFTPNGFEDVSEPRALALDEIPGLIEDYRIAARNAIDAGFDGVEVHAANGYLLDQFLRDSSNKRTDAYGGDIENRTRLLAEVVQAIADEIGAERTGVRLSPVTPVYGAHDSDPQPLFERAVERLNLIGGLAFVHVIEGATGGPRDNIAFDYAALRAKFDGAWIANNGYDRGMSEHAISSGYADAIAYGRPFIANPDLVRRLRENAPLAELDQATMYGGGAKGYTDYPALPE

SEQ ID NO: 29558 - DNA, 1098 bp, Shigella flexneri 2a str. 301
  CDS (1)..(1098): transl_table=11
atgtcatctgaaaaactgtattccccactgaaagtgggcgcgatcacggcggcaaaccgtatttttatggcaccgctgacgcgtctgcgcagtattgaaccgggtgacattcctaccccgttgatggcggaatactatcgccaacgtgccagtgccggtttgattattagtgaagccacgcaaatttctgcccaggcaaaaggatatgcaggtgcgcctggcatccatagtccggagcaaattgccgcatggaaaaaaatcaccgctggcgttcatgctgaaaatggtcatatggccttgcagctgtggcacaccggacgcatttctcacgccagcctgcaacctggcggtcaggcaccggtagcgccttcagcacttagcgcgggaacacgtacttctctgcgcgatgaaaatggtcaggcgatccgcgttgaaacatccatgccccgtgcgcttgaactggaagagattccgggtatcgtcaatgatttccgtcaggccattgctaacgcgcgtgaagccgcttttgatctggtagagctccactctgctcacggttatttgctgcatcagttcctttccccttcttcaaaccatcgtaccgatcagtacggcggcagcgtggaaaatcgcgcacgtttggtactggaagtggtcgatgccgggattgaagaatggggtgccgatcgcattggcattcgcgtttcgccaatcggtactttccagaacacagataacggcccgaatgaagaagccgatgcactgtatctgattgaacaactgggtaaacgcggcattgcttatctgcatatgtcagaaccagattgggcggggggtgaaccgtatactgatgcgttccgcgaaaaagtacgcgcccgtttccacggtccgattatcggcgcaggtgcatacacagtagaaaaagctgaaacgctgatcggcaaagggttaattgatgcggtggcatttggtcgtgactggattgcgaacccggatctggtcgcccgcttgcagctcaaagctgagcttaacccacagcgtgccgaaagtttctacggtggcggcgcggaaggctataccgattacccgacgttgtaa

SEQ ID NO: 29559 - protein, 365 aa, Shigella flexneri 2a str. 301
MSSEKLYSPLKVGAITAANRIFMAPLTRLRSIEPGDIPTPLMAEYYRQRASAGLIISEATQISAQAKGYAGAPGIHSPEQIAAWKKITAGVHAENGHMALQLWHTGRISHASLQPGGQAPVAPSALSAGTRTSLRDENGQAIRVETSMPRALELEEIPGIVNDFRQAIANAREAAFDLVELHSAHGYLLHQFLSPSSNHRTDQYGGSVENRARLVLEVVDAGIEEWGADRIGIRVSPIGTFQNTDNGPNEEADALYLIEQLGKRGIAYLHMSEPDWAGGEPYTDAFREKVRARFHGPIIGAGAYTVEKAETLIGKGLIDAVAFGRDWIANPDLVARLQLKAELNPQRAESFYGGGAEGYTDYPTL

SEQ ID NO: 29560 - DNA, 1098 bp, Shewanella oneidensis MR-1
  CDS (1)..(1098): transl_table=11
atgacgcaatcactgtttcaaccgatcaccttgggtgcattaacactcaaaaaccgcatcgttatgccgccaatgactcgctcaagagccagtcagcctggcgatgtggccaatcatatgatggcaatctattatgctcagcgcgcgagtgcaggacttattgtctctgaaggcacacagatttctccaactgcaaaaggctatgcttggaccccagggatttatacgcctgaacagatcgcgggctggcgtattgtcactgaagccgtacatgctaaaggctgcgcgattttcgctcagttatggcatgtgggccgggtgactcatcctgacaatatcgatggtcaacaaccgatttcttcatcaacattaaaagcggaaaacgtaaaagtgtttgtcgacaacggcagtgatgaaccaggttttgttgatgtggcagtgcctcgggccatgacaaaggcggatattgcgcaagtgatcgccgattatcgtcaagcggcgctcaatgccatggaggctggctttgatggcattgaacttcacgccgctaatggctatttgatcaaccaatttattgattcagaagccaacaaccgcagcgatgagtacggcggtagccttgaaaatcgcctacgttttctagacgaagtggttgcggcattggtcgatgccatcggtgctgagcgtgtgggtgtgcgcttagcgccccttacgaccctcaatggcactgtggatgcggatcctattttgacctataccgctgccgctgcgttacttaacaaacatcgcattgtttatctgcatattgctgaggtggattgggacgatgcgcctgatacaccagtctcttttaaacgtgccttacgagaggcgtaccaaggcgttttgatttacgcgggtcgttataatgcggaaaaagcggagcaggctatcaacgatggtctagctgatatgattggttttggacgaccttttattgccaatccggatttacccgagcggctacgacacggctatcccttggctgagcatgtgccagcaacgctgtttggtggtggcgaaaaggggttaactgactatccaacttatcaagcttag

SEQ ID NO: 29561 - protein, 365 aa, Shewanella oneidensis MR-1
MTQSLFQPITLGALTLKNRIVMPPMTRSRASQPGDVANHMMAIYYAQRASAGLIVSEGTQISPTAKGYAWTPGIYTPEQIAGWRIVTEAVHAKGCAIFAQLWHVGRVTHPDNIDGQQPISSSTLKAENVKVFVDNGSDEPGFVDVAVPRAMTKADIAQVIADYRQAALNAMEAGFDGIELHAANGYLINQFIDSEANNRSDEYGGSLENRLRFLDEVVAALVDAIGAERVGVRLAPLTTLNGTVDADPILTYTAAAALLNKHRIVYLHIAEVDWDDAPDTPVSFKRALREAYQGVLIYAGRYNAEKAEQAINDGLADMIGFGRPFIANPDLPERLRHGYPLAEHVPATLFGGGEKGLTDYPTYQA

SEQ ID NO: 29562 - DNA, 1101 bp, Corynebacterium efficiens YS-314
  CDS (1)..(1101): transl_table=11
atgggcacccacgacaccgaccacccgctgtactcctcggtcaccctcggcaacgtcgagttgaacaaccgcatcgtcatggccccgctgacccggatcagggcgaacaccgacggcaccccgacggagatgatgcgggagtactacgcgcagcgcgcggacttcgggatgatcatcacggaaggcacctggccgatccgggagggccgcacctgggggcaacagccgggaatcgagaccgctgagcacgtcaccgcctggcgtgggatcaccgatgccgtccatgagcgtgggggcaagatcatcatgcagatcatgcacggtgggcgcatctcccacccagagctcaccggcacgggacgcaccgtcgcacccagtgccatcgccgccccggatcccatccgtatctccaccggcaaggtggatccggtgatcccgcatgaactcgggttggatgagctggccaccgtcatcgaccagttcgtcgccggtgcccgcaatgcaatggcggccggtatggatggtgtccagatccacggcgccaacggctacctgctccatgagttcctggcaccgacgaccaacctgcgcggtgatgcctatggtgccagcccggagaagcgcgccagcttcgtcgccgaggtggtcaccgcggtggcccgggagatcggtgccggcaacaccggtctgcgactgtccccgcagcacaatatccagggtgcaatcgaaaccgatgatgccgatgtcctggccacctacaccgccctggcgcgcagcctcaagcacctgggtctggcccatgtcgagctggtccaccacgagccggaaggcgagctgatccagacgctgcgccgggaattcggggcaccactcatcgtcaacaccggtttcagcaggttcacgcagcgggaggtggcggaggaactcgtcgacaagcaggccgccgacgcggtctcggtggggcgcctcgcactggccaaccccgacctggtgcgccgctggcagctggacggacccctcaacgagccgaacccggagaccttctatgtgggcggggagaaggggtacaccgactaccccgtgatggagtacagcctataa

SEQ ID NO: 29563 - protein, 366 aa, Corynebacterium efficiens YS-314
MGTHDTDHPLYSSVTLGNVELNNRIVMAPLTRIRANTDGTPTEMMREYYAQRADFGMIITEGTWPIREGRTWGQQPGIETAEHVTAWRGITDAVHERGGKIIMQIMHGGRISHPELTGTGRTVAPSAIAAPDPIRISTGKVDPVIPHELGLDELATVIDQFVAGARNAMAAGMDGVQIHGANGYLLHEFLAPTTNLRGDAYGASPEKRASFVAEVVTAVAREIGAGNTGLRLSPQHNIQGAIETDDADVLATYTALARSLKHLGLAHVELVHHEPEGELIQTLRREFGAPLIVNTGFSRFTQREVAEELVDKQAADAVSVGRLALANPDLVRRWQLDGPLNEPNPETFYVGGEKGYTDYPVMEYSL

SEQ ID NO: 29564 - DNA, 1050 bp, Pseudomonas putida KT2440
  CDS (1)..(1050): transl_table=11
atgaccacgcttttcgatccgatcaaactgggcgacctgcaactgcccaaccgtatcatcatggccccgctcacccgctgccgcgccgatgaaggccgcgtgcccaatgcgctgatggccgaatactacgtacaacgtgccagcgccgggctgatcctcagcgaggcgacttcggtcagccccatgggcgtcggctacccagatacccccggcatctggaacgatgaacaggtacgtggctggaacaacgtgacaaaggccgtgcatgctgcgggcggtcgcatcttcctgcagctgtggcacgtgggtcgtatctcccaccccagctatctgaatggcgaattgcctgtggcccccagcgcgatccagcccaagggccatgtgagcctggtgcgcccactgagtgactaccctaccccgcgggcgctggaaaccgaagaaatcaacgacatcgtcgaggcctaccgcagtggcgccgaaaatgccaaggctgccggtttcgatggtgtggagatccatggcgccaacggttacctgctcgaccagttcctgcaaagcagcaccaaccagcgcaccgaccgttacggtggctcgctggaaaaccgcgcgcgcctgttgctggaggtgaccgatgcggccattgaagtgtggggcgcgcagcgcgtaggtgtgcacctggcaccgcgagccgacgcccacgacatgggcgacgccgaccgcgccgagaccttcacctatgtggcccgagagctgggcaagcgcggcatcgccttcatctgctcgcgggagcgggaggccgacgacagcatcgggccgctgatcaaagaggcattcggtggcccgtacatcgtcaacgagcggttcgacaaggccagtgccaatgcggccctggccagtggcaaagcggatgccgtggcgtttggtgtgccgttcatcgccaaccccgacctgccggcacggctggcagcggatgcgccgttgaacgaggcacatcccgaaaccttctatggcaaggggccggtgggttacatcgattatccgcggttgtga

SEQ ID NO: 29565 - protein, 349 aa, Pseudomonas putida KT2440
MTTLFDPIKLGDLQLPNRIIMAPLTRCRADEGRVPNALMAEYYVQRASAGLILSEATSVSPMGVGYPDTPGIWNDEQVRGWNNVTKAVHAAGGRIFLQLWHVGRISHPSYLNGELPVAPSAIQPKGHVSLVRPLSDYPTPRALETEEINDIVEAYRSGAENAKAAGFDGVEIHGANGYLLDQFLQSSTNQRTDRYGGSLENRARLLLEVTDAAIEVWGAQRVGVHLAPRADAHDMGDADRAETFTYVARELGKRGIAFICSREREADDSIGPLIKEAFGGPYIVNERFDKASANAALASGKADAVAFGVPFIANPDLPARLAADAPLNEAHPETFYGKGPVGYIDYPRL

SEQ ID NO: 29566 - DNA, 1107 bp, Pseudomonas putida KT2440
  CDS (1)..(1107): transl_table=11
atgagcctgctgctcgagccttacaccctgcgtcagctgacgctgcccaaccgcatcgcggtctcgccgatgtgccagtattccgccatcgatggcctggccaacgattggcatctcgttcacttgggctgccgcgccgtgggtggcgctggcctggtcatcagcgaagccgttgcggtgactgccgatggtcgcatcaccgccgaagacctaggcttgtggaacgacgaccagatcgtcccgttgcagcgcatcacccgtttcattactgcgcaaggcgccgtgccgggtatccagttggcccacgccgggcgcaaggccagtacctatcggccctggctgggcaagcagggcagcgtgaagctcgaagacggcggctggcagcccgtggggccgtcgaaaatcgccttcgacccgcagcacacaccgccacgcgagttgagcaaggacgaaatccaggacgtgatcgacgccttcgtcgcatcgaccgagcgggcgctcaaggccggcttcaaggtggtcgagatccacgctgcccatggttatctgctgcaccagtttctctcaccgctgagcaaccagcgccgtgacgaatacggcagttgcttcgagaatcgaatccgcctgaccctgcaggtggtggaggccgtgcgcaaggtctggccggccgaattgccgctgttcgtgcgggtatcggcgactgactgggtcgaggacggctggaacccggatgaaaccgtcgaactggctcgtcgcctgcgggtgctgggtgtcgacctgatcgatgtgtcctccggtggtacctcggtcaacgccgaaattcctacaggccctggctatcagacgcgctttgcagagcgcgtgcgcaaggaagcagagatcgccaccggcaccgtcggcatgatcactgaacctgcccaggccgagcacattctgcgtaccgggcaggccgacgtgatcttcctggctcgggagctgctgcgcgatccttactggccgctgcatgccgatgatgatctgggtggcaacaaggccacttggccggcgcagtaccaaagggcgaccagccgcgccaatccgatacatgagtcggacttgcgggattaa

SEQ ID NO: 29567 - protein, 368 aa, Pseudomonas putida KT2440
MSLLLEPYTLRQLTLPNRIAVSPMCQYSAIDGLANDWHLVHLGCRAVGGAGLVISEAVAVTADGRITAEDLGLWNDDQIVPLQRITRFITAQGAVPGIQLAHAGRKASTYRPWLGKQGSVKLEDGGWQPVGPSKIAFDPQHTPPRELSKDEIQDVIDAFVASTERALKAGFKVVEIHAAHGYLLHQFLSPLSNQRRDEYGSCFENRIRLTLQVVEAVRKVWPAELPLFVRVSATDWVEDGWNPDETVELARRLRVLGVDLIDVSSGGTSVNAEIPTGPGYQTRFAERVRKEAEIATGTVGMITEPAQAEHILRTGQADVIFLARELLRDPYWPLHADDDLGGNKATWPAQYQRATSRANPIHESDLRD

SEQ ID NO: 29568 - DNA, 1125 bp, Pseudomonas putida KT2440
  CDS (1)..(1125): transl_table=11
atgacacaatcagaacttttcaaaaccactcagctgggcccatacaccctcaagaaccgtatcgtactgccgccactgacgcgttcgcgcagctcccaacccggcaacattgcgaacgacctcatggccacctattaccgtcagcgcagcggtgctggcttcatggtgaccgagggcacccagatcgaaccccggggacagggttacgcctggacacccggcattcatagcccagaacagatacaaggctggcgtaaggtcaccgacgctgttcacgccgaagggggggtgatctttgctcaactttggcatgtaggccgcgtgtcgcacacatcgctgcagcccggtggtgaagcgcccgtcgcgccatcagccatccgcgcggacaacgtcaaggtgttcatcgaaactggccccggcacgggtgcactggccgacccatcgaccccacgtgccctgtccaccaaggaggtaaaggaactggttaagctctacgcccaagcagcccgaaatgccttggacgcaggttttgacggggtggagcttcactgcgcgaacgggtacctggtaaaccagttcatttcggcccataccaaccagcgtgatgatgaatatggcggctcgctgcagaaccgtcttcgcttcctgcgcgaaatcaccctggccgttgctggtgtcgtcggcaaggagcgcatgggcgttcgcttcgccccgctgttcgcgaccacagacgaagaccgcgtatacctaggtctggtcgaagaagatccgcaccaaacctacatcgaggccgtgaagatcctcgaggaagtgggcattgcctacctgtcgctcgccgaagccgattgggaaaacgcccccgagctgcctgagacgttccgggaagatgttcgtaagtccttcagcggcaagattctctatgccggcaagtacaccgctgaacgaggaaatcgcgtgataaaagctggctggggcgacctgatcgcttttggtcgccccttcattgcgaaccccgacctgcccgctcgtatcgccaacaactggccgcttaacccagttgatccaagcagcatgtacggcggtaccgataagggctacaccgactacccgacttacaaatcctaa

SEQ ID NO: 29569 - protein, 374 aa, Pseudomonas putida KT2440
MTQSELFKTTQLGPYTLKNRIVLPPLTRSRSSQPGNIANDLMATYYRQRSGAGFMVTEGTQIEPRGQGYAWTPGIHSPEQIQGWRKVTDAVHAEGGVIFAQLWHVGRVSHTSLQPGGEAPVAPSAIRADNVKVFIETGPGTGALADPSTPRALSTKEVKELVKLYAQAARNALDAGFDGVELHCANGYLVNQFISAHTNQRDDEYGGSLQNRLRFLREITLAVAGVVGKERMGVRFAPLFATTDEDRVYLGLVEEDPHQTYIEAVKILEEVGIAYLSLAEADWENAPELPETFREDVRKSFSGKILYAGKYTAERGNRVIKAGWGDLIAFGRPFIANPDLPARIANNWPLNPVDPSSMYGGTDKGYTDYPTYKS

SEQ ID NO: 29570 - DNA, 1098 bp, Pseudomonas putida KT2440
  CDS (1)..(1098): transl_table=11
atgaaactcttgcaaccgctgcaaatcggcccactcaccctgcccaaccgcgtattcatggcccccctcacccgcctgcgcagcctggagccgggtgatgtacccaccgcgctgatggccgagtactaccgtcagcgtgccagtgctggcctgatcatcactgaagccacacaaatctccttccaggccaagggctattcgggctcgcccggcattcacagcgccgaacagatcgctgcctggaagcacatcaacgaaggcatccatgccgagggcggccacagcgccgtgcaggtgtggcacaccgggcgtgtgtcgcatacctccctgcaacctggcggcaaggcacccgtggccccttcggcactgccggcagatgcacgcaccaccctgcgtgacgcgcaaggcaacctgacacgcgtggaaacctccgccccccgggcgctcagcgaagcggagatcgctggcatcgtcgccgactttggccaggccgcgatcaatgcctgtgaagccggcttcgacttcatcgagttgcacgccgcccacggttacctgctgcaccagttcctcacccccagtgccaaccagcgcgaagaccgctacggcggcagcgttgaaaaccgtgcgcgcattgtgctggaggcggtggatgcggccattgccaactggagcgccgaccgggtcggtattcgcgtgttcccgttgggtggtttcaatggtgtggacaatggcgaagaccaggaggccgccggcctgtacctgatccgcgaactggccaagcgcaacctcgcctacctgcacctgtccgagccggactgggccggtggcaagccactgcgtgacgagttccgccaggccattcgcgccgcctaccccggggtgatcatcgcggccggtgcctataccgccgagaaaggcgaagacctcatcgggcggggtttgatcgatgccgtggcgttcgggcgcgcctacattgccaaccctgacctggtggagcgtctgcggctgcaagcgccgctgaatgagcaccgggcgaagttcgattacgccaatgggcctgaagggtatacggattatccgttcctgaagcaggcttga

SEQ ID NO: 29571 - protein, 365 aa, Pseudomonas putida KT2440
MKLLQPLQIGPLTLPNRVFMAPLTRLRSLEPGDVPTALMAEYYRQRASAGLIITEATQISFQAKGYSGSPGIHSAEQIAAWKHINEGIHAEGGHSAVQVWHTGRVSHTSLQPGGKAPVAPSALPADARTTLRDAQGNLTRVETSAPRALSEAEIAGIVADFGQAAINACEAGFDFIELHAAHGYLLHQFLTPSANQREDRYGGSVENRARIVLEAVDAAIANWSADRVGIRVFPLGGFNGVDNGEDQEAAGLYLIRELAKRNLAYLHLSEPDWAGGKPLRDEFRQAIRAAYPGVIIAAGAYTAEKGEDLIGRGLIDAVAFGRAYIANPDLVERLRLQAPLNEHRAKFDYANGPEGYTDYPFLKQA

SEQ ID NO: 29572 - DNA, 1128 bp, Bradyrhizobium japonicum USDA 110
  CDS (1)..(1128): transl_table=11
atgaaatttccggcgttgttcaaaccgttgcaggtcggtccgtacgagctggcgcatcgcgtcgcgatggcgccgctgacgcgcatgcgcgccgagcgcgacagcttttcgccccggccgctcaatgccgaatattacggccagcgcgcgacgccgggcggcttgctcatcgccgaagcctcgccggtgctctcgcacggccgcggcaatccggcgacgcccggcatctattcggaggcgcagatcgccggctggcgcaaggtgacggatgccgtgcatgccaagggcggcatcatcttcctccagctctggcatgtcggccgcgtctcgcattcgtccttccatggcggtgagctgccggtctcggcctcggcgattgcgatcaaggccgaaggcatgaaggcgatgacggccgaaggcaagatcgccgactacgagacgccgcgcgcgctggagacggacgaggtcaagggcatcgtcgaggcgttccggcagggcgcgaagaatgcgctcgctgccggctttgacggcgtcgagatccacggcgccaacggctatctgctcgagcagttcctgcaatcgcgcagcaaccagcgcaccgatcaatatggcggcggaatagagaatcgcgcgcggcttctgctcgatgtcacgcaggccgcgatcgacgtctggggtgccaaccgcgtcgccgtgcggctgtcgccgcacggtatcgccaacgattccggcgagcccgatccgatgccgctctacacccatgtcgtgaaggcgctcgacaagctcggtcttgcctatcttcacttcatcgagccgcgctccagcggcgccgggcgcgccgacgtccactgggagaatgtaccgtcggcgatggtgctgttccgcccactctacagcggcgtgctgatgacggccggcgggtttaccggcgagaccgcgaatgcggcgatcgccgacggccatgccgacatcatcgccttcggccgtatcttcatctccaaccccgatttgccgcggcgccttcggcacgattatccgatcacgccttacaatcgggccacgttctacggcggcgaggagaaggggtatacggattatccggcgtatgacgagctgacaccggcgtag

SEQ ID NO: 29573 - protein, 375 aa, Bradyrhizobium japonicum USDA 110
MKFPALFKPLQVGPYELAHRVAMAPLTRMRAERDSFSPRPLNAEYYGQRATPGGLLIAEASPVLSHGRGNPATPGIYSEAQIAGWRKVTDAVHAKGGIIFLQLWHVGRVSHSSFHGGELPVSASAIAIKAEGMKAMTAEGKIADYETPRALETDEVKGIVEAFRQGAKNALAAGFDGVEIHGANGYLLEQFLQSRSNQRTDQYGGGIENRARLLLDVTQAAIDVWGANRVAVRLSPHGIANDSGEPDPMPLYTHVVKALDKLGLAYLHFIEPRSSGAGRADVHWENVPSAMVLFRPLYSGVLMTAGGFTGETANAAIADGHADIIAFGRIFISNPDLPRRLRHDYPITPYNRATFYGGEEKGYTDYPAYDELTPA

SEQ ID NO: 29574 - DNA, 1083 bp, Pseudomonas syringae pv. tomato str. DC3000
  CDS (1)..(1083): transl_table=11
atgtccgagaaaacgcttttccaaccttatgccctgggcaacctgaccctaaccagtcgcattgtcatggcgccgctgacgcgcaaccgtgcaggcgccggtctggcccctaccgacctggctgccacctactacgcccaacgggcgtcggccggcctgatcattaccgaagccacgcaaatctcccctcaggctcagggctaccaagacacgccggggctgtatacgccggagcagatcgccgcctggcgcgtcgtcaccgatgccgtgcatgccgagggcgggcgcatttttgtgcagctttggcacgttggccgggtttctcacgtcgacctgcaaccgggcggcgcagcaccggtcgcgccatccgctatccgggcgcagaccaaaaccttcgtcaataacgcattcaccgacgtctcagaaccacgcgcgctggaactgagcgaattgccaggcatcgtcaacgacttccgccaggccgctgcaaatgccattgaagcgggcttcgacggtgtggaaatccacggcgccaacggttatctactcgatcagttcatcaaggacagcgccaacgtgcgcaccgatgcctatggtggctcagtggaaaatcgcgcgcgcctgctgctggaagtcgtcaccgccgtggtcaaggaaatcggtgcgcaccgcaccggcgtgcggatctcgccggtttcccctgccaatggcgttgccagcagcgacccgcaaccgcaatacgagtacatcgccgagcaactgagtgaacagggcattgccttcctgcacgtcgtggaaggcgccacgggcggcccgcgtgatgttgcgccgttcgactacgacgcgctgcgccagcgcttcaagcacacctatctggccaataacggttacgaccttgaccttgcaacggcacgtgtcaatgcgaacaaggctgatctggtcgccttcggtcgcccgttcatcagcaaccccgacttgatcgagcgtttgaaaaccggcgcaccgctggcagaactgaacccggccacgctctatggcggcggcgctgaaggctacaccgactacccgactatcgcaggctga

SEQ ID NO: 29575 - protein, 360 aa, Pseudomonas syringae pv. tomato str. DC3000
MSEKTLFQPYALGNLTLTSRIVMAPLTRNRAGAGLAPTDLAATYYAQRASAGLIITEATQISPQAQGYQDTPGLYTPEQIAAWRVVTDAVHAEGGRIFVQLWHVGRVSHVDLQPGGAAPVAPSAIRAQTKTFVNNAFTDVSEPRALELSELPGIVNDFRQAAANAIEAGFDGVEIHGANGYLLDQFIKDSANVRTDAYGGSVENRARLLLEVVTAVVKEIGAHRTGVRISPVSPANGVASSDPQPQYEYIAEQLSEQGIAFLHVVEGATGGPRDVAPFDYDALRQRFKHTYLANNGYDLDLATARVNANKADLVAFGRPFISNPDLIERLKTGAPLAELNPATLYGGGAEGYTDYPTIAG

SEQ ID NO: 29576 - DNA, 1104 bp, Pseudomonas syringae pv. tomato str. DC3000
  CDS (1)..(1104): transl_table=11
atgaatgacttgagtaaggccaccgaccttttctctcccgtgcagatgggctcgatcgatctggcgaaccggattgtgatggcgcctgtgacacgcagccgctacgccgaggacggtgtgccaaaagacctgcacgccacctactatgcgcaacgtgcgacggcaggaatgatcgtggccgaagcaaccaacatttccgctcaaggccggggctacgccgcaacgcccgggatctggaacgagaagcaagtggcgggctggcggaaagtgaccgacgcggtgcatgccgccggtggcaagatcgtcagccagctctggcacgttggccggttctccggtgttgatctgcaacccggcggggaagccccggtagcgccctccgccctccaggctgaaggcaacacctataccgtcgacggttttgtgcctgtgtccatgccgcgcgcgctggaaaccgatgaaatctccggcatcatcgcgcagtacaggcacgcagccgagaacgccaagcgagccggttttgatggcgttgaagtgcactcggccaacagctatctgctcgaccagtttctgcgcgactccaccaatcaacgcaccgatcactacggcggttcgatagaaaaccgcgcccgcctgacactggaagtgacccaggccatcgtggacatctggggcaatgaccgggtcggcattcgcttgtcaccggtgacgcccgatgcgggcaacaccgcgccggacagcaacgtaatgggcctgcacggttatctgatccagcagttgaacacgctcaatcttgcgtatctgcacttcgtcgagggcgcaaccgccacgtcccgcgaagtgccggaaggggtcgatatggacgccctgagcgctcagttccacggcccgttcattggcaacaacaactacgaccttgagatggcggtcgagcgccgggcgcaaggcaagatcgacgcggtcgcattcggccgcctgttcatctccaaccccgacctggttgcccgcctgtttcatggggccgaactgaccattgccccacgtgagtcgtactacggcgggggtgccaaaggctacaccgactggccgctcggtcagtattga

SEQ ID NO: 29577 - protein, 367 aa, Pseudomonas syringae pv. tomato str. DC3000
MNDLSKATDLFSPVQMGSIDLANRIVMAPVTRSRYAEDGVPKDLHATYYAQRATAGMIVAEATNISAQGRGYAATPGIWNEKQVAGWRKVTDAVHAAGGKIVSQLWHVGRFSGVDLQPGGEAPVAPSALQAEGNTYTVDGFVPVSMPRALETDEISGIIAQYRHAAENAKRAGFDGVEVHSANSYLLDQFLRDSTNQRTDHYGGSIENRARLTLEVTQAIVDIWGNDRVGIRLSPVTPDAGNTAPDSNVMGLHGYLIQQLNTLNLAYLHFVEGATATSREVPEGVDMDALSAQFHGPFIGNNNYDLEMAVERRAQGKIDAVAFGRLFISNPDLVARLFHGAELTIAPRESYYGGGAKGYTDWPLGQY

SEQ ID NO: 29578 - DNA, 1065 bp, Nitrosomonas europaea ATCC 19718
  CDS (1)..(1065): transl_table=11
atgttattcaatccacttcaagtaggttctctcaccctgcccaaccgcatccttctggcaccactgacacgcgcccgtgccgacgctggccacatgcccaacgcgctgatggccgagtactacagccagcgagccaccggcggcctgctgatttccgaatgcaccatggtggcgcccggtacatcggccttcgtcaatgagcctggcatctacaacgacgcgcagattgcagcctggaggcaggtgaccgacgcggtgcacgccaagggcggacgcatcttcatgcagatctggcacgctggccgcgcagcctaccctggcgctgccgatggcgcccccattgtctccagcagcgccaccgctattgagggtgagatccacacgccccaaggcaaggtgccgcacgcggtgccccgccccctgaccgtcgacgagattcccggcatcgtcgctgcgtttgctcaaggcgcgcgcaacgccattgccgccggctttgatggtgtggaagtacacggcgccaacggctacctgattgaccagtttctgcgcgacacgcccaaccagcgcaccgatgcttacggcggatcgctggaaaaccgtgcacgtttgctgttcgaggtactcactgccgtgacccaggcgatcggttccgaacgtgtgggcctgcgcctgtcgcccctcaacagcttcaacagcatgaaagacagcgacccgctggccctcatcggcttcctggccgataggctcaatgccttcaagctagcctacctgcacgtgatgcgcgccgatttcttcggcgtgcagaaggccgatgtcatgcccgtagcgcgtgaaaagtacaagggtgtgttggtgggcaatatgggttacagcgctgatgaggcagaggcagctattgccgaaggtaggcttgacgctgtggcctttggcaccgccttcctggctaacccggacctgcccgcacgcatcagggccaaggcaccgctgaacgcgcctgactccaacacgttctacgcaggtggcgccaagggctatacagactatccgacactgcagctcgcgtaa

SEQ ID NO: 29579 - protein, 354 aa, Nitrosomonas europaea ATCC 19718
MLFNPLQVGSLTLPNRILLAPLTRARADAGHMPNALMAEYYSQRATGGLLISECTMVAPGTSAFVNEPGIYNDAQIAAWRQVTDAVHAKGGRIFMQIWHAGRAAYPGAADGAPIVSSSATAIEGEIHTPQGKVPHAVPRPLTVDEIPGIVAAFAQGARNAIAAGFDGVEVHGANGYLIDQFLRDTPNQRTDAYGGSLENRARLLFEVLTAVTQAIGSERVGLRLSPLNSFNSMKDSDPLALIGFLADRLNAFKLAYLHVMRADFFGVQKADVMPVAREKYKGVLVGNMGYSADEAEAAIAEGRLDAVAFGTAFLANPDLPARIRAKAPLNAPDSNTFYAGGAKGYTDYPTLQLA

SEQ ID NO: 29580 - DNA, 1065 bp, Pseudomonas putida
  CDS (1)..(1065): transl_table=11
atgaccaagctgtttagccctgtccaactcggccccttgaacttgcccaaccgtgtcgtgatggcgcccatgacccgctcgcgggcgctgggcaatgtaccgaacgacttgatggcccagtactacagcctgcgcgccgaggccgggctccttatcaccgaaggcacttcgccctcgcccaacggcctgggttatgcgcacatccccggcatctattcggatgcgcaggtggcgggctggcgccaggtggcggaggccgtgaatgctgctggcggtcgcgtcttcgtgcagctcatgcacactgggcgggtgggtcatcccgccaacctgccgctgggcgctcacctgctcgcgccatcggccgtcgccgcgccaggtgagatgtggacggacaccgaaggaatgcagccgcatcccgtgcctgggaccatgacggagcaagacattgcggcggcgatcgaggaatatgccgctgcgtgtaaaaacaccgtggctgcaggcttcgacggcgtcgagctgcacggcgccaacggctatctcatcgaccagttcctcaacaccgcgtccaaccaccgcagcgatcgctggggcgggagcattgacaaccgcatccgcttcgcggtggaggtggcccgcgctgctgcggcagcgatcggcgccgagcgggtcggcatacgcatctcgccttatggcgtgttcaatggcatggcgtcggacgctgacatggatgcgttgtatctgcgcttgatcgaggcgctcaacgacgtcggcctggtctatctccatgtggtcgaccacagttccatgggtgcgccaccggtgagcgagactctcaaggtgcaactgcgcacggccttcaggggtaaatacatcctctccggcggctatgacgcggcgcgcaccaatgccgatctcgccgcgaacaaaggcgatctcgtcgccttcggccgccccttcatcgccaacccggacctggcgcaaaaactgaaaagcggcggggaactcaagccggccgatcccgccaccttctacacgcctgacgcaaaaggctacacggagttctga

SEQ ID NO: 29581 - protein, 354 aa, Pseudomonas putida
MTKLFSPVQLGPLNLPNRVVMAPMTRSRALGNVPNDLMAQYYSLRAEAGLLITEGTSPSPNGLGYAHIPGIYSDAQVAGWRQVAEAVNAAGGRVFVQLMHTGRVGHPANLPLGAHLLAPSAVAAPGEMWTDTEGMQPHPVPGTMTEQDIAAAIEEYAAACKNTVAAGFDGVELHGANGYLIDQFLNTASNHRSDRWGGSIDNRIRFAVEVARAAAAAIGAERVGIRISPYGVFNGMASDADMDALYLRLIEALNDVGLVYLHVVDHSSMGAPPVSETLKVQLRTAFRGKYILSGGYDAARTNADLAANKGDLVAFGRPFIANPDLAQKLKSGGELKPADPATFYTPDAKGYTEF

SEQ ID NO: 29582 - DNA, 1158 bp, Rhodopirellula baltica SH 1
  CDS (1)..(1158): transl_table=11
atggcttccaacaatatgaacgctcccgcatcgaattcctccaagtccgcgttgttccaaccactggagatcggtggactgacgctacgcaatcgcatcgtgatggctccgctgacacgagcgcgtgccggagtggaacgcatggccaatgaaatgatggccgagtactacacacaacgagcttccgccggtttgatcatcagcgaagcgaccgtcgtatctgaacaagggatcggttggcctcaatcgccgggcatctacaccgatgaaatggccgaaagttggaaggtcgtggtcgactcggttcatcaagccggcggccgtatctttctgcagttgtggcacaccggacgtgcatcgcacagtgatttccacgatggcgaactgccggtcgcaccatcggcaatcgccatcgaaggtgacggagtgcacaccccgtcgggaaagaagccttacgaggtgccacgtgctcttgaaacgagcgaactgcccggcatcgtggaggactatcgcaaggccgccgaacgcgccaagtcggcaggcttcgatggcgtagaagttcactccgccaacggctatctgttggacgaattcttgcaatccaaatccaatcaccgcgaagatcaatacggcggcagcatcgagaatcgttatcggctactgggcgaagtcgttgatgcggtcacgagcgtttggtccagcgatcgtgttggtgttcggctggctcccaatggttcgttcaatgacatggggtcgccggattacatcgagcagttcacctatgtcgctcgtcaactcgaccagtacggcctcgcgtacttgcacgtgatggatggcaccgggtttggttttcacgaacttggacccgcgatgacgcttgctgatttccggaaggtattcagtggtacgttgatgggcaacgttggctacacgcgggagtctgcggaagaggcgattgtggacggagcagcggatctcattgcctttggccgtccttttatcagcaacccagatctggtggagcgttttgaaaacgggtggcctcttgcggagatggccgacatgtccgtttggtactcacatgacgcggaaggctacaccgattttccaacctaccaagcggaatcgaaacagcccgagtcctgcggagtcgagtag

SEQ ID NO: 29583 - protein, 385 aa, Rhodopirellula baltica SH 1
MASNNMNAPASNSSKSALFQPLEIGGLTLRNRIVMAPLTRARAGVERMANEMMAEYYTQRASAGLIISEATVVSEQGIGWPQSPGIYTDEMAESWKVVVDSVHQAGGRIFLQLWHTGRASHSDFHDGELPVAPSAIAIEGDGVHTPSGKKPYEVPRALETSELPGIVEDYRKAAERAKSAGFDGVEVHSANGYLLDEFLQSKSNHREDQYGGSIENRYRLLGEVVDAVTSVWSSDRVGVRLAPNGSFNDMGSPDYIEQFTYVARQLDQYGLAYLHVMDGTGFGFHELGPAMTLADFRKVFSGTLMGNVGYTRESAEEAIVDGAADLIAFGRPFISNPDLVERFENGWPLAEMADMSVWYSHDAEGYTDFPTYQAESKQPESCGVE

SEQ ID NO: 29584 - DNA, 1113 bp, Bordetella bronchiseptica RB50
  CDS (1)..(1113): transl_table=11
atgtccacgttgttccaaccgctgaacgccggcaaattgcggctcgccaaccgcatcgtgatggcgccgttgacgcgcaaccgttcgcccaatgccgtgccgccgcccctgacggccacctactacgcgcagcgcgccagcgccggcctgatcatcaccgaagccaccgccatttcccaccagggccagggctacgcggacgtgccggggctgtacgcgcccgaacagctggccggctggcggcgcgtgacggacgcggtgcacgcggccggcggcacgatcgtggtgcagctgtggcatgtggggcgcatttcgcacaccaccctgcagccgggacagggcgcgccggtcgcgccctcggcgatccgcgcccaggcccgcacgtacctggtcgatgcgcagggcaaggggcagttcgccgatacctcggagccccgcgcgctggcgctggacgagctgccgggcatcgtggaggattaccggcgcgccgcgcgggccgcgatcgaccatggtttcgacggggtcgagctgcatgccgccaatggctacctgctggaccagttcctgcgctcgggcagcaaccatcgcgacgacgcgtacggcggctcgatcgagaaccgggcgcggctgctgctgcaggcgctcgatgcggtctgcgccgaggtcggcgccgatcgcgtcggcatccggctctcgccggtcacgccggccaacgatgcgcacgacgaccagccgcagcccttgttcgaatacgtgctgcgcgagctggcgcggcgcggcctggcgtacgtgcacgtgatcgagggggcgaccggcggcgaccgcgcctaccagcaggggccggccccgttcgactacgcggcgctcaaggcggcctaccgcgccgccggcggcgccggcgcctggatggtgaacaacggctacgacgccagcctggccgaacagaaactgtccagcgggcaggccgacctggtggcgttcggcaagccgttcatcgccaaccccgacctggtggcgcgcttgcgccagggcgctgcgctgaacgagggcgaccgcgatacgttctatggcggcggcgagcgcggctatacggactaccccgcgctcgcctga

SEQ ID NO: 29585 - protein, 370 aa, Bordetella bronchiseptica RB50
MSTLFQPLNAGKLRLANRIVMAPLTRNRSPNAVPPPLTATYYAQRASAGLIITEATAISHQGQGYADVPGLYAPEQLAGWRRVTDAVHAAGGTIVVQLWHVGRISHTTLQPGQGAPVAPSAIRAQARTYLVDAQGKGQFADTSEPRALALDELPGIVEDYRRAARAAIDHGFDGVELHAANGYLLDQFLRSGSNHRDDAYGGSIENRARLLLQALDAVCAEVGADRVGIRLSPVTPANDAHDDQPQPLFEYVLRELARRGLAYVHVIEGATGGDRAYQQGPAPFDYAALKAAYRAAGGAGAWMVNNGYDASLAEQKLSSGQADLVAFGKPFIANPDLVARLRQGAALNEGDRDTFYGGGERGYTDYPALA

SEQ ID NO: 29586 - DNA, 1182 bp, Chromobacterium violaceum ATCC 12472
  CDS (1)..(1182): transl_table=11
ttgcaaagcatcatgtcctcactggaacgcctcccccttcgcggaggccgcataccgaggttgaacgacatgcccgcacccgatctgttctcgccgctgcaagccggcgccctgccactgcccagccgcatcgtgatggcgccgatgacccgctgccggaccgaccagcccggcgacatccccaacgccatgatggcgcgctactatgcccagcgagccggcgccggcctgatcgtttccgaagccactcagatctcgcgccaaggccagggctacagcttcacccccggcatctacagccaggaccagatagacggctggcggcgggtgaccgacgccgtccgccaggcgggcggacgcatggtgctgcagttgtggcatgtgggccggatgtcccacccgatgttccatgacggcgcgccgccggtggcgccgtccgccatcgcgcccgacgcccaggtctgggtggcggacgaaacaggcgcgggccgcatggtggattgcccgacgccccgggcgctggaaaccgccgaaatcgccgccatcgtcggcgactaccgccaagcggcccgcaacgcgatggccgccggtttcgacggcgtggaaatccatgcggccaatggctacctgatagaccagttcctgcgcagcacctccaaccggcgcgacgatgcctacggcggcagcctggaaaaccggctgcgcttcctgatggaggtcgcagccgcggtggcggacgaaatcggcgccgcgcgcgtcggcgtgcggttggctccctacatcaccgcgcgaggaatgaattgcccggagatcgttccggcgatactggaggccgccgtccggctgaatgggctgggcatcgcctacctgcacctttccgaggcggactgggatgacgcccctcaggtggacgacgccttccgccacgcgctgcgcgcgcgcttccgcggcgccatcatcgtggccggccgttatgaccagccgcgaggcgagcgcttgctcgcggaaggcctggcggacctgatcgccttcggccggcccttcatcgccaaccccgacctacccgaacgcctggcccgcggctggccgctggctgatttcgacccgtccgcgctgttcggcggcgacggacgcggctacgacgactacccacgctaccgggaaatggcaaccgcccgataa

SEQ ID NO: 29587 - protein, 393 aa, Chromobacterium violaceum ATCC 12472
MQSIMSSLERLPLRGGRIPRLNDMPAPDLFSPLQAGALPLPSRIVMAPMTRCRTDQPGDIPNAMMARYYAQRAGAGLIVSEATQISRQGQGYSFTPGIYSQDQIDGWRRVTDAVRQAGGRMVLQLWHVGRMSHPMFHDGAPPVAPSAIAPDAQVWVADETGAGRMVDCPTPRALETAEIAAIVGDYRQAARNAMAAGFDGVEIHAANGYLIDQFLRSTSNRRDDAYGGSLENRLRFLMEVAAAVADEIGAARVGVRLAPYITARGMNCPEIVPAILEAAVRLNGLGIAYLHLSEADWDDAPQVDDAFRHALRARFRGAIIVAGRYDQPRGERLLAEGLADLIAFGRPFIANPDLPERLARGWPLADFDPSALFGGDGRGYDDYPRYREMATAR

SEQ ID NO: 29588 - DNA, 1095 bp, Chromobacterium violaceum ATCC 12472
  CDS (1)..(1095): transl_table=11
atgaacgccgacaaactgctgaccccgctgaccatgggcgccgtcgccctgagcaaccgcgtcgtcatggccccgctgacccgcctgcgcaacatcgaaccgggcgacgtgcccggcccgctggccaaggaatactaccgccagcgcgccagcgccggcctgatcgtggccgaaggcacccacatttcccccaccgccaagggctatgccggcgcgcccggcatctacagcgaggaacaagtgcgcgcctggagcgaagtcaccggcgcggtgcatcaagacggcggcaagatcgcgctgcaactgtggcacaccggccgcatctcgcaccgctcgctgcagccgaacggcgacgcgccggtcggcccgtccgccatccaggccgacagccgcaccaacatccgcgccgccgacggcagcctggtgcgcgaacaatgcgacaccccgcgcgcgctggaaatcgaggaaatcgaggacatcatcgaggactaccgccgcgccgccgacaacgcgcgccgcgccggtttcgacatggtggagatccacggcgcccacggctatctgatcgaccagttcctgtcgccggccgccaacgtccgcaccgaccagtacggcggcagcgtggaaaaccgcgcccgcttcctgctggaagtggtggacgcggtggtggcggaatgggacgccgatcacgtcggcatccgcatctcgccgctgggcatcttcaacggcgtcagcaacaccgaccagctggacatggcgctgtacctggccgagcagttggccaagcgcaagctggccttcctgcacatctccgagccggactgggccggcggcccgacgctggacgacggcttccgcgccgaactgcgccagcgctatcccggcgtgatcatcggcgccggcggctactccgcggagaaggccgaaacgctgctgaagaaaggctttatcgacgccgccgccttcggccgcagctacatcgccaacccggatctggtggagcgtctgaagcagaacgctccgctgaacccgcccaagccggatactttctatggcggcggcgcggaaggctataccgactacccgacgctgtaa

SEQ ID NO: 29589 - protein, 364 aa, Chromobacterium violaceum ATCC 12472
MNADKLLTPLTMGAVALSNRVVMAPLTRLRNIEPGDVPGPLAKEYYRQRASAGLIVAEGTHISPTAKGYAGAPGIYSEEQVRAWSEVTGAVHQDGGKIALQLWHTGRISHRSLQPNGDAPVGPSAIQADSRTNIRAADGSLVREQCDTPRALEIEEIEDIIEDYRRAADNARRAGFDMVEIHGAHGYLIDQFLSPAANVRTDQYGGSVENRARFLLEVVDAVVAEWDADHVGIRISPLGIFNGVSNTDQLDMALYLAEQLAKRKLAFLHISEPDWAGGPTLDDGFRAELRQRYPGVIIGAGGYSAEKAETLLKKGFIDAAAFGRSYIANPDLVERLKQNAPLNPPKPDTFYGGGAEGYTDYPTL

SEQ ID NO: 29590 - DNA, 1065 bp, Gloeobacter violaceus PCC 7421
  CDS (1)..(1065): transl_table=11
atgcacctgtttgcacctttgaccctgcgcgacatcaccctgcgcaaccgcatcgccgtctcgccgatgtgccagtactcgagcatcgacggtctggcgaacgattggcacttcgttcacctgggcagccgcgcggtgggcggggcgggtctggtcatttttgaagcggcggcggtcgaagcgcgcgggcgcatcagcccccaggacctgggcatctggagcgacgcgcacatcgagcccttgcggcggatcaacgattttatccatcgccaggagtcagtggccgggattcagattgcccacgccgggcgcaaggcgagtacagcccgtccctgggaaggcggcgggccacttaccgagggtgagggcggttgggcggacagcgtcgccccgagtgccctccccttcgacgcagggtatccggtgcccgaagcgctcgatgaagcgggcatcgccgcgactgtgcaggcgtttgctgcggcggcaaggcggtcgctggcagccggatttcgggtgctcgaaatccatgccgcccacggctatctgctccattcctttctttcacccctgagcaaccggcgcacggaccggtgggggggactatttgaaaaccgcatccggctgttgcttgcggtggtggaggcggtgcgcggtgtctggcccgagcgcctgccgctttttgtgcgcatctcggctaccgattggacggagggaggctgggatctcgagcagtcggtgctgctggcccaggtactcgcccgcagcggcgtggatctgatcgattgctcctcggggggagttatccctggcgtgcgcatcccggcggggccgggctaccagaccaggtttgccgagcgcatccgggctgaggcggacatgctcaccggcgctgtcgggcagatcacctcggcggagcaggccgaccacatcgtgcgcaccggtcaggcggatctggtgctcatcggcagacaattgttgcgcgatccctactggcccctcaaagcggcggtcgaattgcgcgctcccggtccctggcccgaacagtaccagcgggccaaaccgtga

SEQ ID NO: 29591 - protein, 354 aa, Gloeobacter violaceus PCC 7421
MHLFAPLTLRDITLRNRIAVSPMCQYSSIDGLANDWHFVHLGSRAVGGAGLVIFEAAAVEARGRISPQDLGIWSDAHIEPLRRINDFIHRQESVAGIQIAHAGRKASTARPWEGGGPLTEGEGGWADSVAPSALPFDAGYPVPEALDEAGIAATVQAFAAAARRSLAAGFRVLEIHAAHGYLLHSFLSPLSNRRTDRWGGLFENRIRLLLAVVEAVRGVWPERLPLFVRISATDWTEGGWDLEQSVLLAQVLARSGVDLIDCSSGGVIPGVRIPAGPGYQTRFAERIRAEADMLTGAVGQITSAEQADHIVRTGQADLVLIGRQLLRDPYWPLKAAVELRAPGPWPEQYQRAKP

SEQ ID NO: 29592 - DNA, 1056 bp, Photorhabdus luminescens subsp. laumondii TTO1
  CDS (1)..(1056): transl_table=11
atgcctacactttttgatccaattcgcattggtgatctcgacttgccaaatcgcatcattatggctcctctgacacgtaaccgtgcagaaggagaagggcgtgtccctaatgcgctgatggcggaatattatgctcagcgcgcttctgctggtttgattatcagcgaagcgacttcagtcactccgcagggagttggctacgagaatacgccgggtatttggtcagatgagcaagttgctggttggcggttggtcacggatgctgtgcatgctgctggtgggcgtattttcatacagctttggcatgtggggcggatatcggaccctgttttccttaatggagaacggccggtggcaccaagtgcaattgcggctgatggtcatgttagcttattacgcccaaaacgtcctttcgtggttccgcaggcgcttgagtctgaggagattcccggcattgtcgaagcattcagacgcggagcggaaaatgcgaaaacggcaggatttgatggagtagaaatacatggtgccaatggatatttgctcgatcaattcttgcaagataatgctaatctgcggacagatcagtacggaggttcagtcgaaaatcgggcccggttgctactggaagtgacagacgcttgtatttcagtttggggatcatcacgtgttggtatgcatttggcaccacgtggtggccattactctatggcggattccaatcctgtggcgacattcggatatgtcgcacgtgaactcggtaaacgtggtattgcttttatcttttcacgtgatgctgtcgttgatggtgacttaagtaaggtgataaaagaggcttttgggtcaacctatattgctaacgaggaactgactaaagaaagtgccgagcaagttcttgctgacggtcgggctgatgcagtggcttttggtcaattattcatctctaatccagacttacctcaccggtttttagttaaagcgccatttaatgaacaacaaccggaaacttttatggttcctggtgctataggctatactgattatccagcgcttacctaa

SEQ ID NO: 29593 - protein, 351 aa, Photorhabdus luminescens subsp. laumondii TTO1
MPTLFDPIRIGDLDLPNRIIMAPLTRNRAEGEGRVPNALMAEYYAQRASAGLIISEATSVTPQGVGYENTPGIWSDEQVAGWRLVTDAVHAAGGRIFIQLWHVGRISDPVFLNGERPVAPSAIAADGHVSLLRPKRPFVVPQALESEEIPGIVEAFRRGAENAKTAGFDGVEIHGANGYLLDQFLQDNANLRTDQYGGSVENRARLLLEVTDACISVWGSSRVGMHLAPRGGHYSMADSNPVATFGYVARELGKRGIAFIFSRDAVVDGDLSKVIKEAFGSTYIANEELTKESAEQVLADGRADAVAFGQLFISNPDLPHRFLVKAPFNEQQPETFMVPGAIGYTDYPALT

SEQ ID NO: 29594 - DNA, 1083 bp, Corynebacterium diphtheriae NCTC 13129
  CDS (1)..(1083): transl_table=11
atgacgaccctttttgaatccgccaccgcaggcgtccttgaattgaacaatcgcatcactatggcccccttgacccgttcccgtgctgggcaagacggcgttcctaccgatatgcacgtggaatactacaagcaacgcgcgaataatggtctgattgtcactgaaggtacattctttgaagacatcaaccgtgcatttttaggtcagcctgggatcgccaccgccgatcaacaagaaggatggcgtaaggttgcccaggctgttcacgaacagggtagcaacattgtgatgcaaattatgcatggaggacgccttactctaccttctattaatggcttcgaccaaggagagtcatcgagcgctattgctcccggggttacgttgcacggtgatggagagtcccgagaagaggtgcccacacctgttgctctggatgccgagggtattaaaagggttattcagaaatttaccgaaggcgcccgacgtgccattgatgcaggtatggatggggtagaagtgcacggtgctaacggttatcttcttcaccaattcctcgcccctagttctaacgaccggacagatgagtatggtggtagccctgagaatcgtgctcgtttaaccattgaggtgattcgctctatcgcagatgaaatcggagcagaccgggtgggcttacgtatttctcctatgcataatattcaaggttgcattgaggaggatgaggatgatgtgcgcgctacgtataaagcgttgttggatggtattgctgacctgaatatcgcttatctctctattttgtatcaggatgcagaaagcgacttggttgcttatttgcgagaatcctttggtggtttcaccattctcaataccggttttggtgcggtgacagagttagaagacgctcgttatattgtagagaatggcttggctgatgcggtggcagtggggcgtgagataattgctaatcccgatttgtcgtatcggtggaagaataatttagcgttgaattcaattgatttcgatactttttacacgcccggtcctcgcggttacatcgattatcctatggttgatgagggctag

SEQ ID NO: 29595 - protein, 360 aa, Corynebacterium diphtheriae NCTC 13129
MTTLFESATAGVLELNNRITMAPLTRSRAGQDGVPTDMHVEYYKQRANNGLIVTEGTFFEDINRAFLGQPGIATADQQEGWRKVAQAVHEQGSNIVMQIMHGGRLTLPSINGFDQGESSSAIAPGVTLHGDGESREEVPTPVALDAEGIKRVIQKFTEGARRAIDAGMDGVEVHGANGYLLHQFLAPSSNDRTDEYGGSPENRARLTIEVIRSIADEIGADRVGLRISPMHNIQGCIEEDEDDVRATYKALLDGIADLNIAYLSILYQDAESDLVAYLRESFGGFTILNTGFGAVTELEDARYIVENGLADAVAVGREIIANPDLSYRWKNNLALNSIDFDTFYTPGPRGYIDYPMVDEG

SEQ ID NO: 29596 - DNA, 1101 bp, Rhodopseudomonas palustris CGA009
  CDS (1)..(1101): transl_table=11
atgtcgaattccaagctcttcgagcccactaagctcggcccgatcacccttgccaatcgcgtcgtgatggcgccgctgacccgcaaccgcgcggtccccgagggcctcgtcccgagcccgctggcagcggaatattacggccagcgcgccagcgccggcctgctgatcaccgaggccagccaggtgtcgcagcagggccaaggctatcaggacacgcccggcatctactcgcaggcccaggtcgaaggctggcgcaaggtcaccggcgaggtgcacaagcgcggcggcaagatctttatccagctctggcacgtcggccgcatctcgcatgtcgacctgcagccgaaccacggcgccccggtcgcgccgtcggcgatccgcgccaacaccaagaccttcgtgggcggccaattcgccgacgtctccgagccgcgcgcgctcgagctgtccgaaattcccggcatcatcgaggacttccgtaaagcagccgccaatgcgatcgcagccggcttcgacggcgtcgagatccacggcgccaacggctatctgctcgaccagttcgcccgcgacagcagcaacaagcgcaccgacgaatatggcggctcgatccagaaccgcgcgcggctgatgctggaagtcgccgcagcggtggccaaggagatcggaccggagcgcaccggcatccggatttcgccggtgaccccggccaacgacgtctccgactccaacccgcaggcgctgttcgactacatcgtcgacgaactcaacaagctgaagctggtctatatccacgtcatcgaaggcgccaccggcggcccgcgcgacatcgcgccgttcgactacgcgagtttgcgcaagcgcttcagcggcagctatatcggcaacaacgcctacgacctcgcgctcgccaacaaacaactcgacgcaggtgcggccgacctgatcgcgttcggcaagccgttcatctcgaacccggacctcgtcgagcgcctgaagcggaatgctccgctgaacgagccggacaagtcgacgttctacggcggcggcgccaagggctacaccgactacccgacgctggagtcggcacaggcggcgcagtaa

SEQ ID NO: 29597 - protein, 366 aa, Rhodopseudomonas palustris CGA009
MSNSKLFEPTKLGPITLANRVVMAPLTRNRAVPEGLVPSPLAAEYYGQRASAGLLITEASQVSQQGQGYQDTPGIYSQAQVEGWRKVTGEVHKRGGKIFIQLWHVGRISHVDLQPNHGAPVAPSAIRANTKTFVGGQFADVSEPRALELSEIPGIIEDFRKAAANAIAAGFDGVEIHGANGYLLDQFARDSSNKRTDEYGGSIQNRARLMLEVAAAVAKEIGPERTGIRISPVTPANDVSDSNPQALFDYIVDELNKLKLVYIHVIEGATGGPRDIAPFDYASLRKRFSGSYIGNNAYDLALANKQLDAGAADLIAFGKPFISNPDLVERLKRNAPLNEPDKSTFYGGGAKGYTDYPTLESAQAAQ

SEQ ID NO: 29598 - DNA, 1125 bp, Geobacter sulfurreducens PCA
  CDS (1)..(1125): transl_table=11
atgcgcaaggtgttcgacgagaccaagatcaaccacatggtgcttgccaaccgcctcgtccgctccgccacctgggagggaatgtgcggcgaggacggctgtccctcggaaaagctggcgggttactatgccaccctcgcccggggcggggtggggctcatcatcaccggctacgccttcgttcgccctgacgggaaacaacttcccgggcagatgggtgtccatgagggctccttcgccgccgccgcgcggcaggtaaccggcgccgtccaccgggaaggggggaaaatctgcctccaactggttcactgcgggggacaggcgccgtcccgggccgccggctgccagccggtggctccctcggcaatcaaggcggtgcagtatccggaactgccgcgggaactacctatggccgaagtggttgagctggcgggcctgttcgccgacggcgcccgccgcgcacgcgagtggggcttcgacgcggtccagctccacgccgcccacggctacctgatcaaccagttcctttctcctcttaccaaccatcggaccgatcactacggtggcaacctggaaagtcgagccctgttccttcttgagacctgccgtgccgtgcgccgggcggtgggaaaagagttccccgtcatggtcaagctcaacggctccgacaacctggccggcggattcgacctggacgaggcggttcaagttgcccggatgctcgatgaagaaggcatcgacgccatcgaggtgtcgggcggcacccccgcctcgggagcccgaaccgcagtgcgtcaggggatcgagacccgggagcaggaagcctacaaccttccgtccgcctatcggatcaagaatgccgtctcttgccctgtcatggtggtggggggattccgttccttcgagctggtggaaggggtcatccgccgggaagaggccgactacgtggccctttcccggcccctcatccgcgaaccgcaccttcccctccgctggcagcagggcgacgagagccgggcccgctgtatctcatgcaacggctgtttcaagccggggctcaaggagggggggatctgctgcgtggtggacaagatggagcgggagagccgggagttttctctgtaa

SEQ ID NO: 29599 - protein, 374 aa, Geobacter sulfurreducens PCA
MRKVFDETKINHMVLANRLVRSATWEGMCGEDGCPSEKLAGYYATLARGGVGLIITGYAFVRPDGKQLPGQMGVHEGSFAAAARQVTGAVHREGGKICLQLVHCGGQAPSRAAGCQPVAPSAIKAVQYPELPRELPMAEVVELAGLFADGARRAREWGFDAVQLHAAHGYLINQFLSPLTNHRTDHYGGNLESRALFLLETCRAVRRAVGKEFPVMVKLNGSDNLAGGFDLDEAVQVARMLDEEGIDAIEVSGGTPASGARTAVRQGIETREQEAYNLPSAYRIKNAVSCPVMVVGGFRSFELVEGVIRREEADYVALSRPLIREPHLPLRWQQGDESRARCISCNGCFKPGLKEGGICCVVDKMERESREFSL

SEQ ID NO: 29600 - DNA, 1122 bp, Magnaporthe grisea 70-15
  CDS (1)..(1122)
atgtctaaactcttcacccctctcaaggtcggccaagtcgagctgggccaccgcatctcgatggcacccatgactcgattccgtgccgacgatgaccacacccccttggacatagtcgcagaatactacaaacagcgcgcctgcgtgccgggaacgctcctcatctcggaggcgacgctgacttcaccccgcgcgggcggcctcaacaacgcgccgggcatctggaccaaggagcacatcgccggctggaaggcggtcacagacgcggtgcactccaaaggcagcttcatctacctgcagctgtggaacctcgggcggacggcggacatgaaggcgtcggcgccgggctacgagctgctgtcctcgagcgccgtgcccatcgagggcagaggggtgcccgactccgattccgtccccgtcgaccacaggcaccgggccatcccgcgggccatgaccgaggaggagatccagcaggccatccgggactacgccacggcggccgagaacgccatcgaggccggcttcgacggcgtcgagatccacgccgccaacggctacctcatcgaccagttcctgcaggacacgtgcaacgagcgcaccgacgcctggggcgggtccgtcgagaagcgcgcccgcttcgccctcgaggtgacgcgcgccgtcgtccaggccgtcggcgccgacaggaccggcatccgcctgagcccctacggcaccttccagggcatgggcatggcggacccggcgcccacctttggctacgtcgtcgaccagctccggccgctcaagctggcctttgtgcactttgtcgagtccgaggacggcgaccacaggagcgtcgactggctggtgaaaaaggtcggcgggccggtcctggtggccaacggattcacgcccgagtcggccaaggcggccgtcgatgagaaatacaaggactcggatgtcgtcgtggcctttgggaggctcttcatccccaacccggacctggtgtttaggatccaaaacggagttccggtcgagcccatcgatcccaccggtgacttttacgaggccaagacacccaagcgcttccttgactttccgtttagctccgagtatcaggcgtctatcaaggccaactga

SEQ ID NO: 29601 - protein, 373 aa, Magnaporthe grisea 70-15
MSKLFTPLKVGQVELGHRISMAPMTRFRADDDHTPLDIVAEYYKQRACVPGTLLISEATLTSPRAGGLNNAPGIWTKEHIAGWKAVTDAVHSKGSFIYLQLWNLGRTADMKASAPGYELLSSSAVPIEGRGVPDSDSVPVDHRHRAIPRAMTEEEIQQAIRDYATAAENAIEAGFDGVEIHAANGYLIDQFLQDTCNERTDAWGGSVEKRARFALEVTRAVVQAVGADRTGIRLSPYGTFQGMGMADPAPTFGYVVDQLRPLKLAFVHFVESEDGDHRSVDWLVKKVGGPVLVANGFTPESAKAAVDEKYKDSDVVVAFGRLFIPNPDLVFRIQNGVPVEPIDPTGDFYEAKTPKRFLDFPFSSEYQASIKAN

SEQ ID NO: 29602 - DNA, 1230 bp, Magnaporthe grisea 70-15
  CDS (1)..(1230)
atgggatcagccggacctgccaaccccaagctctttgagcctctcgccatcgcaaatggcaaacacgtcttgaagcaccgtgttgttcacgctcccttgaccaggaaccgtggcacgccggtcaacaaaaacgatagccgtgaggaacccaaccgtctgtggctggccaacgacgtcatcaaggagtattacacccagcgtgccaccgatggcggtctcattatttccgagggcctgccgcctagtctcgagggcggcgcaatgcccggcgtcccagccatccaccaggcagctcaggtcgagtcgtggaagcccgtgaccgaggccgtgcacgccaagggtagcatcttctacgcgcagctgtggcactctggccgtgccatgattccgcagcacatcggcgggcccgtgccggctccctcggccgtgccctgggacgaccccaccgaggtgttctggtacccgcccgcccacaccaccgagctctgcaagtacgtcgactacccgccgattgagatgacggtggagcacatcaagcgcaccattgatgattacgtcaaggccgccaagaacgccctcgaggccggcttcgacggcatcgaggtccacggcggcaacggctacctgcccgagcagttcctgagctcaaactcgaaccagcgcaccgacgactatggcggctctcccgagaagcgctgccgcttcgtcctcgagctggtggaggccctcgccgccgccatcggccaggagaatctcgccatccgcctgtcgccctttggtttgttcaaccaggcccgcggcacccagcgcaaggagacttggggttacctctgccgtgagctcaaggcccgcctgcccaacctgagctacgtgagcttcatcgagccaaggtacgagcaactcttctccgaagaagacaagcaaaagttcctcgacgactggggcatgtcaaacgtcgacctgtccatgttcagggagatctttgccggtacccccttcttctccgccggcggcttcgacgccaagacgggcaaggaggccgtcgagaagggcacctacgatgccattgtctacggcaggtactttaccagcaaccccgacctggtcaggcgtgtgaaggaggatctgcccttcaacccatacaaccgcgagcgcttctacggtccttttgaggaccctacgattggctacaccgactttgctacttatgatgagcagcagaagaaataa

SEQ ID NO: 29603 - protein, 409 aa, Magnaporthe grisea 70-15
MGSAGPANPKLFEPLAIANGKHVLKHRVVHAPLTRNRGTPVNKNDSREEPNRLWLANDVIKEYYTQRATDGGLIISEGLPPSLEGGAMPGVPAIHQAAQVESWKPVTEAVHAKGSIFYAQLWHSGRAMIPQHIGGPVPAPSAVPWDDPTEVFWYPPAHTTELCKYVDYPPIEMTVEHIKRTIDDYVKAAKNALEAGFDGIEVHGGNGYLPEQFLSSNSNQRTDDYGGSPEKRCRFVLELVEALAAAIGQENLAIRLSPFGLFNQARGTQRKETWGYLCRELKARLPNLSYVSFIEPRYEQLFSEEDKQKFLDDWGMSNVDLSMFREIFAGTPFFSAGGFDAKTGKEAVEKGTYDAIVYGRYFTSNPDLVRRVKEDLPFNPYNRERFYGPFEDPTIGYTDFATYDEQQKK

SEQ ID NO: 29604 - DNA, 1101 bp, Gibberella zeae PH-1
  CDS (1)..(1101)
atgccagactcacgtcttttccagcctatgaaaattggcaacattcaagtccaacatcgagtcggcatggcacccatgactcgactccgagcaagcgtggaccgtattcccaacgccctgatgaaggaatactacagtcaacgtgcttccacaccgggtacactcatcattacggagggaactcttgtctcgcctgctgcaggtggtggatttgccagaacacctgggatctggaaccaggaacaagtcactgcctggaaaaccatcacagatgaggtccacagcaagggtagttatatctttgtccagctttttgccatgggtagagctgccactgttgaagttgcgaaagaggagggaatcgatattatatctgcgagtccggtcgcatttgaggggagtaacgctcagccgagagctatgactcttgcagagatccacgacatgatcgacgctttcgagactgcctcaaagaacgcagttgcagcaggttttgatggagtagagattcacggtgcaaatggatatcttcttgatcaatttcttcaagatgtcagtaatcaccgtgacgatgagtttggtgcaaacatcgagaacagatcgcgcttcattagcgagattatggaacgcgtcgtcaaagccatcggaccagagcgcgttggtctgcgtctcagtccatggagtaccttccaaggtatgcgaatgaaggaccccattccccaattcacagacatcatcggcaaagcaaagactcttgatctagcctaccttcatctggtagaatcacgaatctgcggcagcaccgacgacatcaacaatggtcaggaaaagctcgactttgcgtatgatatctggaagagtcctttcctcattgcaggagggtacaagctgcaaggtgcacaggatcttgtcgacagtgagcatccagacaaggaaatcatggtcatgtttgggagggactttgtgtcgaatcctgatttggtgttgaagctgcagcatggtttggaccttactcagggtgagaggaacacgtactacacgagtgactctgctggatatatcgactatccatgtgctgccaaggttgctgtttctgcgtaa

SEQ ID NO: 29605 - protein, 366 aa, Gibberella zeae PH-1
MPDSRLFQPMKIGNIQVQHRVGMAPMTRLRASVDRIPNALMKEYYSQRASTPGTLIITEGTLVSPAAGGGFARTPGIWNQEQVTAWKTITDEVHSKGSYIFVQLFAMGRAATVEVAKEEGIDIISASPVAFEGSNAQPRAMTLAEIHDMIDAFETASKNAVAAGFDGVEIHGANGYLLDQFLQDVSNHRDDEFGANIENRSRFISEIMERVVKAIGPERVGLRLSPWSTFQGMRMKDPIPQFTDIIGKAKTLDLAYLHLVESRICGSTDDINNGQEKLDFAYDIWKSPFLIAGGYKLQGAQDLVDSEHPDKEIMVMFGRDFVSNPDLVLKLQHGLDLTQGERNTYYTSDSAGYIDYPCAAKVAVSA

SEQ ID NO: 29606 - DNA, 1140 bp, Gibberella zeae PH-1
  CDS (1)..(1140)
atgtccactgaatctaaactctggcaacccctcaagctgggaaatgtcaacctctcccaccgaatcgctctcgcccccatgacccgtcttcgcaacgatgacgatcatcttccacttgactcagtaattcagtactacagcgaccgcgccggcataccaggaacgttggtcataagtgaagcgactggcatctcaaagaccgctgaagcagctcccagtacacccgggatttccagccgcgaccaggtgcagcgatggaagaaggtctttgacgccgtgcatgagaagggaagctacatgttcatgcagatctgggatcttggaagagcaggagacccgaactacctcaagagtcgtgggtacaaatactcgtctagtagcgatatccccatggaaggatatcctgttgctcccgaggcgcttactgagaaggagatttgggaaaagattgatgagtttcgaaaggctgccaggaatgttattgatgcgggcggtgatggtgttgaggtccatgcctgccatggatatctcatcgatcagttcatcagcgagagcgtcaacaaccgaacggacaaatggggcggctcagttgagaatcgggcccgtttcctcttagaagttgtcaaagctgtcaccgaagaagtcggagcccaacgaacagccattcgactcagtccatttgcaaccttccaggctgcttacactgccaatccttgggatcaatttggatacattattgcggaactcaaggaagctcagtacaaactggcttacatctcctttgtcgagccacgcggtaacccagctcagacggacatgacaatccatacgcttcctggagataatgttaacccttggggagacaagaagccaagccttgatcacttcctagagatgtgggataaccagtctcccgtcattgtgggtggtggttatctacctgaaaacgtttcggcagctgttgatggcagttacaaggggtgggatgtcgtggttgcgtttggtcgatggttcacctcgaacccagacctggtctaccgcgtcaagaatggtattccgttgacgccttacaagagggaatacttctatgctgctaagatgagggatttgttgaagccaccaaggcctaatggtcgataa

SEQ ID NO: 29607 - protein, 379 aa, Gibberella zeae PH-1
MSTESKLWQPLKLGNVNLSHRIALAPMTRLRNDDDHLPLDSVIQYYSDRAGIPGTLVISEATGISKTAEAAPSTPGISSRDQVQRWKKVFDAVHEKGSYMFMQIWDLGRAGDPNYLKSRGYKYSSSSDIPMEGYPVAPEALTEKEIWEKIDEFRKAARNVIDAGGDGVEVHACHGYLIDQFISESVNNRTDKWGGSVENRARFLLEVVKAVTEEVGAQRTAIRLSPFATFQAAYTANPWDQFGYIIAELKEAQYKLAYISFVEPRGNPAQTDMTIHTLPGDNVNPWGDKKPSLDHFLEMWDNQSPVIVGGGYLPENVSAAVDGSYKGWDVVVAFGRWFTSNPDLVYRVKNGIPLTPYKREYFYAAKMRDLLKPPRPNGR

SEQ ID NO: 29608 - DNA, 1110 bp, Gibberella zeae PH-1
  CDS (1)..(1110)
atgacacgaatcacgactccaatcaatatcggccgatgtgccttgaaacatcgcgtcctcatggcgccattaacaagattgagagccgacaaccatgtacccttggatgtcatggttgactattactcgcaaagagcttcagtgccaggaactctactcatcactgaggcaacatttatctcggaaaaatcgcgaggtcgagatgagcatgcgcctggaatttatactcgcgaacaagtcgatgcatggaagcgcgtcacagatgaagtccacaagaagggttccttcatctacatgcagctttggcatgtcgggagagctgcgaaacaggatgtcctggataaggctggcttggaaatggtcagcagcagtgatgttcccatcggtgatgaataccccaaacctcggcccttgacggaagacgagatctgggaaagcatcaagtccttcgccactgcatccagaaacgcaatcgaagctggtttcgatggcgttgagatccatgctgccaatggatatctcatcgatcaatttacccaggatgtctgcaacaaacgaaccgacaaatggggcggaagtgttgaaaatcgctcacggttctgcgtcgaagtagcaaaggctgtgtcaaaagaaattgggcctgacagaacaggcattcgtctgtcgcccttcagcaccttccaaggcatgaggatggaagacccggaaccacaattcacacacctcatttccgagctgaagcccctgggcctagcctacctccacctcatcgaaccccggattgctggaaacgtggacaaggtcgtggacgacgataaagagagcctcgactttgctcttgatgcatgggcgaaatcgggaccggttgtccttgcgggaggatacacggctgaaaaggcaaacgaagcgctggagacgcgattcaaggatgaggcagtagcgtttgcttttgggagacactttatctcgaatcccgacttggcttttaggcttgccaacgatgttcctctcactcactacaatagggacacgttttacaaggtgaagagccctgatggatacacagattatccttacagcgaagcatggatagaacaacaaagagtttag

SEQ ID NO: 29609 - protein, 369 aa, Gibberella zeae PH-1
MTRITTPINIGRCALKHRVLMAPLTRLRADNHVPLDVMVDYYSQRASVPGTLLITEATFISEKSRGRDEHAPGIYTREQVDAWKRVTDEVHKKGSFIYMQLWHVGRAAKQDVLDKAGLEMVSSSDVPIGDEYPKPRPLTEDEIWESIKSFATASRNAIEAGFDGVEIHAANGYLIDQFTQDVCNKRTDKWGGSVENRSRFCVEVAKAVSKEIGPDRTGIRLSPFSTFQGMRMEDPEPQFTHLISELKPLGLAYLHLIEPRIAGNVDKVVDDDKESLDFALDAWAKSGPVVLAGGYTAEKANEALETRFKDEAVAFAFGRHFISNPDLAFRLANDVPLTHYNRDTFYKVKSPDGYTDYPYSEAWIEQQRV

SEQ ID NO: 29610 - DNA, 1194 bp, Gibberella zeae PH-1
  CDS (1)..(1194)
atgacactatccaagacaacaacaactgtcaaccctgagagcaggctattcaagcctatccaggtcggcaatgccaaacttgaccaccgaattgtcatggcacctttgactcgataccgcaatgacgacaaccacgtcgtcaagccctttgtcgagcgatactacgccgagagagcctcagctccaggcacactagttatcgctgaagctactggtgtctcaatgcaagacactggcatgcgccaaggcccagcctttgtcacagacgaacaagtcgctggctggacaaaggttatctccgctgttcacgaaaagaagtccttctgggctcagcagatctggggacaaggccgagcttctgatccagaataccagaaggagcgtggtttcaagtaccgctcctccagtgctgtgcctatcgaagagggtgctcctgcacctgaggccatgaccgaggaggagatccaacaatttattcaggacatggttgccacctcccgtcgagtcatcgatgctggcggtgatatcgtcgaggttcacgccgctcacggataccttatcgatcagttcacatccgactctatcaacaagcgaactgacaagtggggtggctccgttgagaaccgtgctcgtcttctgctcgaagtaatcaaggctgtttctgcagaggttggccccgaaaaggttgctattcgtctatcaccctacgctaccttccagggttccgagtcttcggacgtcaaagagcaatacacctacatcgttagcgagctcaagaagattggcgctcttgcttatctctcgttggttgaagcccgcggtgaccctgccaagctcctcgcccccgaccaagatgcctcaacggattccaagactcttgacttcatcctagatatctgggacaacacttcgcctgtcattgttgccggtaactacagccccgagtcggctgctgaggttcttgacggacactacagcaagtgggatgttctcgttgcatttggtcgccacttcattgccaaccctgactttgtttggagagtcaagcatggtgttgagctgaccaagtacgaccgcaccacattctacgtccgtggttcagagattggctacaacgactatcccttctctcaggaatatgtcaatgagcaaagagcatgggctgtcaagaacttgaagatgcacgccaaatag

SEQ ID NO: 29611 - protein, 397 aa, Gibberella zeae PH-1
MTLSKTTTTVNPESRLFKPIQVGNAKLDHRIVMAPLTRYRNDDNHVVKPFVERYYAERASAPGTLVIAEATGVSMQDTGMRQGPAFVTDEQVAGWTKVISAVHEKKSFWAQQIWGQGRASDPEYQKERGFKYRSSSAVPIEEGAPAPEAMTEEEIQQFIQDMVATSRRVIDAGGDIVEVHAAHGYLIDQFTSDSINKRTDKWGGSVENRARLLLEVIKAVSAEVGPEKVAIRLSPYATFQGSESSDVKEQYTYIVSELKKIGALAYLSLVEARGDPAKLLAPDQDASTDSKTLDFILDIWDNTSPVIVAGNYSPESAAEVLDGHYSKWDVLVAFGRHFIANPDFVWRVKHGVELTKYDRTTFYVRGSEIGYNDYPFSQEYVNEQRAWAVKNLKMHAK

SEQ ID NO: 29612 - DNA, 1227 bp, Gibberella zeae PH-1
  CDS (1)..(1227)
atgggcgacatcttcgacgcgggctccaactccaagctctttacgcctctggacattgccaatggcaagattcatcttaagcacagaatcgttcacgcacctcttacccgaaacagaggaacaccactaaaccccgaatcgacccccgagaaccctaaccgagtttggatccccaatgatctgattaccgagtattactcccagcgagctaccaatggtggtctcattatctctgagggtcttcctccctcgctagagggaaacggtatgccaggagtccctggaatcttcctcccggagcaggtccaaggctggaaaaaggttgtcgacgctgtccatgccaagggcggttatatctacgctcagctttggcactctggccgcgccaacatcccccaactgaccggtacacccatcttggctccctcagccacaccatgggacgaccccaacgagaccttcgcctatccccctcctcatacttccacgcccgtaaagctcgcagattaccctcctgtagaaatgacagttgagaagatcaagagcaccatcgccgactacgtcaacgctgccaaaaacgcacttgaagctggctttgacggcgttgaagtccacggtggaaacggttatcttcccgagcagttcctctcgtccaacattaacaaacgaacggaccactatggcggctctgaggagaagaggtgtaattttgtgctggaacttatggacgagttggccaaagctgtcggccaggataacctagctattcgtctcacaccctttggtctcttcaaccaagcccgtggtgaaaagcgagttgagacatggggccacttgtgccgtgagctcaagagtaaattccctcagctttcatacgtcagcttcgttgagcctcgtttcgagcaaatcttctccgaagccgagaagcagcaatttctcggatcttggggtcttcccaccgttgacctttcgctgttccgaaacatttttgcaggcactccattcttctcagctggtggcttcaatgatgtcaactcttggggtgttgttgagagcggtaaatgcgatggtgtgctttatggacggtactttatcagtaaccctgatttggttgagaggttgcgaaatggatggcctctccagccttatgatcgatctacattttatggacctttcaaggataatgctgctggttatactgattatcccttttacaacggcgaatag

SEQ ID NO: 29613 - protein, 408 aa, Gibberella zeae PH-1
MGDIFDAGSNSKLFTPLDIANGKIHLKHRIVHAPLTRNRGTPLNPESTPENPNRVWIPNDLITEYYSQRATNGGLIISEGLPPSLEGNGMPGVPGIFLPEQVQGWKKVVDAVHAKGGYIYAQLWHSGRANIPQLTGTPILAPSATPWDDPNETFAYPPPHTSTPVKLADYPPVEMTVEKIKSTIADYVNAAKNALEAGFDGVEVHGGNGYLPEQFLSSNINKRTDHYGGSEEKRCNFVLELMDELAKAVGQDNLAIRLTPFGLFNQARGEKRVETWGHLCRELKSKFPQLSYVSFVEPRFEQIFSEAEKQQFLGSWGLPTVDLSLFRNIFAGTPFFSAGGFNDVNSWGVVESGKCDGVLYGRYFISNPDLVERLRNGWPLQPYDRSTFYGPFKDNAAGYTDYPFYNGE

SEQ ID NO: 29614 - DNA, 999 bp, Gibberella zeae PH-1
  CDS (1)..(999)
atgccattcgacaagtccagctcgcaggaatacagaccgcctcgatggattccaactaccggattggcgacgacttgcttggtcgagccgaggcatttgtgggatagcctctattcacaggaacagattgcggcatggaaggccatcaccgatgctgttcacgccaaaggaggctacatattctgtcaactctgggctctgggtcgagttgccaaccccaatgttgtccctaacatctggagtgctggttcaaagcccttcgaagctaagggcgctgcgtctcttcctaaactcacgaccatgaccgaagccgatattgatcgattcgtgggtcattatagacaggctgcactgaatgcgatcgaagctggatttgacggcgttgagctccacggagccaatggatatcttatcgatcaattccttcaaaccaacagtaatgacagaacagattcatatggtggcagtctcgaaaaccgtttccgcttccctttgagagttcttaatgctgtctgtgatgccattggtcctgagcgtgtcggcattcgcatgtcgcccttctcccgcttccaaggcatgcgtgaggctgatcctctatccgtcttcgtgccttgggccaaggctattgtcaaggcccagccatctcttgcgtttattcacgccgttgagccaaggattgaaggaggaagtgactcgcctgacagccacctcaagacagacgacactctctcccccgttcgagacgttgttagcagctcaaatgtcaagttcattgtcgcaggaggattcaccccggaaactgctgtcaagcacgcaaatcagacagatgaccttgtcgggttcggtcgttactttattctaccagcaaaccctgatttaccagcgcgaatcaaaaatggctggccgttaaccaagtatgatcgctcgttgttttatacaccagatagaaagggatacactgattacccggcatacaaccctgatgcatctagactttga

SEQ ID NO: 29615 - protein, 332 aa, Gibberella zeae PH-1
MPFDKSSSQEYRPPRWIPTTGLATTCLVEPRHLWDSLYSQEQIAAWKAITDAVHAKGGYIFCQLWALGRVANPNVVPNIWSAGSKPFEAKGAASLPKLTTMTEADIDRFVGHYRQAALNAIEAGFDGVELHGANGYLIDQFLQTNSNDRTDSYGGSLENRFRFPLRVLNAVCDAIGPERVGIRMSPFSRFQGMREADPLSVFVPWAKAIVKAQPSLAFIHAVEPRIEGGSDSPDSHLKTDDTLSPVRDVVSSSNVKFIVAGGFTPETAVKHANQTDDLVGFGRYFILPANPDLPARIKNGWPLTKYDRSLFYTPDRKGYTDYPAYNPDASRL

SEQ ID NO: 29616 - DNA, 1230 bp, Gibberella zeae PH-1
  CDS (1)..(1230)
atgtcagaattactactctcaaaacccctccagctacaatgcggcctcacactccccaaccgtctcatcaaagccgccctcgctgaggaaatggccgacaggcaaaaccttcccacgacagcacagatggaacgcacatacggtgcctgggcagaaggaggctggggaatggtcatgacgggaaacgtccaggtcgataacaaatatctcggtggctttggggattgctccatcagcactgatcttcctgaagaaaaggtcttggaggcgtacaaacatttcgttggcatttgtcgtaaaaatggcgttcctactctcatgcagatcaaccatcctggacgtcaatctcctcttggagcaggaactaagtcttacatggctaagaaccttgctcccagcgccgtgccgctgaacatcggggatgatatcatttcaaagattatctcgactgtggtctttggtacaccaaaggaaatgtccgttgcagaaatcgaagacgtcgttcagcgctttgccaaaacggcttgtatcgcatcagaatctggtttcgacggtgttgaaattcatgccgcgcatggatatcttttgtctcagttcttgtccgagaagagtaacaagagaaccgaccagtacggaggatcaccagcagccagggcaaagattatcgtcgacgtctgcaaggccattcgtgccgcgacaccagcgacattctgtgttggtttaaagtttaactctgcggatcatcagtctcccaaggaacttgaggaatgtctggaacagatgacgcttattgcagaggttggacttgactttttagaagtcagtggtggaagctgggagaacccaactatgtttacaggaacaggcgaaaagaaatctgccagcacagcagcgcgcgaatccttctttctcgaattcgcccgcgagatgcgcgccaaacttcccaacactcctttaatggtaacaggaggtttccgcactcgcgcaggcatggaggaggctctgagcgaaggcgcctgtgatctcatcggtcttggcaggcctgctatcgtaaacccgtttttgccggcgaatctcatcttgaataaggaagtcaaggatgatgatgcgagggtttttgcgaagagaattcagacgccttggttgttgaagaaatttgggcctaagagtattggctccggggctgagattgtttggtataggaagcagctgcagtcaattgggaagtaa

SEQ ID NO: 29617 - protein, 409 aa, Gibberella zeae PH-1
MSELLLSKPLQLQCGLTLPNRLIKAALAEEMADRQNLPTTAQMERTYGAWAEGGWGMVMTGNVQVDNKYLGGFGDCSISTDLPEEKVLEAYKHFVGICRKNGVPTLMQINHPGRQSPLGAGTKSYMAKNLAPSAVPLNIGDDIISKIISTVVFGTPKEMSVAEIEDVVQRFAKTACIASESGFDGVEIHAAHGYLLSQFLSEKSNKRTDQYGGSPAARAKIIVDVCKAIRAATPATFCVGLKFNSADHQSPKELEECLEQMTLIAEVGLDFLEVSGGSWENPTMFTGTGEKKSASTAARESFFLEFAREMRAKLPNTPLMVTGGFRTRAGMEEALSEGACDLIGLGRPAIVNPFLPANLILNKEVKDDDARVFAKRIQTPWLLKKFGPKSIGSGAEIVWYRKQLQSIGK

SEQ ID NO: 29618 - DNA, 1203 bp, Candida glabrata CBS 138
  CDS (1)..(1203)
atgcctttcagcaaagattttgaacctgtcgctttcaaggacaccaacatgtttaaacccatgaaggttggtaacactactattctacatcgtgctgctttgcctccattgaccagaatgagggcgcatcatccaggccatattccaaatagggaatgggctgttgagtactacaagcaaagatcccaaagaccgggtacaatgctagttaccgaaggtgtcttcccatctgctcaatccggtggttatgataacgcaccaggtatctggtcagaagaacaaatggttgaatggagaaagattttcaatgccgttcacgacaataagtcttttgcttgggttcaattgtgggttttaggtagacaaggattcccagattcattggccagagacggtctaagatacgattctgcaagtgatggtatttatatgagtgctgaacaagaagaacttgctaagaaatccaacaacccacagcatggaatcactaaggatgaaattaagcaatatatcaaggactacgtccaaggtgctaaaaatgccattgccgctggtgctgatggtattgaaattcacagtgccaacagttacctgttaaaccaatttattgatccaaaatccaacaagagaactgatgaatacggtggttccattgaaaacagagccagattcacattagaagttgtagacgctattgtagacgccattggacctgaaaggactgccattagattatcaccatacggtacatatggtgacatgtctggtggtgcagaaccattgattgttgcacaatatgcttacattattggtgagcttgaaagaagagcaaaagaagggaaaagattagcatacttgcatcttgttgagccaagagttctagatccatttgctccagaaggtgaagatgtttataatgaaggtacaacagactttgcttattccatatggaagggtccaatcatgagagcggggaactacgctatccatcccgaagttgccatggaagtcctaaaggatgatagaactattgtcggttacggcagatactttattgctaaccctgatttagtcgatcgtctagaaaaagggttgccattgaacaaatatgatagatcaactttctacgctatgtctgctgagggctacattgattatccaacttacgaagaagcaattaagatgggctgggacaagcaatag

SEQ ID NO: 29619 - protein, 400 aa, Candida glabrata CBS 138
MPFSKDFEPVAFKDTNMFKPMKVGNTTILHRAALPPLTRMRAHHPGHIPNREWAVEYYKQRSQRPGTMLVTEGVFPSAQSGGYDNAPGIWSEEQMVEWRKIFNAVHDNKSFAWVQLWVLGRQGFPDSLARDGLRYDSASDGIYMSAEQEELAKKSNNPQHGITKDEIKQYIKDYVQGAKNAIAAGADGIEIHSANSYLLNQFIDPKSNKRTDEYGGSIENRARFTLEVVDAIVDAIGPERTAIRLSPYGTYGDMSGGAEPLIVAQYAYIIGELERRAKEGKRLAYLHLVEPRVLDPFAPEGEDVYNEGTTDFAYSIWKGPIMRAGNYAIHPEVAMEVLKDDRTIVGYGRYFIANPDLVDRLEKGLPLNKYDRSTFYAMSAEGYIDYPTYEEAIKMGWDKQ

SEQ ID NO: 29620 - DNA, 1206 bp, Candida glabrata CBS 138
  CDS (1)..(1206)
atgccattcgtcaaggatttcaagccaattgctttgaaggacactaacatgttcaagccaatcaagattggtaacactgaggttgctcaccgtgtcgttatgccacctttgaccagaatgagagctcaccacccaggtaatgttccaaacaaggaatgggctgttgagtactacaagcaaagatctcaaagacctggtactatgatcatcactgaaggtgctttcccatgtgcccaagctggtggttacgacaacgctccaggtatctggtctgaagaacaagttgctgaatggactaagattttcaaggctattcacgacaacaagtctttcgtctgggtccaactttgggttttgggtagacaagctttcccagacactttggctagagatggtctaagatatgactctgcctctgacgaagtctacatggacaaagaatctgaagaaaaggccaagaagtctaacaacccacaacacggtatcaccaaggatgaaatcaagcaatacatcaaggactacgtccaagctgccaagaactccattgctgctggtgccgatggtgttgaaattcacagtgccaacggttacttgttgaaccaattcttggacccaatctccaacaagagaaccgatgaatacggtgggtccatcgaaaacagagctagattcactttggaagtcgtcgacgctattgtcgatgccatcggcccagagaagactggtatcagattctccccatacggtactttcggtaccatgtctggtggtgctgaaccattgatcgttgctcaatacgcctacgtcttgggtgaattggaaaagagagctaaggccggtaagaagcttgctttcgtccacttggttgaaccaagagtcactaacccattcttcactgaaggtcaaggtgaatacaaggacggtaccaacgacttcgcttactctatctggactggtccaatcatcagagccggtaactacgctttgcacccagagatcgccaaggaacatgtcaacaacgatgacagaactttgatcggttacggtagattcttcattgctaacccagatatcgttgaccgtatcgagaagggtttgccattgaacaagtacgacagagacactttctacgctatgaccactgaaggttacttggattacccaacttacgatgaagctattaagatgggctgggacaagcaataa

SEQ ID NO: 29621 - protein, 401 aa, Candida glabrata CBS 138
MPFVKDFKPIALKDTNMFKPIKIGNTEVAHRVVMPPLTRMRAHHPGNVPNKEWAVEYYKQRSQRPGTMIITEGAFPCAQAGGYDNAPGIWSEEQVAEWTKIFKAIHDNKSFVWVQLWVLGRQAFPDTLARDGLRYDSASDEVYMDKESEEKAKKSNNPQHGITKDEIKQYIKDYVQAAKNSIAAGADGVEIHSANGYLLNQFLDPISNKRTDEYGGSIENRARFTLEVVDAIVDAIGPEKTGIRFSPYGTFGTMSGGAEPLIVAQYAYVLGELEKRAKAGKKLAFVHLVEPRVTNPFFTEGQGEYKDGTNDFAYSIWTGPIIRAGNYALHPEIAKEHVNNDDRTLIGYGRFFIANPDIVDRIEKGLPLNKYDRDTFYAMTTEGYLDYPTYDEAIKMGWDKQ

SEQ ID NO: 29622 - DNA, 1167 bp, Candida glabrata CBS 138
  CDS (1)..(1167)
atgggtgtttcagtgaaaggtgctcctaacttggactattttacaccagagcaaccaattctagggaagtttataaagtacaaagaagatgaagatggatcaagtgagagagatcccccaaagttgttcaagcccttgaagattagggcactagagatacccaatagaataggtgtctctccaatgtgtacttattccacaaataattatatgccaactgatttccatctaatgcattacggctctttagcaactagagggcctggtatcattatagtagaatgttctgccgtttctgaaggaactgccgttacagtaaatgatatgggaatatggaacaaagaacaagcttctgaacatttttctaaaattgttaagtttgcacattcgcaaaatgttatagtaggttgccagcttggtcagtttatgagaaaggtggttcagaatgtagatgaagataacaaggcgcacaatgtggaggttgggaaagaagcgcatgatctttccactgaagaaattaagactattgtagagcagtggggtaccgcagctaaattagcagttgaagtagcaaagtatgacttcattgaaattcaagctggaaaagggcacattactaatgagttcttctcaagactaacaaataaaagaaaagatgaatatgggggaagttttgagaatagaattagaatattactagaaataatagataacgttagaaaaaatattccggaagatacgcccctgtttattaggttgaaggcctgtgataacttagatcatcctgatgcttggagcacagacgaaaccataaaattatcatttgaactggctaaacatggggtagatgtcctagatatagctggaagaggtttacgaatcggtcccaagtccgaaaaagaaaataagattatatttctgcaacaattaaaggaggctcacaaaggcaaaactaatcttttaattgcttcatctggtgtgatatccactgctgattatgcctccgagcttttagataaagaggcacaagatataattcttgttggtcgtccatttttgaaaaatccaaatcttgtgtcattttgggcagatgacgtgaatattactgtaacaaatgcagtacagtattcatggggattttacccaacaaagagtcacttaagttga

SEQ ID NO: 29623 - protein, 388 aa, Candida glabrata CBS 138
MGVSVKGAPNLDYFTPEQPILGKFIKYKEDEDGSSERDPPKLFKPLKIRALEIPNRIGVSPMCTYSTNNYMPTDFHLMHYGSLATRGPGIIIVECSAVSEGTAVTVNDMGIWNKEQASEHFSKIVKFAHSQNVIVGCQLGQFMRKVVQNVDEDNKAHNVEVGKEAHDLSTEEIKTIVEQWGTAAKLAVEVAKYDFIEIQAGKGHITNEFFSRLTNKRKDEYGGSFENRIRILLEIIDNVRKNIPEDTPLFIRLKACDNLDHPDAWSTDETIKLSFELAKHGVDVLDIAGRGLRIGPKSEKENKIIFLQQLKEAHKGKTNLLIASSGVISTADYASELLDKEAQDIILVGRPFLKNPNLVSFWADDVNITVTNAVQYSWGFYPTKSHLS

SEQ ID NO: 29624 - DNA, 1203 bp, Candida glabrata CBS 138
  CDS (1)..(1203)
atgtcattcacaactgattttgagccagtctctttgaagggtactaacttattcaagcctttgaaagttggtaacaacacggttctacatcgtgctgccttcccaccattaactagaatgagagctgagagcccaggtaacattccaaacagagaatggtctgtagagtattacagacaaagatcgcaaagacctggtactttagttatcactgaaggtaccttcccatctgctcaagctggtggttatgataatgctccaggtatttggtctgaagaacaattagttgagtggagaaagattattgatgccattcacagcaacaaatcgtttgcttgggtgcaactttgggctttgggtagactagccatgccaaatctgttggccagggacggtttgagatttgattcagcaactgataactactacgcaagcccagaacaagaagagcttgcaaagaagtccaacaacttacaacacggcttgtctagggaagatatcaagcaatatgttaatgattacgtgcaggcttccaagaatgctatttctgctggtgctgatggtgttgaaattcatagttcaactggtttcttgttgaacgaattcattgacccaatttccaaccacagatccgatgaatacggtggatcaattgaaaacagagcaagatttgttttggaagtagttgatgctgtcgttgatgccattggtgctgagaagacagctattagattctcaccatatggtaactacggaggtatgtctggtggtactgaccctactattattgcacaatatgcttacatcattggtgaattggaaaaaagagctaagggaggaaagagacttgcctacatacattttatggagccaagagttcttgatccattccttccagaaggtgaaagtgtatacaatgaaggtacaattgacttcgcttactcaatctggaagggtgtgattattagaactggtaactatgccattcatccagaagttgtaaaggatgttgttaatgatgacagaaccataattggttatggtagatactttatctctaaccctgatttggtcgaccgtttggaaaagggattacctttgaacaagtatgacaggtcatacttctacactatgactgccgaaggttacattgactatcctacctatgcagaagctatcaagaagggctgggataagaaataa

SEQ ID NO: 29625 - protein, 400 aa, Candida glabrata CBS 138
MSFTTDFEPVSLKGTNLFKPLKVGNNTVLHRAAFPPLTRMRAESPGNIPNREWSVEYYRQRSQRPGTLVITEGTFPSAQAGGYDNAPGIWSEEQLVEWRKIIDAIHSNKSFAWVQLWALGRLAMPNLLARDGLRFDSATDNYYASPEQEELAKKSNNLQHGLSREDIKQYVNDYVQASKNAISAGADGVEIHSSTGFLLNEFIDPISNHRSDEYGGSIENRARFVLEVVDAVVDAIGAEKTAIRFSPYGNYGGMSGGTDPTIIAQYAYIIGELEKRAKGGKRLAYIHFMEPRVLDPFLPEGESVYNEGTIDFAYSIWKGVIIRTGNYAIHPEVVKDVVNDDRTIIGYGRYFISNPDLVDRLEKGLPLNKYDRSYFYTMTAEGYIDYPTYAEAIKKGWDKK

SEQ ID NO: 29626 - DNA, 1203 bp, Candida glabrata CBS 138
  CDS (1)..(1203)
atgcctttcaaacacgattttacaccagttgctctaaaggacaccaatttatttaagccattgaaggttggtaacactgaggtgttacaacgtgttgctatggcaccattgtccagattcagggctgatccccagggaaatgtgccaaacaagaactggacagaagaatactacagacaaagatcacaaaggcctggtactatgattatcacggaggctactttcatttcagctcaagctggtggatacgatgctgccccaggtatttggactgaggaacaaatggaacaatggaagaagatttttaaagccatccatgataacaagtcatttgtatgggttcaaatgtgggctttgggaagacaagcattcccaaataacatggctagagatggtttgagattggatgctccttctgctgacctatatatgagtgacaagcagaaggaagttgctaaagaaaacaacattgctcaacatgaactgacaaaggaagacatcaagcaatacatcaaggactatgtcaaggccgctaagaactcggttgaatccggagctgatggtgttgaaatccatagtgcaaacggttatctgttgaaccaattcattgacccaaaatcaaacagaagaactgacgaatacggtggttctattgaaaatagatgtagatttgctcttgaagtggttgacgctgtcgtggatgctatcggtgctgagagaactggtatcagattatcaccatatggtttgtttggtaacatgagtggcggttttgaaccatctattgttgctcactacgcttacttaattggtgaactagagaagagaggaattgcaggcaaaagacttgcgtacattcaccttgtcgaaccaagtgtcactgatttgatgttggttgaagaccaaggcgaatataaggaaggtacaaatgattttgcatactccatctggaagggtcccatcatcagagctggtaactatgcactacatccagaattggttaaagaacaagtcaaggatcctagaaccttgattgcttacggtagatatttcatctccaaccctgacatcattgaccgtttagaaaatggtctgccattaaatgaacaagacagaccaaccttctatacacccaccgcagaaggttatattgactatccaaactacaacgatgctttgcaacttggatgggacaagcagtag

SEQ ID NO: 29627 - protein, 400 aa, Candida glabrata CBS 138
MPFKHDFTPVALKDTNLFKPLKVGNTEVLQRVAMAPLSRFRADPQGNVPNKNWTEEYYRQRSQRPGTMIITEATFISAQAGGYDAAPGIWTEEQMEQWKKIFKAIHDNKSFVWVQMWALGRQAFPNNMARDGLRLDAPSADLYMSDKQKEVAKENNIAQHELTKEDIKQYIKDYVKAAKNSVESGADGVEIHSANGYLLNQFIDPKSNRRTDEYGGSIENRCRFALEVVDAVVDAIGAERTGIRLSPYGLFGNMSGGFEPSIVAHYAYLIGELEKRGIAGKRLAYIHLVEPSVTDLMLVEDQGEYKEGTNDFAYSIWKGPIIRAGNYALHPELVKEQVKDPRTLIAYGRYFISNPDIIDRLENGLPLNEQDRPTFYTPTAEGYIDYPNYNDALQLGWDKQ

SEQ ID NO: 29628 - DNA, 1224 bp, Debaryomyces hansenii CBS767
  CDS (1)..(1224)
atgactaaatcttttaactatcaattatcaactgaatttaagccaaaatcacttgctgatacttctttgttcaaaccaatcaaagttggtaatatgaacttgcaacaccgtgcggttttggctcccttgactagattccgtaaccatattaactctattccaaacccagaagcaatgggtatgtattatggtcaacgttcgtccaggccaggaactcttgttataactgaagctaccattgtttctgcagctgcaggtggatacgatactgccccaggtatctacaaccaagaacaaattgatgcatggtccaagatttttaagagggttcatgacaataactcatatgtgtatcttcaattgtggtcattgggtagacaatctgacccagctaacttgaaaaaaattggtaagccatttgtctccgcttcagatgtctactccgatgatagaggcatcactagcgaaggggttatcgctgaggatggtgcaattgctgtcaataatgaattgagaccaatgactattccagaaattaaacagtatgtcaatgattatgctcaagctgctaggaattctcttgctgctggtgcagatggtgttgaagttcactgtggaaacagttacatgttgaaccaattccttgatattagctccaacttgagaactgatgaatatggtagtcaaactcttgaaaaccgtgcaagatttgctcttgaatgtattgatgctgttgttgaagcagtcggtgccgataaggttggtgttagattcgcaccgtatggtagatttggtggtatgtcaggctccgatgacttgactgcaattgctttgtacgcttacatttttgccgagcttgaaaagagagctcaacaaggtaaaagagtttcttacattcatcttgttcaggcccgtatgactgactttaacataaatgaaaacgacgaatcagcaaagttcgacacagaatttgtttacaaaatttggaaaggtgttgtaatgaaggcgggtgcatatgctactgacccagcagctgttagaagagaagttgaagttggccaaactttgattgcttatggtagatactttatttctaacccagatttaccagatagactcgccttgggtaagccattaaccaagtatgtaagagatagtttctatcttccagatccgatcgccggttacgtggattatccaacgtataagcagcaggatttatga

SEQ ID NO: 29629 - protein, 407 aa, Debaryomyces hansenii CBS767
MTKSFNYQLSTEFKPKSLADTSLFKPIKVGNMNLQHRAVLAPLTRFRNHINSIPNPEAMGMYYGQRSSRPGTLVITEATIVSAAAGGYDTAPGIYNQEQIDAWSKIFKRVHDNNSYVYLQLWSLGRQSDPANLKKIGKPFVSASDVYSDDRGITSEGVIAEDGAIAVNNELRPMTIPEIKQYVNDYAQAARNSLAAGADGVEVHCGNSYMLNQFLDISSNLRTDEYGSQTLENRARFALECIDAVVEAVGADKVGVRFAPYGRFGGMSGSDDLTAIALYAYIFAELEKRAQQGKRVSYIHLVQARMTDFNINENDESAKFDTEFVYKIWKGVVMKAGAYATDPAAVRREVEVGQTLIAYGRYFISNPDLPDRLALGKPLTKYVRDSFYLPDPIAGYVDYPTYKQQDL

SEQ ID NO: 29630 - DNA, 1236 bp, Debaryomyces hansenii CBS767
  CDS (1)..(1236)
atgattggagtccaaacttcaccattaaagaacacggacatttttaagcccttaaaagttggtgaacacgttttatctaacaaagtagtctatgcaccaacaaccagattgcgagcattagaggattatacaccttcagatttgacattggaatactacaataaaagatctaggtacccgggatcgttgttaattactgaagcgacacttgtttctgaacaagcgggtttatatggtaccaccccgggaatttggaacgaaaaacaagtcaaagaatggaaaaagattgctgacaaaattcatgaaaacgggtcatttgtctctaatcagctttggtttcaaggtagagttggtgatccccaattgttgagagatcatggattggatttggttgcgccttcggcgatctacccagacgacacttcaaaggaaaaagctgaagctgcaggtaacccaattagagccttaacagaaaaagaaattcatgaaattatttatgatacgtataccaatgcagctaagaatgctattgcagctggtttcgactatattgaactccatgcagcccacggatatttgcttgatcaattcttgcagccagctaccaatcaaagaaccgataaatacggtggtagtatcgaaaacagagccagattcgttttagaattagttgaccatttaactactgttgttggtgcaaataagttagctattagaatttctccatgggctaaatttcaaggtatgaaggctgaacaagattcaactcatccaatcattacgtttagttatttattgcacgaattacaaaagagagcagataacgggaatgagcttgcatatgtttcagttatcgagccaagagtaaacaacaatattgacattgatgtatcacaacaagcaggcgataatatttttgttggacagatttggaagggtatcatcttgaagagtggtaattatacttatgatgctcctcatttcaacactttgcttaacgatattagtgataatcgtacgttggtcggtttttccagatattatacatccaatcccgatttagtcaagagattatatgagggttgggatttgacgccatatgatagagatactttctacactactaacaattggggttataatacttggaataattataatgaaaacgacgaaatcgataagaattccgaagttaatagaaaagctaaagctatagaagaggttaaggttaaatag

SEQ ID NO: 29631 - protein, 411 aa, Debaryomyces hansenii CBS767
MIGVQTSPLKNTDIFKPLKVGEHVLSNKVVYAPTTRLRALEDYTPSDLTLEYYNKRSRYPGSLLITEATLVSEQAGLYGTTPGIWNEKQVKEWKKIADKIHENGSFVSNQLWFQGRVGDPQLLRDHGLDLVAPSAIYPDDTSKEKAEAAGNPIRALTEKEIHEIIYDTYTNAAKNAIAAGFDYIELHAAHGYLLDQFLQPATNQRTDKYGGSIENRARFVLELVDHLTTVVGANKLAIRISPWAKFQGMKAEQDSTHPIITFSYLLHELQKRADNGNELAYVSVIEPRVNNNIDIDVSQQAGDNIFVGQIWKGIILKSGNYTYDAPHFNTLLNDISDNRTLVGFSRYYTSNPDLVKRLYEGWDLTPYDRDTFYTTNNWGYNTWNNYNENDEIDKNSEVNRKAKAIEEVKVK

SEQ ID NO: 29632 - DNA, 1236 bp, Debaryomyces hansenii CBS767
  CDS (1)..(1236)
atgagcggagtccaaattgcagcattaaaagatacagacttgttcaagcctttaaaagttggtgaacacacattatctaacaaagtggtttatccaccaactaccagattgagagcgttagatgaccacacaccttcagatttggaattggaatattatgataaaagatcgaagtacgctggatcattgttaattaccgaagcaacttttgtatctgaacaagctggtttatatagcaatgtaccagggatttggaacgaaaaacatgtcaaaggatggaaggaaataaccgatagaattcatgaaaacggatcatttatttctagtcagttttggtttttaggtagagttggtgatccccaattgttgaaggatcgtgggttagattttgttgctccttcagcaatctacccagacgacactacaaaggaaaaagctgaagctgcaggtaacccaattagagccttaacagaaaaagaaattcatgatattatttatgatacgtataccaatgcagctaagaatgctattgcagctggtttcgactatattgaactccatgcagcccacggatatttgcttgatcaattcttgcagccagctaccaatcaaagaaccgataaatatggtggtagtatcgaaaacagagccagatttgttttagagttagttgaccatttaattactgttgttggtgcaaacaggttggctattagaatctcgccatgggctaaatttcaaggtatgaaggctgaacaagattctactcatgctgtaaccacattcagttatctattacacgagttacaaaagagagcagataatggaaatgaacttgcatatgtatcgattattgaacctcgtgtcctgggtattatagatgtcgaaaagtctcaacaagtgggtgataataccttcgttgggcaaatttggaagggaatcatcttgaagagtggtaattatacttatgatgctcctcattttaagactttattgcatgatatcagtgataaccgtactatggtaggtttcgctaggtattacacttccaatcccgatttagttaagaggttatatgagggttgggatttaactccatatgatagggacactttttatgccactaacaattggggttacaacacctggaacaactacgatgagaaggctgaaattaccaaagatgctgaaattagtagattagcaaaagctatagaggaaattaaagccaactga

SEQ ID NO: 29633 - protein, 411 aa, Debaryomyces hansenii CBS767
MSGVQIAALKDTDLFKPLKVGEHTLSNKVVYPPTTRLRALDDHTPSDLELEYYDKRSKYAGSLLITEATFVSEQAGLYSNVPGIWNEKHVKGWKEITDRIHENGSFISSQFWFLGRVGDPQLLKDRGLDFVAPSAIYPDDTTKEKAEAAGNPIRALTEKEIHDIIYDTYTNAAKNAIAAGFDYIELHAAHGYLLDQFLQPATNQRTDKYGGSIENRARFVLELVDHLITVVGANRLAIRISPWAKFQGMKAEQDSTHAVTTFSYLLHELQKRADNGNELAYVSIIEPRVLGIIDVEKSQQVGDNTFVGQIWKGIILKSGNYTYDAPHFKTLLHDISDNRTMVGFARYYTSNPDLVKRLYEGWDLTPYDRDTFYATNNWGYNTWNNYDEKAEITKDAEISRLAKAIEEIKAN

SEQ ID NO: 29634 - DNA, 1236 bp, Debaryomyces hansenii CBS767
  CDS (1)..(1236)
atgagaggagtaaaaattgaagaattaaaagaaaaagaattgttaaagaatttaaaagttggtgaaaaaaaattatataaaaaagtggtttataaaaaaaataaaagattgagagagttagatgaccacacaccttcagatttggaattggaatattatgataaaagatcgaagtacgctggatcattgttaattaccgaagcaacttttgtatctgaacaagctggtttatatagcaatgtaccagggatttggaacgaaaaacatgtcaaaggatggaaggaaataaccgatagaattcatgaaaacggatcatttatttctagtcagttttggtttttaggtagagttggtgatccccaattgttgaaggatcgtgggttagattttgttgctccttcagcaatctacccagacgacactacaaaggaaaaagctgaagctgcaggtaacccaattagagccttaacagaaaaagaaattcatgatattatttatgatacgtataccaatgcagctaagaatgctattgcagctggtttcgactatattgaactccatgcagcccacggatatttgcttgatcaattcttgcagccagctaccaatcaaagaaccgataaatatggtggtagtatcgaaaacagagccagatttgttttagagttagttgaccatttaattactgttgttggtgcaaacaggttggctattagaatctcgccatgggctaaatttcaaggtatgaaggctgaacaagattctactcatgctgtaaccacattcagttatctattacacgagttacaaaagagagcagataatggaaatgaacttgcatatgtatcgattattgaacctcgtgtcctgggtattatagatgtcgaaaagtctcaacaagtgggtgataataccttcgttgggcaaatttggaagggaatcatcttgaagagtggtaattatacttatgatgctcctcattttaagactttattgcatgatatcagtgataaccgtactatggtaggtttcgctaggtattacacttccaatcccgatttagttaagaggttatatgagggttgggatttaactccatatgatagggacactttttatgccactaacaattggggttacaacacctggaacaactacgatgagaaggctgaaattaccaaagatgctgaaattagtagattagcaaaagctatagaggaaattaaagccaactga

SEQ ID NO: 29635 - protein, 411 aa, Debaryomyces hansenii CBS767
MRGVKIEELKEKELLKNLKVGEKKLYKKVVYKKNKRLRELDDHTPSDLELEYYDKRSKYAGSLLITEATFVSEQAGLYSNVPGIWNEKHVKGWKEITDRIHENGSFISSQFWFLGRVGDPQLLKDRGLDFVAPSAIYPDDTTKEKAEAAGNPIRALTEKEIHDIIYDTYTNAAKNAIAAGFDYIELHAAHGYLLDQFLQPATNQRTDKYGGSIENRARFVLELVDHLITVVGANRLAIRISPWAKFQGMKAEQDSTHAVTTFSYLLHELQKRADNGNELAYVSIIEPRVLGIIDVEKSQQVGDNTFVGQIWKGIILKSGNYTYDAPHFKTLLHDISDNRTMVGFARYYTSNPDLVKRLYEGWDLTPYDRDTFYATNNWGYNTWNNYDEKAEITKDAEISRLAKAIEEIKAN

SEQ ID NO: 29636 - DNA, 1239 bp, Debaryomyces hansenii CBS767
  CDS (1)..(1239)
atgccagctaccgaaataatacctttaaaacatactgacttgtttaagtcaataaaagttggtgaccataccttgtcaaataaagttgttcatgctcccacgactagattcagggctttagacgatcatactccttcggatttagaatttgagtattattctaagagatctcagtttcctggttcattgttggttactgaagcaacttttgtatctgagcaagctggtctatactctaatgttcctgggatttgggaagctaagcatgttcaagcttggaagaagataactgatgaagttcataagaatggttccttcatcgcttgtcaattctggtatttgggtagggttggtgatccaaagttattaaagaaacgtggattggattttgtttcgtcgtctgacaattatgtcgataaaaagtccaaaaaatatgccgaatctgttggtaatcctcttagagctttgacagaagacgaagttcacgatcttgtattcaagacatacgctaatgcagccaaaaatgcattagctgctggttttgattatattgaactccatggtgcccacggttacttaatcgatcaattccttcagccatcagcaaacaccagaaatgacaaatacggtggaagtattgagaaaagagcaaagtttgtgttggatttaatcgatcatttgacttctattgtcggcgcacatagattagccattaggctttcgccgtgggccaagttccaaggtattaaaagtgaagaagatacagtgcatcctatcacaacattcagttatcttttacatgaattacagaacagagctgatgcaggcaaccagcttgcatacatttctattgtagagcctcgggttcagggaacaattagcgtaggtgaagaccaacaaaagggaaacaatgatttcgtgggtcagatttggaaaggtataattttgaagagtggtaattacacctatgatgctcctaacttcaagaccatgttacaagatatcagtgacaaccgtactttagttggattttcaagatattatacttctaaccccgatttagttaaaagactttacgaaggatgggacttggttccttacgataggcctaccttttacaccaaaaacaattggcactataacacctttgctaactatgaagaggaagacaagtccatcaaggaagaagaagaaaagagatttgctaaagatatcggattacttaaagctcatttgtga

SEQ ID NO: 29637 - protein, 412 aa, Debaryomyces hansenii CBS767
MPATEIIPLKHTDLFKSIKVGDHTLSNKVVHAPTTRFRALDDHTPSDLEFEYYSKRSQFPGSLLVTEATFVSEQAGLYSNVPGIWEAKHVQAWKKITDEVHKNGSFIACQFWYLGRVGDPKLLKKRGLDFVSSSDNYVDKKSKKYAESVGNPLRALTEDEVHDLVFKTYANAAKNALAAGFDYIELHGAHGYLIDQFLQPSANTRNDKYGGSIEKRAKFVLDLIDHLTSIVGAHRLAIRLSPWAKFQGIKSEEDTVHPITTFSYLLHELQNRADAGNQLAYISIVEPRVQGTISVGEDQQKGNNDFVGQIWKGIILKSGNYTYDAPNFKTMLQDISDNRTLVGFSRYYTSNPDLVKRLYEGWDLVPYDRPTFYTKNNWHYNTFANYEEEDKSIKEEEEKRFAKDIGLLKAHL

SEQ ID NO: 29638 - DNA, 1086 bp, Yarrowia lipolytica CLIB122
  CDS (1)..(1086)
atgccgtcaaacctgtttacgcctatccaagttggcaattgccatctgctcaaccgcatcgtgtttgcgccattgactcggtgcagaaacgtcaagactgtgccttccgatctgcaagtgacccattatgcccagcgcggccaagatccgggcaccctgctgatctcagaggctacaatgatctcggaaaagtccggaggatacctgggtcacgagaacctgcctggaatttggtcttccgagcaaaccgaaggctggagaaaggtagtccaggccgtccacgatgccaaatcgttcatgttcatccaattgtgggacctgggacgggcttctgaccccgaaactatcaaggcgctcggctacgaccgagtttcagcctctgatcactacaccgaagacggaaagaactttgtgcgcggcctggaagtgaaggaaatcaaggaacgggtggatttttatgtccaggctgcccagaacgccatccaggcgggcgctgacggagtggaaatccacgctgccaacggatacctgccagaccagttcctgagatggaacacaaacactagaaacgacgaatatggaggctcggtggagaagcgagcccggttcgtgtttgagattgtggccgctgtggtggctcaagtcggacagaagaagacaagtatcagactgagtccctggacgcggtttggagacatggctgtggacgagcacaagtcacgtgaacagtttgagtacgtggtcacccaactccagacccagtaccccgatctggcgtacattcatgtgatcgagggacgaacagatggccatcaggacctcgaggttccccagtggatgaacaatgactggatccagaatatctggaagggtcctattattcgagctggaggatatactcctgagagtgctgttgccgaggctcagactaacgatcgaaccctggtggcttttggacggatgttcacttcgaatcctgatcttgttgatagagtccgtcatggtaaggctctcaccaagtacgacagaagtactttctacactcagaccggtgagggttatgttgattggaagaacgccgactag

SEQ ID NO: 29639 - protein, 361 aa, Yarrowia lipolytica CLIB122
MPSNLFTPIQVGNCHLLNRIVFAPLTRCRNVKTVPSDLQVTHYAQRGQDPGTLLISEATMISEKSGGYLGHENLPGIWSSEQTEGWRKVVQAVHDAKSFMFIQLWDLGRASDPETIKALGYDRVSASDHYTEDGKNFVRGLEVKEIKERVDFYVQAAQNAIQAGADGVEIHAANGYLPDQFLRWNTNTRNDEYGGSVEKRARFVFEIVAAVVAQVGQKKTSIRLSPWTRFGDMAVDEHKSREQFEYVVTQLQTQYPDLAYIHVIEGRTDGHQDLEVPQWMNNDWIQNIWKGPIIRAGGYTPESAVAEAQTNDRTLVAFGRMFTSNPDLVDRVRHGKALTKYDRSTFYTQTGEGYVDWKNAD

SEQ ID NO: 29640 - DNA, 1125 bp, Yarrowia lipolytica CLIB122
  CDS (1)..(1125)
atgacacacctattctcacccatccaagtgggagcttcgcaactctcgaaccgtgttgttcttgctcccctgactcgaattcgagctgagaagcatgtgccttctgatctcgcagtggagtactacacccagcgagcttccagcagtggcaccctgctgatttcagaagccacatacatccatccttcgtgtgcgggacacaagaaccgccctggcctcgttcctggggtgtggagtgacgatgctgttttgactggatggaaaagagtgattgaaggggttcattccaagggatccaagatgtacattcaattatgggacctgggtcgagtagccgactatgagacccttcaggatattggggggtatgacttggtgggtccctcagctattgctcaagagggggatgacgaaggaagcaaacacattcgcgccttgagtgtttctgaaatcaaacaaaaagtcaggtatttcgtcgaggccgctaagaatgctattgccgctggagctgacggagtggagattcattctgctaacggatacctccccgatcagtttttgcactggaactccaatcacagaacagacgagtatggaggcagcgtcgagaatcgtgcacggtttttattggagattgtggatgccgtggctgattctgttggtgctgacagagtaggtgtaagattctctccttggaccacttaccaggatatggatgttgatgaagacaagacactgcctcagtacaagtacctgtttgagcagctggagaagagagctgttgaagatgagactaaacggttgtcttatatccatgtggttgaacctcgagttgatggagtgaacgatgtgactaccaagtcgtggcagtccaacgagcccttcagaaagatctggacaggaaatctcatcagagctggaggattcaagagacagagtgccattgaggttgctcaacaggacaacaagactctggttgcgtttggacggtattttatttccaatcctgatctggtgaagaggttggaagaggataaggcgctgactcaatatgacagagctaccttctatcttcctggagctcaaggatatacggactattcgttctatgacgagacagagtga

SEQ ID NO: 29641 - protein, 374 aa, Yarrowia lipolytica CLIB122
MTHLFSPIQVGASQLSNRVVLAPLTRIRAEKHVPSDLAVEYYTQRASSSGTLLISEATYIHPSCAGHKNRPGLVPGVWSDDAVLTGWKRVIEGVHSKGSKMYIQLWDLGRVADYETLQDIGGYDLVGPSAIAQEGDDEGSKHIRALSVSEIKQKVRYFVEAAKNAIAAGADGVEIHSANGYLPDQFLHWNSNHRTDEYGGSVENRARFLLEIVDAVADSVGADRVGVRFSPWTTYQDMDVDEDKTLPQYKYLFEQLEKRAVEDETKRLSYIHVVEPRVDGVNDVTTKSWQSNEPFRKIWTGNLIRAGGFKRQSAIEVAQQDNKTLVAFGRYFISNPDLVKRLEEDKALTQYDRATFYLPGAQGYTDYSFYDETE

SEQ ID NO: 29642 - DNA, 1107 bp, Yarrowia lipolytica CLIB122
  CDS (1)..(1107)
atgacacaaacgcacaatctgttttcgccaatcaaagtgggctcttcggagctccagaaccggatcgttctcgcacccttgactcgaaccagagctctgcccggaaacgtgccctcggatcttgccacagagtactacgcacaaagagcagcatctccaggcactctcctcatcaccgaggccacatacatctcccccggatctgctggagtgcccattccaggagacggaatcgttccgggcatctggagtgacgagcagctcgaagcatggaaaaaggtgttcaaggccgtgcacgaccgaggatccaaaatctacgtccagctgtgggacattggacgtgtcgcatggtaccacaagctgcaggaactgggcaactacttccctacaggcccctcagctatccccatgaagggagaggagagcgagcatctcaaggctctgactcactgggagatcaagggcaaggtggccctctacgtcaacgctgccaagaacgccattgccgcaggcgctgatggcgtcgagatccactcggccaacggctaccttcccgacacatttctgagaagcgcctccaaccaacgaacagacgaatatggaggaagcatcgagaaccgggcccgattctcgctggagattgtcgacgctatcaccgaggccattggagcagacaaaaccgccatccgtctgtctccctggtccactttccaggacattgaggtgaatgacaccgagacccccgcacagttcacatacctgtttgagcagctgcagaagcgagccgacgagggaaagcagctggcctacgtgcatgtagttgagccccgactgtttggtccccccgagccctgggccaccaatgagcctttcagaaaaatttggaagggtaacttcattagagcaggtggatacgatagagagactgctcttgaggatgcagacaagtcagacaacaccctgattgcctttggtcgagacttcattgccaatcctgatctcgtccaacgcctcaagaataacgagcctttggccaagtacgacagaacaaccttctacgttccaggtgccaagggctacactgattaccctgcgtacaagatgtaa

SEQ ID NO: 29643 - protein, 368 aa, Yarrowia lipolytica CLIB122
MTQTHNLFSPIKVGSSELQNRIVLAPLTRTRALPGNVPSDLATEYYAQRAASPGTLLITEATYISPGSAGVPIPGDGIVPGIWSDEQLEAWKKVFKAVHDRGSKIYVQLWDIGRVAWYHKLQELGNYFPTGPSAIPMKGEESEHLKALTHWEIKGKVALYVNAAKNAIAAGADGVEIHSANGYLPDTFLRSASNQRTDEYGGSIENRARFSLEIVDAITEAIGADKTAIRLSPWSTFQDIEVNDTETPAQFTYLFEQLQKRADEGKQLAYVHVVEPRLFGPPEPWATNEPFRKIWKGNFIRAGGYDRETALEDADKSDNTLIAFGRDFIANPDLVQRLKNNEPLAKYDRTTFYVPGAKGYTDYPAYKM

SEQ ID NO: 29644 - DNA, 1122 bp, Yarrowia lipolytica CLIB122
  CDS (1)..(1122)
atggctcctgctctgttcagtcccatcaatgtgggagacactcacctgctcaaccgggtcgttatggctccattgacccgatttcgagctgatgagggaggtgttccctctgatcttcagaaggactactacgtccagcgatcccagacccctggcactcttctcgttgctgaggcaacctacgtttctcctggtgcaggcggcatgaagacctttggaggccatgttcctggtctgtggaacgaggctcagattgctggctggaaaaaagtgattgatgcggtccatgccaagggatgcaagttctacatccagctgtgggatctcggccgaactgccaaccagcaggttctggagaaggaaggactgcccttcactggtccctctgctatccctcagaagggagacaagtttggagacaagatccgagcccttaccgtgcctgagatcaagcagaagatcaaggactacgccaccgctgctgagaatgcaatcaaggccggtgctgacggagttgaaatccactcggcaaacggttatctgcccgatcagttcattcactggaattctaatcaccgaacagacgagtacggaggaagtatagaaaaccgatgtcggttttctctggagatcgtggacgccatttctgcctccatcggttcagacaaactggcgatccgactgtccccctggaccgacgttcaggacgtcgaggttgatcaggtcaacacgctccccacttttgaatacatcttccgtcagctccaaaagcgagcagacaatggccagaagctagcctacgtgcatctcattgagccccgagtcaatggcaccaagaccaagcgggaggatattgcgtggcagaccaacgagcctttccgaaagatctggaagggtcctcttgttcgagctggaggtttcactcgagaaactgctctcgaggctgcggcttctgacccccttactctggttgcgttcggccgattcttcatcagtactcccgatctcgttgaacgactggagaaggacgagaagctcaatccttacaatcgaaagactttctactcctccggtccagttggatacattgactatcccacttacgaaaaggccaagttgtag

SEQ ID NO: 29645 - protein, 373 aa, Yarrowia lipolytica CLIB122
MAPALFSPINVGDTHLLNRVVMAPLTRFRADEGGVPSDLQKDYYVQRSQTPGTLLVAEATYVSPGAGGMKTFGGHVPGLWNEAQIAGWKKVIDAVHAKGCKFYIQLWDLGRTANQQVLEKEGLPFTGPSAIPQKGDKFGDKIRALTVPEIKQKIKDYATAAENAIKAGADGVEIHSANGYLPDQFIHWNSNHRTDEYGGSIENRCRFSLEIVDAISASIGSDKLAIRLSPWTDVQDVEVDQVNTLPTFEYIFRQLQKRADNGQKLAYVHLIEPRVNGTKTKREDIAWQTNEPFRKIWKGPLVRAGGFTRETALEAAASDPLTLVAFGRFFISTPDLVERLEKDEKLNPYNRKTFYSSGPVGYIDYPTYEKAKL

SEQ ID NO: 29646 - DNA, 1125 bp, Yarrowia lipolytica CLIB122
  CDS (1)..(1125)
atgactactccaaacctgttcaagccaatcaaagtcggtgctagccagctgtctaaccgggtggtgatggctcctcttactcgaaccagagccgagaaacacgtgccttccgatctggccgttgagtactacacccagcgagcttccacagccggaacactcatcatttccgaggccacatatattcatccttccgctggaggccacaagggtcgagagggtcttgttcctggtatctggggagacgcctccatcattgcaggctggaagaaggtgattcaaggcattcattccaaggggtccaagatttacatccaattgtgggatattggacgtgtagccaactacgatgtgcttcaacagactggccatgatctggtgggtccttctgcaattgctcaagctggagatgaagatggagccaagcatgtgcgagctctgactattcctgagatcaaacagaaagtgcagctctacgtagacgccgctaaaaatgctcttgaggctggtgctgacggtgtggagatccattcggccaacgggtaccttcctgatcagttcatccactggaactccaacaaccgaacagacgagtatggaggctctattgagaacagatctcgattcagcctggagattattgatgcagtgtctgctgctatcggtgccgaccgtgtcggcgtgcgattttcaccctggaccaccttccaggacatggaggtcaacgaggagaagtctctgcctcagttcaaatatctgtttgagcagctggagaaacgtgcgaaggagaatgagaagaaccgcctctcttacattcacgtgattgagcctcgggctgacggcatctctgacgccattcccaagcaatggcaatccaacgatcctttcagaaacatctggaccggagacctcattcgagcaggaggatacaacagagaaacggccatcgaaaccgctcaggaggatgacagaacgctgattggttttggacggtactttattgcaaaccctgatctcgtctaccgtcttgaaaacgacctccctctgacccactgggatagaccctctttctatacccccggtcctcatggatacacagattaccccttccataaaaaggagtaa

SEQ ID NO: 29647 - protein, 374 aa, Yarrowia lipolytica CLIB122
MTTPNLFKPIKVGASQLSNRVVMAPLTRTRAEKHVPSDLAVEYYTQRASTAGTLIISEATYIHPSAGGHKGREGLVPGIWGDASIIAGWKKVIQGIHSKGSKIYIQLWDIGRVANYDVLQQTGHDLVGPSAIAQAGDEDGAKHVRALTIPEIKQKVQLYVDAAKNALEAGADGVEIHSANGYLPDQFIHWNSNNRTDEYGGSIENRSRFSLEIIDAVSAAIGADRVGVRFSPWTTFQDMEVNEEKSLPQFKYLFEQLEKRAKENEKNRLSYIHVIEPRADGISDAIPKQWQSNDPFRNIWTGDLIRAGGYNRETAIETAQEDDRTLIGFGRYFIANPDLVYRLENDLPLTHWDRPSFYTPGPHGYTDYPFHKKE

SEQ ID NO: 29648 - DNA, 1140 bp, Aspergillus nidulans FGSC A4
  CDS (1)..(1140)
atggactcctccaaactcttcaccccactcaaggtgggcaacatccagctcgcccaccgcattaccctccccccaatgacacgatttcgcgtcgacgaaggccatattccccaagaccaggtcgccgagtactacgcgcagcgcgccgcggtccccggcaccctgctcatcaccgaagcaacgctcatctcgacacggccgggcgtgtatacgcacgtcccgggcctctggagcaaggagcagatcgcgcagtggcgcaaggtcacggacgccgtgcatgccaagggctccttcatctacaatcaactgtgggcgcttgggcgagtcgctgaccccgaggctacgaagaaagagcacggcgggtctgagggacgggtgattgcgccgtccgctgtgccgcttgatccaagtggggagcctcccaaggagatgagcgaggaggacattgcgggtgtgattcaggatttcgcaacggcggccaaaaacgctatcgaggctgggttcgatggcgttgagatccatggcgcgaacgggtacctcgttgaccagttcatccaaaaggccgcgaacaagcggagtgaccggtggggtggcagcgtagagaaccgtgcgcgcttcccactggaagtgatccgagctgttgtcgatgcgattggcgctgagcgcacagcgattcgatacagcccgtggagcacgtttcagggaatgggggttgatccggacgaagagcagattgcgcagtttgcgtacctcgcaaagaagacggccgaattcaagcttgcgtttgtgcatcttgttgagggacggattgcaggcaataccgagacggatgagaacgggggccggaacctgcatttcttctttgatgcgtacgggcgtgctggcccgattatggtcgccggtgggtatgtcggcgagactgcgcgagaagctgcggatgtccagtacaaggactacgatgtgatgatcgccatcgggaggccatggaccgcgaacccggaccttcccttcaaggttaagaaggggatcccgttgcggccgtatgagagggagcacttctataccgtgcgcagcccgaagggatacattgattacgactttagcgaggagttcaaggctgccactggaactcggctgtga

SEQ ID NO: 29649 - protein, 379 aa, Aspergillus nidulans FGSC A4
MDSSKLFTPLKVGNIQLAHRITLPPMTRFRVDEGHIPQDQVAEYYAQRAAVPGTLLITEATLISTRPGVYTHVPGLWSKEQIAQWRKVTDAVHAKGSFIYNQLWALGRVADPEATKKEHGGSEGRVIAPSAVPLDPSGEPPKEMSEEDIAGVIQDFATAAKNAIEAGFDGVEIHGANGYLVDQFIQKAANKRSDRWGGSVENRARFPLEVIRAVVDAIGAERTAIRYSPWSTFQGMGVDPDEEQIAQFAYLAKKTAEFKLAFVHLVEGRIAGNTETDENGGRNLHFFFDAYGRAGPIMVAGGYVGETAREAADVQYKDYDVMIAIGRPWTANPDLPFKVKKGIPLRPYEREHFYTVRSPKGYIDYDFSEEFKAATGTRL

SEQ ID NO: 29650 - DNA, 1167 bp, Aspergillus nidulans FGSC A4
  CDS (1)..(1167)
atgggctccctttctcccctcgaacccctctttactccccttcgcattggcgcctttgcgctgcagcaccgtgttgtccaagccccttgcacgcgcatgcgctcaaccaaggaatccgacggcatatgggtgcccaacgatctgaatgtggaatactacgcccagcgcgcatctaaggggggactaatgctttctgaggcaactccaatcagtcgtgatgcggcaggataccctggcgtccccggaattttcactccgagccagattgagggctggagaaaagtcaccaacgcagttcacacaaagggcgggctcatcctctgccagttgtggcacgttgggcgggcgacgacgcccggttttctcggtggaaagacgcctcttgccccgtctgatatccccatttccggcaaggcgctggatgggaatgtgtatgccgatgcgccaccgcgtcctatgaccgttgacgagatcaaagaggtcgtcttggagtatgcggcggcgagtaagagggcgattgaggctggctttgacggagtggagattcatggtggaaatggctaccttctcgaccagtttctacacgacaatgtaaataaccggaccgacgcctacggaggctcaattgaaaaccggtcccggatcgtccttgaaatcatctcggccgtcacggaagccatcggcgcagagcgcgtcgggatccgtctttccccatacaactacttccaggatacacgggactcaaacccacagaagcactgggggtatctgtgcactcagatcgcttcacttcccgagtccagcaggccagcctacgtgcacatgattgagccgcgcttcgacgagatcctcgacgagtctgaaaagatcagtgcccttgagacaatgcaagaagtcgtcaagccatctcttgacgggctcagatcttctctgaagaaggggggtgtcagcttcattgcggcaggaaatttcaagccagagaacgccggtgagaaacttataacagacagcgcggatgctatcgcttttggccggcttttcatctcgaatcccgatctgccacgacgattgaaggagggtatcgagttgaccaagtatgaccggagtacgttctatggcgcaacgcccccagagaagggctatacggactaccctttcgctcaatag

SEQ ID NO: 29651 - protein, 388 aa, Aspergillus nidulans FGSC A4
MGSLSPLEPLFTPLRIGAFALQHRVVQAPCTRMRSTKESDGIWVPNDLNVEYYAQRASKGGLMLSEATPISRDAAGYPGVPGIFTPSQIEGWRKVTNAVHTKGGLILCQLWHVGRATTPGFLGGKTPLAPSDIPISGKALDGNVYADAPPRPMTVDEIKEVVLEYAAASKRAIEAGFDGVEIHGGNGYLLDQFLHDNVNNRTDAYGGSIENRSRIVLEIISAVTEAIGAERVGIRLSPYNYFQDTRDSNPQKHWGYLCTQIASLPESSRPAYVHMIEPRFDEILDESEKISALETMQEVVKPSLDGLRSSLKKGGVSFIAAGNFKPENAGEKLITDSADAIAFGRLFISNPDLPRRLKEGIELTKYDRSTFYGATPPEKGYTDYPFAQ

SEQ ID NO: 29652 - DNA, 1233 bp, Aspergillus nidulans FGSC A4
  CDS (1)..(1233)
atgccccctggcctaccgaccacaatgacagaaacacgcctctttaagccgatcaaaattggcaccgtccaggtccagcaccgcatcggaatggcacccttaacccgcctgcgcgcaaatcccgaccgtaccccaacatcgctgatgaaggagtactacactcaacgagcctcagtccccggaaccctgataatcacggagggcacgctgatctcaacagcctctgcaggagctttcccaggcgcccctggcatctggcgcgccgaccaagtcgccgcgtggaaagagatcactgatgcagtccacaaaagaggcagcttcatctatgtgcagctgtttagtatgggtcgcgctgcggagaaaaagttggcagagagcgagggaatagaggtcgtggcacctagcgcgattcccatcccgtatgatgagaaacctgatgcgcctattccgcgggcaatgagcgttgccgagattcagcagacgattgtggatttcgtgaaggcgtcaaaggacgcactgactgctggtttcgatggggtggagatccatggtgcgaatgggtatctccttgatcagttcctccaagacacgagtaaccagcgcgacgacgagtacgggggcagcgtggcgaatcggtcacgactcctccatcaagtcctgcagaaagtcgcaaaggctatcggtgccgacaaggtcggactgcgccttagtccctggtcgcggttccagggaatgcgaatggacgatccgattccgcagtttgcagatatcatcgacaaggcaagcgaccttaatctcgcgtacctgtcgctcatcgaggcccgagtctttggtgctcgtgattatgaggggagtctagatggggataaagaaacattggacttcgtgtacgagcgttggcatggaccggttcttgttgcgggtggatatgagctcgaaaaggcgcggaggctagttgatgagcagtacccgaagaaggatattgttgttctgtttggacggcatttcatctcgaatccggatcttgtgtatcggttcaaggaaggggtagaattgaccaagtaccagcgtgagacgttctatgaaatccgctcggcggtgggctatgtggactatccattcagtaaggagtactcggcgaccatcaacctcgctggaagccgcgtgggcaggctttcagatttacgaaaatgtggtagcccaggtttggacttttcctcatcgaaatcctaa

SEQ ID NO: 29653 - protein, 410 aa, Aspergillus nidulans FGSC A4
MPPGLPTTMTETRLFKPIKIGTVQVQHRIGMAPLTRLRANPDRTPTSLMKEYYTQRASVPGTLIITEGTLISTASAGAFPGAPGIWRADQVAAWKEITDAVHKRGSFIYVQLFSMGRAAEKKLAESEGIEVVAPSAIPIPYDEKPDAPIPRAMSVAEIQQTIVDFVKASKDALTAGFDGVEIHGANGYLLDQFLQDTSNQRDDEYGGSVANRSRLLHQVLQKVAKAIGADKVGLRLSPWSRFQGMRMDDPIPQFADIIDKASDLNLAYLSLIEARVFGARDYEGSLDGDKETLDFVYERWHGPVLVAGGYELEKARRLVDEQYPKKDIVVLFGRHFISNPDLVYRFKEGVELTKYQRETFYEIRSAVGYVDYPFSKEYSATINLAGSRVGRLSDLRKCGSPGLDFSSSKS

SEQ ID NO: 29654 - DNA, 1224 bp, Candida albicans SC5314
  CDS (1)..(1224): transl_table=12
atgactattgaatcaactaattcatttgttgtcccatcagatactgaattaattgatgttactccattaggttcaacaaaattatttcaaccaattaaagtcggtaacaatgttttacctcaacgtattgcttatgtcccaaccaccagatttagagcttctaaagatcatattccaagtgatttacaattaaattattataatgctcgttctcaatatccaggtacattgattattactgaagcaacatttgcatctgaaagaggtggtattgatttacatgttccaggtatttataatgacgttcaagctaaaagttggaagaaaatcaatgaagcaattcatggcaatggaagtttcagttcagttcaattatggtatttaggtagagttgctaatgctaaagatttgaaagatgctggattacctcttattgcgccatcagcagtttattgggatgagaatagtgaaaaattggccaaagaagctggaaatgaattgagagcattaactgaagaagaaattgatcatattgttgaagttgaatatcctaatgctgctaaacatgcacttgaagcaggatttgattatgttgaaatccatggtgctcatggttacttgttggatcagtttttaaatcttgcctctaataaaagaaccgataaatatggttgtggtagtattgaaaatcgtgcacgattattattaagagtggttgataaattaattgaagttgttggtgctaatagattggcattacgtttatcaccatgggctagtttccaaggtatggaaattgaaggtgaagaaatccattcatatattttacaacaattacaacaacgtgctgataatggtcaacaattggcttatatttctcttgttgaacctcgtgttactggtatttatgatgtttctttaaaagatcaacaaggtcgtagtaatgaatttgcttataagatttggaaaggaaactttgttcgtgctggtaattatacttatgatgctccagaatttaaaactttgattaatgatttaaagaatgatcgtactattattggattttctagatttttcacttcaaatcctgatttagtggaaaaattgaaattgggtaaaccattgaattattataatcgtgaagaattttataagtactacaactatggttataattcttatgatgaatcagaaaagcaagtcattggtaaaccattggcatag

SEQ ID NO: 29655 - protein, 407 aa, Candida albicans SC5314
MTIESTNSFVVPSDTELIDVTPLGSTKLFQPIKVGNNVLPQRIAYVPTTRFRASKDHIPSDLQLNYYNARSQYPGTLIITEATFASERGGIDLHVPGIYNDVQAKSWKKINEAIHGNGSFSSVQLWYLGRVANAKDLKDAGLPLIAPSAVYWDENSEKLAKEAGNELRALTEEEIDHIVEVEYPNAAKHALEAGFDYVEIHGAHGYLLDQFLNLASNKRTDKYGCGSIENRARLLLRVVDKLIEVVGANRLALRLSPWASFQGMEIEGEEIHSYILQQLQQRADNGQQLAYISLVEPRVTGIYDVSLKDQQGRSNEFAYKIWKGNFVRAGNYTYDAPEFKTLINDLKNDRTIIGFSRFFTSNPDLVEKLKLGKPLNYYNREEFYKYYNYGYNSYDESEKQVIGKPLA

SEQ ID NO: 29656 - DNA, 1179 bp, Candida albicans SC5314
  CDS (1)..(1179): transl_table=12
atgacaatctccaattcaaatttattcaaaccaattaaagtcggcaataaaactatcaagaatagaattgctcatttgccaaccactagaaatcgtgctactgatgatcatgtacccactgatttaatgaaaaaatactacacagaccgtgctaaaagtggatctttattaatcaccgaagccactttaatctcattagatcaaggtgtttaccctaatgttcctggtatgtggaataaacaacaaaaggatgcttggaaagaaatcaccgactcagttcattctattggtggcaccatagctatccagttatgggctttaggtagagttggtaatgccaaattgttgaaagatgaaggattaccattaactggagtcagtcctatttatgaacacgaaaaggctgaacaagatgcaattgatgcaggcaacccaattcaagaattgactcaagatcaaatcaaagatattgtttataatcagtttgccaacgcagtcaaattagctgatgaagcaggttttgattttattgaattgcacggtgccaatagttatttgtttgagcaattcattcatcctggaaccaataagagaactgataaatacgggggatcaattgaaaatagagccagatttttatttgaagttgttgatcatgtatccacaattgttgatcctgctaaattggcaatcagattatcacctttaaacaattttcaggttccatttgtaaacccagaaggacaagaagattattcttacatcgttgaaggtttacagaagagagcagatgaaggtaaaggtcttgcattcattgatgttgttgaaggacgattcacatctgatggaggtactgaaggttgtaatgtagattttgttggtgaaatttggaaaggtccattgttaaaaggaggcaattatacttatgatagaaagaacgagtggaaaacaattgaaaacgatgccaatgcagatgatagaacgttggttggctttggcagatatttcattgctaacccagatttacctgctagaatccaaaagggcaatgaattgaatgattatgatagatcaacattctacaatactgatgattatggttataatacctatccattttatggagaggaaaataaggctgaccctaatattaaagtattaggcgtggctttagcttag

SEQ ID NO: 29657 - protein, 392 aa, Candida albicans SC5314
MTISNSNLFKPIKVGNKTIKNRIAHLPTTRNRATDDHVPTDLMKKYYTDRAKSGSLLITEATLISLDQGVYPNVPGMWNKQQKDAWKEITDSVHSIGGTIAIQLWALGRVGNAKLLKDEGLPLTGVSPIYEHEKAEQDAIDAGNPIQELTQDQIKDIVYNQFANAVKLADEAGFDFIELHGANSYLFEQFIHPGTNKRTDKYGGSIENRARFLFEVVDHVSTIVDPAKLAIRLSPLNNFQVPFVNPEGQEDYSYIVEGLQKRADEGKGLAFIDVVEGRFTSDGGTEGCNVDFVGEIWKGPLLKGGNYTYDRKNEWKTIENDANADDRTLVGFGRYFIANPDLPARIQKGNELNDYDRSTFYNTDDYGYNTYPFYGEENKADPNIKVLGVALA

SEQ ID NO: 29658 - DNA, 1221 bp, Candida albicans SC5314
  CDS (1)..(1221): transl_table=12
atgactgtcgaatcaactaactcatttgttgtcccggccggtactaaacaaattgaaattgcccccttaggatcaacgaaattattccaaccgattaaagttggtaaaaatattttaccccatcgtgttgctcatgccccaaccaccagattcagagctgccaaaaatcatactccaagtgatttacaattagaatattataaaactcattctcaatatccaggtactttgatcatcactgaggcaactttcacttctgaacaaggtggtatggatttacatgttcctggaatttataatgatgctcaaaccaaagcttggaagaaaatcaatgatgaaattcatgctaatggaagtttcagttcgatgcaattatggtatttgggtagagttgcaaaccctaaagatttgaaagatgctggattaccccttattggtccatcagcagtttattgggataaagaaagtgagaaattggccaaatctattggtaatgaattgagggaattgacagaaaaggaaattgatcatattgttgaagttgaatatccgaatgctgctaaacgtgccattgaagcaggatttgattatattgaagttcatagtgccccaggttatttcttagatcaatttttgaacccagcttccaataagagaaccgataaatatggtggtagtattgaaaatcgtgcacgtttattattaagaattattgataaattgattggtatagttggtgctgaaaaattggctgttcgtttagcaccatggtcatcatttttaggtatggagattgaaggtgaagaaatccattcatatattttacaacaattacaacaacgtgctgataatggtcaacaattggcttatgtttcacttattgaacctcgtgttattgggatttttgatgcttcgttagaacatcaaaaaggtcgtagcaatgaatttgcttataaatattggaaaggaaattttgttcgtgctggtaattatacttatgatgccccagaatttaaaactttacttcatgatttagataatgatcgcactattgtggcgtttgcaagatttttcacttccaatcctgatttagtggaaaaattgaaattgggtaaaccattgaatcattatgatcgtgaagaattttataagtactacaactatggttataattcttatgatgaatctgaaaaacaagtcattggtaaaccattggtctag

SEQ ID NO: 29659 - protein, 406 aa, Candida albicans SC5314
MTVESTNSFVVPAGTKQIEIAPLGSTKLFQPIKVGKNILPHRVAHAPTTRFRAAKNHTPSDLQLEYYKTHSQYPGTLIITEATFTSEQGGMDLHVPGIYNDAQTKAWKKINDEIHANGSFSSMQLWYLGRVANPKDLKDAGLPLIGPSAVYWDKESEKLAKSIGNELRELTEKEIDHIVEVEYPNAAKRAIEAGFDYIEVHSAPGYFLDQFLNPASNKRTDKYGGSIENRARLLLRIIDKLIGIVGAEKLAVRLAPWSSFLGMEIEGEEIHSYILQQLQQRADNGQQLAYVSLIEPRVIGIFDASLEHQKGRSNEFAYKYWKGNFVRAGNYTYDAPEFKTLLHDLDNDRTIVAFARFFTSNPDLVEKLKLGKPLNHYDREEFYKYYNYGYNSYDESEKQVIGKPLV

SEQ ID NO: 29660 - DNA, 1242 bp, Candida albicans SC5314
  CDS (1)..(1242): transl_table=12
atgtcaaattctaacccattaaaagattcattagtatttcaaccaattaaagttggtgataataccctttccaacagaattgtttattgtccaaccacaagattcagagctgcaaaagggaatgaagaaccaacatatcgtcatgtccctctggatttaatgcttaaatattattctgatcgtgctcaatatccaggaactttacttgttactgaagccacattaatttctaatcgggctggtggttatgatggatgtccgaaaatttccactcaagaagaaactaaagcttggaaaaaaattgttgatgctgttcattcaaagggatcatttttatcttgtcaattttggtttttaggtagagttggatatccaagtttattaaaacatcgtaaattggattatttggcaccatcaccaatttatgaaaatgaaaaacatcaaaaacaggcagaaaaagccggattaccattacgtgaagttactgaacaagaaattcatgatattatttataatgattatactattgctgctaaaaatgctattgctgcgggatttgatttcattgaattacatggagctcatggttattttattgatcaattcttacatgaatgttctaatcaaagaaccgataaatatggtggtagtattgaaaatagatgtagatttgtgttggaattgattgatcatttgatcacaattgttggtgctcatagattagcaattagattatcaccatgggctgaagttcaagggattgttgaaaaagaaagtcccatccccacattttcttatttgattaatgaattacaaaaacgtgctgaccaaggaaatcaattggcttatttatctgttgttgaaccaagagttcaaggcaccatcacggctgatattaaaaccatgaaaggtgataatgaatttgtggctgaaatttggaaaggtgtattacttagagctggtaattatacttatgatgctccagaatttaaaggaattgttgctgatacttctaataatagaactttggttggattttcaagatttttcatttctaatcctgatttggttctgaaattgaaaaataatccaagttcattagtgaaatatgatcgaaaattgttttatgaacaatttaattggggttataatacttatggacaagatcaacctgttgatgaagaaaaagaaagaaaaaaatttcctaaagtcattggcaatatcgatgaagctagattgtag

SEQ ID NO: 29661 - protein, 413 aa, Candida albicans SC5314
MSNSNPLKDSLVFQPIKVGDNTLSNRIVYCPTTRFRAAKGNEEPTYRHVPSDLMLKYYSDRAQYPGTLLVTEATLISNRAGGYDGCPKISTQEETKAWKKIVDAVHSKGSFLSCQFWFLGRVGYPSLLKHRKLDYLAPSPIYENEKHQKQAEKAGLPLREVTEQEIHDIIYNDYTIAAKNAIAAGFDFIELHGAHGYFIDQFLHECSNQRTDKYGGSIENRCRFVLELIDHLITIVGAHRLAIRLSPWAEVQGIVEKESPIPTFSYLINELQKRADQGNQLAYLSVVEPRVQGTITADIKTMKGDNEFVAEIWKGVLLRAGNYTYDAPEFKGIVADTSNNRTLVGFSRFFISNPDLVSKLKNNPSSLVKYDRKLFYEQFNWGYNTYGQDQPVDEEKERKKFPKVIGNIDEARL

SEQ ID NO: 29662 - DNA, 1212 bp, Candida albicans SC5314
  CDS (1)..(1212): transl_table=12
atgacaatcgataacgaaggcattgtcattaaaccattgggttcaacaaaattattccaaccaataaaacttggttttaacactttatcacaaagaatagcatttgcaccatccacacgttatagagcaaccaaagataatatccctaccgatttacaattagagtattattctcaacgatcagaatatcctggaactttaatcattactgaagcaacttatacatcacgtcaaggtggattagtaccatatgttcctgggatttataatgatgctcaaactaaaagttggaagaaaattaatgatgcgattcatgccaatggaagtttcagttcagttcaattgtggtatttaggtagagttgctaatcctaaaaatttgaaagatgctggattaccatttgttggagcctcatcagtttattggaatgaagaaagtgaaaaattggccaaagaagctggaaatgaattgagggaattgacagaagaagagatcgatcacattgttgaagttgaatatccgaatgctgctaaacgtgccattgaagcaggatttgattatatcgaagtgcattcagctcatggttacttgttagatcaatttttaaatcttgcctctaataaaagaactgataaatatggttgtggtagtattgaaaatcgtgctcgtttattattaagaattattgataaattgattgatatagttggagctgaaagattagctatccgtttatcaccatgggccacgttccaaaatgttgacgtcgaaggagaagaaattcatagttatatcattgatcaattacaagaaagggcaaattctggtaatgaattagcgtatatttctcttgttgaaccacgtgttcaagcaagttgggatattgctaaagagaatcaagttggctcaaatgaatttattttgaaacattggaaggggaaagtaattagagcaggtacttatgctcatgaattaaataaaattaatgaagatattaataatgatagaactttaattgccttttcaagatttttcatttctaatcctgatttagtgaaaaaattacatgatgggatttctttgactccttatgaaagagcaacattttataatcatgataattttggatataatacttggattaaatatggagaaaataaagttttcaatgaacaagaagaaaggaaaaaattgggtaaacctttagcttag

SEQ ID NO: 29663 - protein, 403 aa, Candida albicans SC5314
MTIDNEGIVIKPLGSTKLFQPIKLGFNTLSQRIAFAPSTRYRATKDNIPTDLQLEYYSQRSEYPGTLIITEATYTSRQGGLVPYVPGIYNDAQTKSWKKINDAIHANGSFSSVQLWYLGRVANPKNLKDAGLPFVGASSVYWNEESEKLAKEAGNELRELTEEEIDHIVEVEYPNAAKRAIEAGFDYIEVHSAHGYLLDQFLNLASNKRTDKYGCGSIENRARLLLRIIDKLIDIVGAERLAIRLSPWATFQNVDVEGEEIHSYIIDQLQERANSGNELAYISLVEPRVQASWDIAKENQVGSNEFILKHWKGKVIRAGTYAHELNKINEDINNDRTLIAFSRFFISNPDLVKKLHDGISLTPYERATFYNHDNFGYNTWIKYGENKVFNEQEERKKLGKPLA

SEQ ID NO: 29664 - DNA, 1221 bp, Candida albicans SC5314
  CDS (1)..(1221): transl_table=12
atgactgtcgaatcaactaactcatttgttgtcccggccggtactaaacaaattgaaattgcccccttaggatcaacgaaattattccaaccaattaaagttggtaaaaatattttaccccatcgtgttgctcatgccccaaccaccagattcagagctgccaaaaatcatactccaagtgatttacaattagaatattataaaactcattctcaatatccaggtactttgatcatcactgaggcaactttcacttctgaacaaggtggtatggatttacatgttcctggaatttataatgatgctcaaaccaaagcttggaagaaaatcaatgatgaaattcatgctaatggaagtttcagttcaatgcaattatggtatttaggtagagttgcaaaccccaaagatttgaaagatgctggattaccccttattggtccatcagcagtttattgggatgaagaaagtgagaaattggccaaatctgttggtaatgaattgagggaattgacagaaaaggaaatcgatcatattgttgaagttgaatatccgaatgctgctaaacgtgccattgaagcaggatttgattatattgaagttcatagtgccccgggttatttcttagatcaatttttgaacccagcttccaataagagaaccgataaatatggtggtagtattgaaaatcgtgcacgtttattattaagaattattgataaattgattggtatagttggtgctgaaaaattggctgttcgtttagcaccatggtcatcatttttaggtatggaaattgaaggtgaagaaatccattcatatattttacaacaattacaacaacgtgctgataatggtcaacaattagcttatgtttcacttattgaacctcgtgttattgggatttttgatgcttcgttagaagatcaaaaaggtcgtagtaatgaatttgcttataaatattggaaaggaaattttgttcgtgctggtaattatacttatgatgccccagaatttaaaactttacttcatgatttagataatgatcgtactattgtggggtttgcaagatttttcacttccaatcctgatttagtggaaaaattgaaattgggtaaaccattgaatcattatgatcgtgaagaattttataagtactacaactatggttataattcttatgatgaatctgaaaaacaagtcattggtaaaccattggtctag

SEQ ID NO: 29665 - protein, 406 aa, Candida albicans SC5314
MTVESTNSFVVPAGTKQIEIAPLGSTKLFQPIKVGKNILPHRVAHAPTTRFRAAKNHTPSDLQLEYYKTHSQYPGTLIITEATFTSEQGGMDLHVPGIYNDAQTKAWKKINDEIHANGSFSSMQLWYLGRVANPKDLKDAGLPLIGPSAVYWDEESEKLAKSVGNELRELTEKEIDHIVEVEYPNAAKRAIEAGFDYIEVHSAPGYFLDQFLNPASNKRTDKYGGSIENRARLLLRIIDKLIGIVGAEKLAVRLAPWSSFLGMEIEGEEIHSYILQQLQQRADNGQQLAYVSLIEPRVIGIFDASLEDQKGRSNEFAYKYWKGNFVRAGNYTYDAPEFKTLLHDLDNDRTIVGFARFFTSNPDLVEKLKLGKPLNHYDREEFYKYYNYGYNSYDESEKQVIGKPLV

SEQ ID NO: 29666 - DNA, 1179 bp, Candida albicans SC5314
  CDS (1)..(1179): transl_table=12
atgacaatttccaattccaatttatttaaaccaatcaacattggtaaaaaaactatcagtcatagaattgcccatttaccaaccactagaaaccgtgctactaaagaccatgtccctactgatttaatgcaaaaatattatactgatcgtgctaaaacaggtggattattagttactgaagctactttaatctctttgaatcaaggaatttatccaaatgttccaggtatttggaataatcaacaacgagatgcttggaagaaaatcactgattcggtccattctgttggtggattcatttctgttcaattatgggctttaggtagagttggtaatgctaaattattgaaaaatcatggattaccattaactggtgttagtccaatttatgaacatgaacaagctgaaaaagatgctgttaaagctgaaaatccaattcaagaattgactcaagatgaaattaaagatattatttataatcaatttgctaatgctgctaaattagccgatgaagccgggtttgattttattgaattacacggagctaacggttatttgtttgaacaattcattcatcctggaaccaataagagaactgataaatacgggggatcaattgaaaatagagccagatttttatttgaagtcgttgatcatttatcaactattgttgatccttctaaattggcaattagattatcacctttaaataatttccaagttcctggcataaacccaactgcaaaggaagattattcatacattattgctggattacaaaaaagagccgatgaaggtaaaggtttcggatatattaatgttgttgaaggtcgtttttcacctgatggaagcactgaagcttgcgatgtcaattttgttggtgatatctggaaaggtgctttgttaaaaggaggtaattatacttatgataagaaaaacagttgggaaacaatcgaacgtgatgctaatgctgataacagaactttagttggttttggtagatactttattgctaatccagatttgccaaccagaattgaaaaagatttaccattgaatgattatgataggtccactttttatgccaatgatgattatggttataatacttatccattctacggtcaagaaatcaaggctgacccagaacacaaagtattcggtgttgctttagcttga

SEQ ID NO: 29667 - protein, 392 aa, Candida albicans SC5314
MTISNSNLFKPINIGKKTISHRIAHLPTTRNRATKDHVPTDLMQKYYTDRAKTGGLLVTEATLISLNQGIYPNVPGIWNNQQRDAWKKITDSVHSVGGFISVQLWALGRVGNAKLLKNHGLPLTGVSPIYEHEQAEKDAVKAENPIQELTQDEIKDIIYNQFANAAKLADEAGFDFIELHGANGYLFEQFIHPGTNKRTDKYGGSIENRARFLFEVVDHLSTIVDPSKLAIRLSPLNNFQVPGINPTAKEDYSYIIAGLQKRADEGKGFGYINVVEGRFSPDGSTEACDVNFVGDIWKGALLKGGNYTYDKKNSWETIERDANADNRTLVGFGRYFIANPDLPTRIEKDLPLNDYDRSTFYANDDYGYNTYPFYGQEIKADPEHKVFGVALA

SEQ ID NO: 29668 - DNA, 1299 bp, Candida albicans SC5314
  CDS (1)..(1299): transl_table=12
atgacggttactattcctttgactgaaaccaatcttttcaaaccaatctctattggagatgttaagctaaaccatagaattgttcatgcacccacgtcaaggaaaagatctactaaggacaactatcctactgattttatgattgactactacaaatcaagatctcagtatcctggttcttttatcatatttgagtcctgtttggtgtcagagagaagcggtcttgtacctcataaaatagggttatgggatgaaaaacattgtcttgccttgaaacaaattgttgatcaagtgcataataacaattgtgttatcagttgccaaatcatggctaacggaaggacttcaaatgccaaactcatgcaaagtaagaatttacctattttagctccatcaattacttatcctaatgaagctgctgagaaattagctactgaattgaatttcccaatcaagccgttaacagttgacgaaattcataatatccaggacgattttgttaatgctgctgttaattcattaaaaattgccgattttgattttgttgaattacatgccacatctgggtttttgattgagcaatttttgtcaccactttcaaacaaaagaaccgatgaatatggtggtgatttggtcaatagatgtagatttttgattgaaattattgacaagttcattaatcatccagatattgggcctaagaagtttggtgttagaatcagtccatggtattcccataatggaatggtgtatccggaagaagtaaatttagaggatggtattccgtatcaattttgtcagtatattttgaagcaattagaggttagaaaatctcaaggaaatgaaatcgcctatgtttcaattgtcgagccaagagtatctggaaattctgatgttgatagttttggtgataaatcgaacgacgagataatcaaaagttggagtggtaaacttattcgtgctggtggttatgctactaattttaatgttgaaaatcctactttaattaaaaccaataaacaggttactaatgaaggtggtgaaattgttcattatgctaatttaattaatgatgtcaacaatgatgatagaacattaattggattttcaagaccatttacaagcaatcctgatttggtatatcgattggaaaacaatttgaaattagaatactacgacaggccaaccttttatactcaaacaggtgaaggttatttgactttcaagaattatgatgggtctgcggtgactaagttgccagagaaagagcttatgcgagagggaatcctgttgcaataa

SEQ ID NO: 29669 - protein, 432 aa, Candida albicans SC5314
MTVTIPLTETNLFKPISIGDVKLNHRIVHAPTSRKRSTKDNYPTDFMIDYYKSRSQYPGSFIIFESCLVSERSGLVPHKIGLWDEKHCLALKQIVDQVHNNNCVISCQIMANGRTSNAKLMQSKNLPILAPSITYPNEAAEKLATELNFPIKPLTVDEIHNIQDDFVNAAVNSLKIADFDFVELHATSGFLIEQFLSPLSNKRTDEYGGDLVNRCRFLIEIIDKFINHPDIGPKKFGVRISPWYSHNGMVYPEEVNLEDGIPYQFCQYILKQLEVRKSQGNEIAYVSIVEPRVSGNSDVDSFGDKSNDEIIKSWSGKLIRAGGYATNFNVENPTLIKTNKQVTNEGGEIVHYANLINDVNNDDRTLIGFSRPFTSNPDLVYRLENNLKLEYYDRPTFYTQTGEGYLTFKNYDGSAVTKLPEKELMREGISLQ

SEQ ID NO: 29670 - DNA, 1284 bp, Cryptococcus neoformans var. neoformans B-3501A
  CDS (1)..(1284)
atgcccattgccgaggccaccgacatcctcttttcgcccattactcttggagcgatgaagctccaacatagagttgctttggcacccatgaccaggaacagagctgttccgtcaaatctgaaccccggcacgtatgtcccttgccctcttatggcagagtattacacccaaaggacaacggaaggaggtctggtcatcagtgaagcattgccaatctctctacaggctgctgatgcacgtgcggttcctggaattttcactgaagaacagattgaggcctggaaaccgattgtagatgctgttcaccaagctggagggattttcgtggcccagctttggcaccaaggacgtacaagaatggtcgaaaatgaatacgcaatcatatcatcttcagctgtccctatagtcaagtcctttactggcttaccggggcttaagcctaggcctatgacgcttgaagatattgaacgcgtcaagaaggagtatgctcaagcggcagtgaactgtatcaaggcaggcttcgatggagttgaaatacacggtgccaatggctatctgccagagcaattccttcactctaacatcaatcggcgcgatgacaagtacggaggttctcctgaaaaccgcaatcgcttcgtccttgaaatatgtcaagcagtcactcgagttataggacctgatcgtttcggtcttcggctttccccgtacggatttttcaatgaagcgcgaggagataatagagttgaacaatggacgatgttatgtcgggatatcaaaggccttggatgggcatatgtccatttcatggagcctcgatatgatgagataaggtcaggtgccgacaagcttgctgaattgggagaaaataatgaagacgtaactttggatccttttgtgaacgctcttgaaaattgtatacccgtcattgtggccggtggatacgatgctgacaatgtcaggaagtcaagagttttggaggataagaaagcggatgttgtggctttcgggcgctacttcacttctaatccagacctcgtctatcgcctaaaacacgataagcctttcgtccaatacataagaccacggttctacgggccattcccagatccggaagttggctacacggatttccctttttgtcacgaactctccggcaccccagagagaaaagcactgttatcaagtgggaccgcaaaggttctgaaggtggcagagcctggttggcagctatcaaaatcaggaatacaattgggaggtttgtttgccgcggttactcaggattag

SEQ ID NO: 29671 - protein, 427 aa, Cryptococcus neoformans var. neoformans B-3501A
MPIAEATDILFSPITLGAMKLQHRVALAPMTRNRAVPSNLNPGTYVPCPLMAEYYTQRTTEGGLVISEALPISLQAADARAVPGIFTEEQIEAWKPIVDAVHQAGGIFVAQLWHQGRTRMVENEYAIISSSAVPIVKSFTGLPGLKPRPMTLEDIERVKKEYAQAAVNCIKAGFDGVEIHGANGYLPEQFLHSNINRRDDKYGGSPENRNRFVLEICQAVTRVIGPDRFGLRLSPYGFFNEARGDNRVEQWTMLCRDIKGLGWAYVHFMEPRYDEIRSGADKLAELGENNEDVTLDPFVNALENCIPVIVAGGYDADNVRKSRVLEDKKADVVAFGRYFTSNPDLVYRLKHDKPFVQYIRPRFYGPFPDPEVGYTDFPFCHELSGTPERKALLSSGTAKVLKVAEPGWQLSKSGIQLGGLFAAVTQD

SEQ ID NO: 29672 - DNA, 1182 bp, Cryptococcus neoformans var. neoformans B-3501A
  CDS (1)..(1182)
atgacagtcattcaatcccccaagctcttcacccccatccaggtcggcgaatatgaacttaagcaccgaattgtcatggcgcctctcactcgattgagggctgagaccaagacagcgatcccttccgaatgggctgaaacctattatagtcaacgagcttctgatggcggcttgatcgtctctgaaggtactttcattgctgaggagttgaggggttacgagaacgttcctggcatttacaccccagagcagatcgctgtctggaagaagatcacctctggtgtgcactctaagggcggtaggatcttctgtcaactttgggtccttggccgtgtcgccgaccccaacgttatccctgtcatctactctgttggcactatccgtgatgacagcccctcttacatcgctgctcccgaaccggaaggccagcggaagcccttaactcctgttaccgaggccgacatggaccgattcattggtcattacatccaagcttccaagaacgctattgaggccggctttgacggcgttgagatccacggtgcgaatggttacttcatcgatcagttccttcaaaccaactccaacgaccgtatcgaccaatacggtggctccctcgagaaccgaatgcgattcccccttcgtgttcttaacgccgtctgcgacgccattggtcccaagcgcgtcggtatccgaatgtctcccttctccgaattccaaagcatgcgtatggaggaccctctcgccacttttgtcccctgggctcaggcaatcgttgaggctcagcctgagcttgccttcattcacgcggtcgagggtaggggtattttgacccccgagaacgagtggtacatccaggacaatctgaaccccatcagggaagtcattctcaacaagggaaagagtgtcaggtttatccctgctggcggatacatgcccgatactgcttttgagcatgccgagaaatatcctgaagatcttatcgctttcggacgatacttcatctccaaccccgatttgcctaaccgcgtacgaaacggctggcctcttcacaagtatgaccgtaccaccttttactctcagtcgtctgtaggctacaatgactacaaggactacaagccggagactgaggctcttgctcaggatgaggccgcccccaaagagggcaccactaaggcttaa

SEQ ID NO: 29673 - protein, 393 aa, Cryptococcus neoformans var. neoformans B-3501A
MTVIQSPKLFTPIQVGEYELKHRIVMAPLTRLRAETKTAIPSEWAETYYSQRASDGGLIVSEGTFIAEELRGYENVPGIYTPEQIAVWKKITSGVHSKGGRIFCQLWVLGRVADPNVIPVIYSVGTIRDDSPSYIAAPEPEGQRKPLTPVTEADMDRFIGHYIQASKNAIEAGFDGVEIHGANGYFIDQFLQTNSNDRIDQYGGSLENRMRFPLRVLNAVCDAIGPKRVGIRMSPFSEFQSMRMEDPLATFVPWAQAIVEAQPELAFIHAVEGRGILTPENEWYIQDNLNPIREVILNKGKSVRFIPAGGYMPDTAFEHAEKYPEDLIAFGRYFISNPDLPNRVRNGWPLHKYDRTTFYSQSSVGYNDYKDYKPETEALAQDEAAPKEGTTKA

SEQ ID NO: 29674 - DNA, 1152 bp, Cryptococcus neoformans var. neoformans B-3501A
  CDS (1)..(1152)
atgcctgttgtcagattccctactcttgcagagcccgtctccctcggggctcttcagctcaatacacgagtgattatggcttctctcactcgcaatcgctctatccccacaacggttcccaacgaggacaacgtaaagtactatgctcagcgcgctgggcctggtcgctcaggccttatcctctctgaaggtacactcattgcccatcaaggtaccgaatgggagaatgctcctggtatctgggatgaggagcacgcaaacggttggaaaaaagtcaccgacgccgtacacgacaagggcgggttgattgttgctcagctatggcatactggacgtgtttgtcatccagacatgattgaacaaaagaggagtggagacccagtgtgggcaccaagtgatgtgggtgcaagaggtgggaagttccgcacacttcctggcaagccgggatacatttccgatcccacccctatccctgacccaacatacatcctcgaccagtactctaaagctgcagagatggccaagctcgctggattcgatggcgtcgaacttcattccgctaatggctatttgattgaacagttcttgtcggatgttagcaatacaaggacagataaatggggcggtagcgtggagaacaggatcagatttggtttggaagctgccaaaagactaatcgacgtttggggggctgaccgagtcggcgtcaaaatctccccttgtggtggatataacgacacttataacactaccggtgactctcgtctcgagacttttaaaacttacatttcacgccttgactctctcggtctcgcgtatattcagctcatggttgctgtccttggcgacgaccatcatggaggcaagccccagggatttcctcatgatattattggcacttatggcccgttaatcaagaagagcaagctagttgtgaatgggaactacacgccggaaagcggtgaagaggtagtgaagagtggcaaggcggcagctgtcgtctacgggaggaactatgttgcgaatcctgattttgtcaagcgcatccaacaagggttgcctcttgccgaaatcaatatgaagggtctttacacaccagctgttgaagggcaaaatggttccggctacaacgattacccggatgccgagtag

SEQ ID NO: 29675 - protein, 383 aa, Cryptococcus neoformans var. neoformans B-3501A
MPVVRFPTLAEPVSLGALQLNTRVIMASLTRNRSIPTTVPNEDNVKYYAQRAGPGRSGLILSEGTLIAHQGTEWENAPGIWDEEHANGWKKVTDAVHDKGGLIVAQLWHTGRVCHPDMIEQKRSGDPVWAPSDVGARGGKFRTLPGKPGYISDPTPIPDPTYILDQYSKAAEMAKLAGFDGVELHSANGYLIEQFLSDVSNTRTDKWGGSVENRIRFGLEAAKRLIDVWGADRVGVKISPCGGYNDTYNTTGDSRLETFKTYISRLDSLGLAYIQLMVAVLGDDHHGGKPQGFPHDIIGTYGPLIKKSKLVVNGNYTPESGEEVVKSGKAAAVVYGRNYVANPDFVKRIQQGLPLAEINMKGLYTPAVEGQNGSGYNDYPDAE

SEQ ID NO: 29676 - DNA, 1107 bp, Mycobacterium sp. JLS
  CDS (1)..(1107): transl_table=11
gtggctttcacattcgatgacgacgcgaccctgctgaccccgctgcaggtgggcgaggcgttcgcgcccaaccgcgtcttcatggcgccgctgaccagatcccgcgcgcaggccgacggcacgccgtcctacctcgccgcgcagtactacgcgcaacgggcgtcggccggcatcgtcatcaccgaggccaccgcggtgtcgcagagcgccaacggcgcctatctgaacacccccggcatctacaccgaccgccaccaggagaagtgggcgcggatcgcgtcggccgtgcacgccgagggtggccgcatcttcatgcagttgtggcacgtcggccggatgggtcaccccgacatcagcggcgtgcatcccgtcgcgccgtcggcggtggccgcggacctgaccgcgcacacgcccggcggaaagaagccgctggtggtgccgcgggcgctcgaggtcgaggacatcccgcggatcgtcgcggacttccggaccgccgcacgccgagccgtcgacgccgggatggacggcgtggagatccacggggccaacggctacctgctgcaccagttcgcctccgacgtggtcaaccgccgcaccgacgcgtacggcggatcggccgacaaccgggcgcggctgaccgccgaagtggtcgaggccgtggccgacgagatcggcgccggccgcgtcgggctgcgcatctcacccgggaacggcgccggtgacgtgcgggaggacgagccgatcgcggtctacgaggcattgctcgaccgcatcgcgccgctgggcatcgcctacctgcatgtgctgatcgacccgacgcacacgacgttcggggtgatccgggcgctgtggccgggagtgctcgtgctcaacaccggccgcgagaccgacaccgacttctgccagttggagagcttcgcgcagtggggtgcggtcagcgcggtcgccgtcgggcgggcgttcctggcgaatccggatctgatcgagcgcctcgtcgtcggcgccgaactgaacgaacccgacgtcgcgaccttctattcgcccgggccggtcggctatatcgactacccgacgctggccgagttggagacccgagagtccgcctga

SEQ ID NO: 29677 - protein, 368 aa, Mycobacterium sp. JLS
MAFTFDDDATLLTPLQVGEAFAPNRVFMAPLTRSRAQADGTPSYLAAQYYAQRASAGIVITEATAVSQSANGAYLNTPGIYTDRHQEKWARIASAVHAEGGRIFMQLWHVGRMGHPDISGVHPVAPSAVAADLTAHTPGGKKPLVVPRALEVEDIPRIVADFRTAARRAVDAGMDGVEIHGANGYLLHQFASDVVNRRTDAYGGSADNRARLTAEVVEAVADEIGAGRVGLRISPGNGAGDVREDEPIAVYEALLDRIAPLGIAYLHVLIDPTHTTFGVIRALWPGVLVLNTGRETDTDFCQLESFAQWGAVSAVAVGRAFLANPDLIERLVVGAELNEPDVATFYSPGPVGYIDYPTLAELETRESA

SEQ ID NO: 29678 - DNA, 1059 bp, Herminiimonas arsenicoxydans
  CDS (1)..(1059): transl_table=11
atgacgaatcatttatttaccccgattaaggttggcgacatcactcttcctaaccgcgtgatcatggcccctctgacgcgttcgcgtgcagttggcggtggtcgtgtgccgaatgatctgatggtcgaatactatgtgcagcgcgcatctgcaggcttgatcctgagtgaagcgactgcagtcacaccgcagggtgtcggttatgccgatacgccgggcatctggtcggatgagcaggtcgcaggctggaagaaggtgacggatgcagtgcataaggccggtggtcttatctcgctgcagttgtggcatgtcggtcgcatctcgcacccgatgtttctgaatggcgaattaccggttgcgcctagcgcgattcagcctgaagggcatgtcagcattgtgcgtccgcaagtgggatacgtgacgccgcgtgcattggaactggatgaaattccaggcatcgtcgccgcttatcgcaagggcgcggaaaatgccaagctggccggtttcgacggtgttgaagtacatggcgcgaatggctacctgctggatcaattcctgcaaagcagcaccaatcagcgtactgacatctatggcggctcaatcgaaaatcgtgcgcgtctgatgctggaagtggttgatgtctgtatcgaagtatggggcgctggacgcgtcggtttgcatctggcaccgcgcggtgattcgcacgatttgagtgatgcaacgccggcggaaactttcggctacgttgctgccgaaatgggcaaacgcggtatcgccttcatttgcgcgcgtgaatcgctgggtgagaatcgccttggtccgcaattgaaaaaggctttcggcggtgtgtatatcgccaatgaacaaatgactaaagagacggcagcaaatgtgattgcgactggtgaagcggatgcggttgcattcggcaaactgttcatcgcgaatccggatttgccgcgtcgtttgaaggataacgcaccgcttaatccggcacgtccggaaaccttctacagcccgactgcagaaggctataccgattatccggcgctggcctga

SEQ ID NO: 29679 - protein, 352 aa, Herminiimonas arsenicoxydans
MTNHLFTPIKVGDITLPNRVIMAPLTRSRAVGGGRVPNDLMVEYYVQRASAGLILSEATAVTPQGVGYADTPGIWSDEQVAGWKKVTDAVHKAGGLISLQLWHVGRISHPMFLNGELPVAPSAIQPEGHVSIVRPQVGYVTPRALELDEIPGIVAAYRKGAENAKLAGFDGVEVHGANGYLLDQFLQSSTNQRTDIYGGSIENRARLMLEVVDVCIEVWGAGRVGLHLAPRGDSHDLSDATPAETFGYVAAEMGKRGIAFICARESLGENRLGPQLKKAFGGVYIANEQMTKETAANVIATGEADAVAFGKLFIANPDLPRRLKDNAPLNPARPETFYSPTAEGYTDYPALA

SEQ ID NO: 29680 - DNA, 1116 bp, Burkholderia vietnamiensis G4
  CDS (1)..(1116): transl_table=11
atgaaccacgacccgctgttccaaccgctgcaattcggcgcgctgacgctgccgaaccgtatcgtgatgccgccgatgacgcgctcgcgcgcgacccagcccggcgacgaagcgaacgaactgatggccgagtattacgcgcaacgcgcgagcgccggcctgatcgtcagcgaaggcacctacatcgcgccgctcggcaagggctacgcgtggacgcccggcattcatacgcgctcgcaggtcgccggctggcgcaaggtgaccgacgccgtgcacgcggcgcaaggccgcatcttcgcgcagctgtggcacgtcggccgcctgagccacacgagcctgcacggcggcgcgcagccggtgtcgtcgtcgccgatccaggcgaaaggcgtgaacgtgttcatcgccggcgacgacggcagcacgccgggcttcgtgcaggcgtccgagccgcgcgcgctgacggtcgccgagatcggcgagatcgtcgcgcaataccgcgccgccgcgcgcaacgcgatggaagccggcttcgacggcgtcgagctgcacggcgcgaacggctatctcgtgaaccagttcatcgactcgaacgcgaacacgcgcaccgacgcatacggcggctcgctggagaaccgtctgcgcttcctgcgcgaggtcgcgcaggcgctgatcgaaggcaccggcgacgcgtcgcgcgtcggcatccgcctcgcgccgctgaccacgctgaacggttgcgtcgacgacgatcccgaaacgacctacctcgcggccgcgacgctgctcggcgaactgggcgtcggctatctgcacatcgccgaagccgactgggacgacgcgccgctgatgccgccggcattcaagcagaagctgcgcgcagcgttcggcggcgtgctgatctatgcgggcaagtacaccgccgagcgcgcacgcgaagcgatcgccgccggctgggccgacctcatcgccttcggccgcccgttcgtcgcgaaccccgacctgcccgaacgcctgcgcagcggcgccgcgctcgcgccgcacgatcgcaacacgctgttcggcggcggcgccaagggcctcaccgactacccggcgctcgcgcaggcttgcgcgtga

SEQ ID NO: 29681 - protein, 371 aa, Burkholderia vietnamiensis G4
MNHDPLFQPLQFGALTLPNRIVMPPMTRSRATQPGDEANELMAEYYAQRASAGLIVSEGTYIAPLGKGYAWTPGIHTRSQVAGWRKVTDAVHAAQGRIFAQLWHVGRLSHTSLHGGAQPVSSSPIQAKGVNVFIAGDDGSTPGFVQASEPRALTVAEIGEIVAQYRAAARNAMEAGFDGVELHGANGYLVNQFIDSNANTRTDAYGGSLENRLRFLREVAQALIEGTGDASRVGIRLAPLTTLNGCVDDDPETTYLAAATLLGELGVGYLHIAEADWDDAPLMPPAFKQKLRAAFGGVLIYAGKYTAERAREAIAAGWADLIAFGRPFVANPDLPERLRSGAALAPHDRNTLFGGGAKGLTDYPALAQACA

SEQ ID NO: 29682 - DNA, 1062 bp, Burkholderia vietnamiensis G4
  CDS (1)..(1062): transl_table=11
atgcctaccctgttcgaccccgttaccctcggcgagctgacgctgccgaatcgcatcgtcatggcgccgctcacgcgcgcccgcgccggcacgacccgcgtgccgaacgagctgatggcgcgctactacgccgaacgcgcgtcggccggcctgatcatcagcgaggcgacgtcggtcacgccgcaaggcgtcggctacgcggatacgccgggcatctggtccgacgaacaggtcgaaggctggaagcgcgtgacgcaggccgtgcacgcggccggcggccgcatcgtgctgcagctgtggcacgtcggccggatctccgacccgatgttcctggacggcgacctgccggtcgcgccgagcgcgatcgcggcaggcggccatgtgagcctggtgcggccggagcgcccgttcgtgacgccgcgcgcgctggagctcgacgaaattccgggcatcgtcgccgcctaccgcaagggcgccgaaaacgcgaaaaaggccggtttcgacggcgtcgagattcacggcgcgaacggctacctgctcgaccagttcctgcaggacagcaccaaccgtcgcaccgatgcgtacggcggcccgatcgagaaccgcgcgcgcctgctgctcgaagtggtcgacgcggcgatcgacgtgtggggcgcgggccgcgtcggtgtccatctcgcgccgcgcggcgacgcgcacacgatgggcgactcggatccggccgcaacgttcggctacgtcgcgcgcgaactcggccgccgcaagatcgcgttcatcttcacgcgcgagtcgtatacgggcgaccagttgagcccgcgcctgaaggaagcgttcggcggcccgctgatcgcgaacgagcaattcacgcccgactcggcgcggcaagcgctcgccgacggcagcgccgacgcgatcgcgtggggcaagctgttcatcgcgaacccggacctgccgcgccgtctcgaactcggcgcaccgctgaacaagccggtgccggagacgttctacgcgcaaggcgagacgggctacaccgactatccggcgctagacgacgcagcctga

SEQ ID NO: 29683 - protein, 353 aa, Burkholderia vietnamiensis G4
MPTLFDPVTLGELTLPNRIVMAPLTRARAGTTRVPNELMARYYAERASAGLIISEATSVTPQGVGYADTPGIWSDEQVEGWKRVTQAVHAAGGRIVLQLWHVGRISDPMFLDGDLPVAPSAIAAGGHVSLVRPERPFVTPRALELDEIPGIVAAYRKGAENAKKAGFDGVEIHGANGYLLDQFLQDSTNRRTDAYGGPIENRARLLLEVVDAAIDVWGAGRVGVHLAPRGDAHTMGDSDPAATFGYVARELGRRKIAFIFTRESYTGDQLSPRLKEAFGGPLIANEQFTPDSARQALADGSADAIAWGKLFIANPDLPRRLELGAPLNKPVPETFYAQGETGYTDYPALDDAA

SEQ ID NO: 29684 - DNA, 1098 bp, Bradyrhizobium sp. ORS278
  CDS (1)..(1098): transl_table=11
atgagcacatcgaaactgttcgagcccaccaagctcggtccgatcaccctggccaatcgcgtcgtgatggcaccgctgacgcgcaaccgcgccgtcgagggcctcgccccgggtccgctgacagccacctactacgcgcagcgcgccagcgccgggctcctgatctccgaggccagccaagtgtcgcagcagggccagggctatcaggacacgcccggcatctattccaaggcgcagatcgccggctggcgcaaggtcaccgacgcggtgcacgccaagggcggccgcatcttcatccagctctggcatgtcggccgcatctcgcatgtctcgttgcagcccgatggcggcgcgccggtggcgccctcggcgatcgccgccaagaccaagaccttcgtggggggcaccttcgccgatgtctcgacgccgcgcgcgctcgagctcgccgagatccccggcatcgtcgaggcgttcaagcaggccgcgctgaatgcgatcgaggccggcttcgacggcatcgagatccacggcgccaatggctatctgctcgaccagttcgccaaggacggcgccaacaagcgcaccgacgcctatggcggctcgatcgagaaccgcgcccggctgatgatcgaggtcgcgaaggccgtgtccggcgctattggcgccgacaggaccggcatccgcctgtcgccggtgacgccggccaacgacgtcagcgattccaatccgcaggcgctgttcgactatatcgtcgatcagctcaacgcgctgaagctcgtctacatccacgtcatcgagggcgccaccggcgggccgcgcgacgtcgcgccgttcgactatgcctcgctgcgcaagcgcttcagcgggacctacatcgccaacaacggctacgacctcgcgctcgccaccaagcagctcgacgccggcgccgccgacctgatcgcgttcggccgtccgttcatcgccaatcccgatctggtcgagcggctcaaggccgacgccccgctcaacgagctcgaccgcgccacgctctatggcggcggcgagaagggctacacggactacccgacgcttgggtccgcgcaagctgcggagtga

SEQ ID NO: 29685 - protein, 365 aa, Bradyrhizobium sp. ORS278
MSTSKLFEPTKLGPITLANRVVMAPLTRNRAVEGLAPGPLTATYYAQRASAGLLISEASQVSQQGQGYQDTPGIYSKAQIAGWRKVTDAVHAKGGRIFIQLWHVGRISHVSLQPDGGAPVAPSAIAAKTKTFVGGTFADVSTPRALELAEIPGIVEAFKQAALNAIEAGFDGIEIHGANGYLLDQFAKDGANKRTDAYGGSIENRARLMIEVAKAVSGAIGADRTGIRLSPVTPANDVSDSNPQALFDYIVDQLNALKLVYIHVIEGATGGPRDVAPFDYASLRKRFSGTYIANNGYDLALATKQLDAGAADLIAFGRPFIANPDLVERLKADAPLNELDRATLYGGGEKGYTDYPTLGSAQAAE

SEQ ID NO: 29686 - DNA, 1125 bp, Bradyrhizobium sp. ORS278
  CDS (1)..(1125): transl_table=11
atgctgcctgcgctgttttcgccgctcacgatcggtccttaccatctcaagcatcgcgtcgtgatggcgccgctgacccgcatgcgcgccgccagggagacgctcgcgccgcgcaagctcaacgtggaatactatgcgcagcgcgcgacgccgggcggcctgatcatcgccgaggcctcgccggtgctgccgaccggcaccggcagtccgaacgtgccgggcatctatagcgaggggcaggtcgccggctggagacaggtggtcgacgccgtccacgccaagggcggactcatcttcctgcagctctggcatgtcggccgtgtgtcgcattcctcgttccagccgggcggcgcgccaccggtggcgccctcggcgatcgcgattcccgacgatctcaaggcgatgacggcggacggcaagggcgcagcctatgagacgccgcgcgcgctcgagaccgatgagattccggcgctcgtcgccgcctatggtcaggccgcgcgcaatgcgatggcggccggcttcgacggcgtcgaggtgcacggcgcgaacggctatctgatcgagcagttcctgcagacccgcagcaaccagcgcaccgaccgctatggcggctccatcgagaaccgatgccgcttcctgatcgaggtgacggaagccgtgatcgccgcctgcggcgccgacaaggtcggcgtgcggctgtcgccttacggcatcgccaacggctccggcgaggccgatccgatgccgctgtatacgcacgcgattgaggccctcaacaagctcggcatcgcttacctgcacctgatcgagccgcgctcctccggtgccggccgcgccgatgtcaactggcagaacgtgccgtcggcgatcgccctgttccggctggtctggaagggcgtgctgatcggcgccggcggcttcaccggcgagccggcggaggccgcgatccaggcggggcatgcggacgccatcgccttcggccgctacttcatcagcaatccggacctgcccgcccgcctgcagcacggctggccgctgacgccctacaaccgcccgaccttctacggcggcgaggagaagggctacacggactatccggtgtatgacgcgacggtgacggcatag

SEQ ID NO: 29687 - protein, 374 aa, Bradyrhizobium sp. ORS278
MLPALFSPLTIGPYHLKHRVVMAPLTRMRAARETLAPRKLNVEYYAQRATPGGLIIAEASPVLPTGTGSPNVPGIYSEGQVAGWRQVVDAVHAKGGLIFLQLWHVGRVSHSSFQPGGAPPVAPSAIAIPDDLKAMTADGKGAAYETPRALETDEIPALVAAYGQAARNAMAAGFDGVEVHGANGYLIEQFLQTRSNQRTDRYGGSIENRCRFLIEVTEAVIAACGADKVGVRLSPYGIANGSGEADPMPLYTHAIEALNKLGIAYLHLIEPRSSGAGRADVNWQNVPSAIALFRLVWKGVLIGAGGFTGEPAEAAIQAGHADAIAFGRYFISNPDLPARLQHGWPLTPYNRPTFYGGEEKGYTDYPVYDATVTA

SEQ ID NO: 29688 - DNA, 1050 bp, Thermus thermophilus HB27
  CDS (1)..(1050): transl_table=11
atgggactcctctttacccctctggagcttcgcggcctccggctcaagaatcgcctggccatgtcccccatgtgccagtactcggccacggaagggggagaggtcacggactggcacctcctccactaccctacccgggccctgggcggggtggggctcgtgatcgtggaggccacggcggtcctccccgaagggaggatcagcccctttgacctcgggatctggtccgaggaccacctcccgggccttagggagctcgcccggcgcatccgggaggcgggggcggtgccggggatccagctcgcccacgccgggcgcaaggcggggacggcgaggccctgggaagggggaaggcctttgggctggaaggtggtggggccgagccccctccccttcgccgagggctaccccgtccccgaggccctggacgaggcggggatggcgcgggtcctcgaggccttcgtggagggggccaagcgggccctcagggcggggtttttggtggtggagctccacatggcccacggctacctcctctcctccttcctctcgccccttgccaaccggcgggaggacgcctacgggggaagccgggagaaccgcatgcgcttccccctggaggtggcgagggcggtgcgggaggccatcccccctgagcttctcctcttcgtgcgggtctcggccacggactgggcggaaggggggtggggcctcgaggacaccctggccttcgccgaacggctcaaggccctgggggtggacctcctggacctctcctcgggcggggtggtgccgggggtgagggtccccgtggccccgggcttccaggtccccttcgccgacgcggtgcgcaagcgggtggggatgccgacgggggcggtgggcctcctcaccacccccgagcaggcggagaccgtcctccaggcgggaagtgccgacctggtgcttctgggccgggtcctcctccgggacccctacttccccctgaaggcggccaaggccctcggggcggaggcccccgtgcccccgcagtaccagagggccttttaa

SEQ ID NO: 29689 - protein, 349 aa, Thermus thermophilus HB27
MGLLFTPLELRGLRLKNRLAMSPMCQYSATEGGEVTDWHLLHYPTRALGGVGLVIVEATAVLPEGRISPFDLGIWSEDHLPGLRELARRIREAGAVPGIQLAHAGRKAGTARPWEGGRPLGWKVVGPSPLPFAEGYPVPEALDEAGMARVLEAFVEGAKRALRAGFLVVELHMAHGYLLSSFLSPLANRREDAYGGSRENRMRFPLEVARAVREAIPPELLLFVRVSATDWAEGGWGLEDTLAFAERLKALGVDLLDLSSGGVVPGVRVPVAPGFQVPFADAVRKRVGMPTGAVGLLTTPEQAETVLQAGSADLVLLGRVLLRDPYFPLKAAKALGAEAPVPPQYQRAF

SEQ ID NO: 29690 - DNA, 1074 bp, Acinetobacter sp. ADP1
  CDS (1)..(1074): transl_table=11
atgaatcaaatatttaaacctattcttatcggtcagtatcaattagcaaaccgactagctatggcaccaatgacacgatcacgtgctcagtttgatggcacacctagcgaattagcagctgagtattatactcagcgtgcaagtgtgggattaatcattgctgaaggtgcacagccctctgaagatggtcagggctatttagcaacgccgggtatttatacagattcacatattgcgggctggaaaaaaatcaccaatgcaatacatgctaaaggtggacgcattttcattcaattgatgcatgttggtcgtatgtcacatcctgataacaccccgcatcatcgtcaagctgttgctccttcatctattgctccaggtacagttacattcacacccactggaatgcaagaaattccgaaacctcgtgcattgacgattaaagaaattaaacagactatccaggattttagacatgctgctcgatctgcaattgaagcgggtgcggatggtgtggaaattcatggcgccaatgcttatctatttcagcaattttttgcaccaacggcaaatacccgtacagatgaatatggtggttctattgagaatcgcgctcgatttgctattgaagtagcaactgctattgcagaagaaattggtgctgataaaactgcgattcgtctttctccaggttctttgctttggggaattgatgaaggtcaagaaggcccagaattatatcattatcttgtaaaagagcttaataaacttggacttgtgtatctacacattatgcatcttggcaatgaaacattgttgcaagatatacgtcaactatggacacaggcattaatagttaaccggcccggacgtccgcgtgaacagattggaacagatgttgaatcaggtttagcagatttagagtcttatggcgaaatgattcttgcaaacccagattttgtaaatcgtctgcaacaaaatttaccaatgaatgaagcagataaaacgacatattacggtggtgatgcaaaaggttatgtcgattatccagctttaaatgcatctgataaaatttaa

SEQ ID NO: 29691 - protein, 357 aa, Acinetobacter sp. ADP1
MNQIFKPILIGQYQLANRLAMAPMTRSRAQFDGTPSELAAEYYTQRASVGLIIAEGAQPSEDGQGYLATPGIYTDSHIAGWKKITNAIHAKGGRIFIQLMHVGRMSHPDNTPHHRQAVAPSSIAPGTVTFTPTGMQEIPKPRALTIKEIKQTIQDFRHAARSAIEAGADGVEIHGANAYLFQQFFAPTANTRTDEYGGSIENRARFAIEVATAIAEEIGADKTAIRLSPGSLLWGIDEGQEGPELYHYLVKELNKLGLVYLHIMHLGNETLLQDIRQLWTQALIVNRPGRPREQIGTDVESGLADLESYGEMILANPDFVNRLQQNLPMNEADKTTYYGGDAKGYVDYPALNASDKI

SEQ ID NO: 29692 - DNA, 1071 bp, Acinetobacter sp. ADP1
  CDS (1)..(1071): transl_table=11
atggctgaattaagttctcctttgaaaataggcgcttttgaaattaaaaatcgtcttgtgatggcgccactaacacgttctcgtagtggtgaggatcggattccaaatgatttaatgttggaatattaccagcaaagagctggtgcaggtctgattttgactgaagcgactgtgatttcacctaaagcggttggttatgaagataccccaggcttatggtcggaagaacaggcaagcgcgtggcatccgattgttgatgccgtacatcaaaaaggtgccaaaatcgtggttcagctgtggcatgtagggcgcatttccgatcctcaacttttgggtggtgatatacctgttgcaccaagtgcgatccagccagagggacacgtcagcctactacgtccaaagcgtccttttgtaacgccacgtgctttatcgattgaagaaattcatgaaattgtggcgcaatatcagcatgctgcagagttggcaaaagtggcaggctttgatggtgtagagctacatgcagcaaatggttatttaattgatcagtttttacagtcgggtaccaatcagcgtagtgatgaatacggtggctcacttgaaaatcgagcacgattactattacaggtggtcgatgcatttattgacgtctggggtgcagggcgtgttggtgtacatatagcgcctcgcggtgactcacacgatatgagtgatgccaatccgctcgaaacctttggttatgtcatgcgtcagctcagtgaacgtcacattgcatttgtattctcgcgtgaatatgaagctgcggatagtattagcctacaactacgtcaaaaatttaatggcgtatggattgccaatgaaaatctgagcgctgaatctgccaaacgtattttggcacagggtgatgccgatgctgtctcatttgggaaggctgcaattgccaatcctgatttgtatgagcgtctgattcataatgcaccactcaatagcgtaaatcctgacacactttatgccaaaggtgcagaaggttataccgattatccaacttcacaagaaagtgctctcgaagcctaa

SEQ ID NO: 29693 - protein, 356 aa, Acinetobacter sp. ADP1
MAELSSPLKIGAFEIKNRLVMAPLTRSRSGEDRIPNDLMLEYYQQRAGAGLILTEATVISPKAVGYEDTPGLWSEEQASAWHPIVDAVHQKGAKIVVQLWHVGRISDPQLLGGDIPVAPSAIQPEGHVSLLRPKRPFVTPRALSIEEIHEIVAQYQHAAELAKVAGFDGVELHAANGYLIDQFLQSGTNQRSDEYGGSLENRARLLLQVVDAFIDVWGAGRVGVHIAPRGDSHDMSDANPLETFGYVMRQLSERHIAFVFSREYEAADSISLQLRQKFNGVWIANENLSAESAKRILAQGDADAVSFGKAAIANPDLYERLIHNAPLNSVNPDTLYAKGAEGYTDYPTSQESALEA

SEQ ID NO: 29694 - DNA, 1095 bp, Erwinia carotovora subsp. atroseptica SCRI1043
  CDS (1)..(1095): transl_table=11
atgagtcagcttttctcccccgtatctcttggtaaactcgaactgcccaaccgaatcatcattgccccaatgtgccaatattcggctgaggatggtaaggcgacagcctggcataccatgcatttaggtaacctgtcacattcaggagcaggactactcattatcgaggccacagcagtttcaccagaaggcaggatttccccgcacgatctcggcctgtgggatgacaccaccgaacaagcccttgccagcgtgattcagtctgtcaaaacctattctgccatgccccttggcatacaactgggacatgctggtcgcaaagcctcgacgggcgttccgtggagcgaacgggcatttctgcacccggaacagggaggatggcagactatcgcaccatcggcgattccttacaacgccagcgacgctgcgccactggcaatgtcagagcagcacatccgtgcgctagttgattcgttcgtcgactctgctaagcgtgcggacagtctgggctttgacctgatagaaattcatgctgctcacggctatttactgcaccagttcctttctccgctgacaaatcagcgcacagatagctacggcggatcgcttcaaaatcggatgcatctggtcgttgaaatttatcgcgcggtacgtgaagttttccctgcacataaagccgtcggcgtacgtatttctgcaacagatggtgttgagggaggttgggatctggagcaatcggtgcagctcagtaaagcgttgcacgaattaggctgcgatttcatccatgtttccagcggcgggctatcaccgttacaacagattcatcccgcacctaattatcaggtgccctatgctcagcggattaagcaagaagttggcatcaccaccatcgcagtggggctaataaccgaaccagaacaggcagaagcgatcgtcgcaaccggtgaggcagatgctatcgggttggcccgtgccatacttttcgacccacgctggccatggcatgccgccgcccgattgggcgctcaggtatctgcgcccgctcagtactggcgcagcgagccacgttacgccagaggtattttcaagcaatag

SEQ ID NO: 29695 - protein, 364 aa, Erwinia carotovora subsp. atroseptica SCRI1043
MSQLFSPVSLGKLELPNRIIIAPMCQYSAEDGKATAWHTMHLGNLSHSGAGLLIIEATAVSPEGRISPHDLGLWDDTTEQALASVIQSVKTYSAMPLGIQLGHAGRKASTGVPWSERAFLHPEQGGWQTIAPSAIPYNASDAAPLAMSEQHIRALVDSFVDSAKRADSLGFDLIEIHAAHGYLLHQFLSPLTNQRTDSYGGSLQNRMHLVVEIYRAVREVFPAHKAVGVRISATDGVEGGWDLEQSVQLSKALHELGCDFIHVSSGGLSPLQQIHPAPNYQVPYAQRIKQEVGITTIAVGLITEPEQAEAIVATGEADAIGLARAILFDPRWPWHAAARLGAQVSAPAQYWRSEPRYARGIFKQ

SEQ ID NO: 29696 - DNA, 1101 bp, Propionibacterium acnes KPA171202
  CDS (1)..(1101): transl_table=11
atgacgtcaccgctcctgttccaacccctcacccttcgtggattgacggttcgcaaccgcgcctggctgccgccgatgtgccaatatgccgtggattctcaagacggaattcccagcacctggcacctcatccactatggatctttcgctgtgggaggcttcggcctcatcgtcgcagaggccactgcggtcagccctgaaggccgcatcagcccttgtgacaccgggttgtggaatgacgcccaggtggcagcgtggcgcaccatcactgacgctgtccacgagcttggcggcacgattgctgtccagttgggccacgccggccggaaagcctccacagagaaatggtggccgggtttccatggcggggtgattcctcccgaaaagggcggctggattcctgtcggtccaactgccgcacccgccgatggcaagcagtacgccgggtcgcccgtcaccgcccttaacgaggacggcatctcgaagattattgacgacttccggactgcggcatcgcgtgccgtggtagccggattcgacgctgtcgagattcatagcgcccacggctacttgctacatcagttttattcgccgctgtccaacacccgcactgacggttggggaagcgattatgacggacgagtccgtctgccgttggcggtcgctgacgcggtgcgtggggctattcccgacgacatgcctctgctggcccgcctctcggtcactgactggcgtgacgatggctggtcagtcgaggactcgatcgagctgtcgcgtcgattcgccttggctggcgtcgaccttgtggatgcctcctcaggtggtaattcgtcagcccccatcccggtagccccgggataccaggccgatttagcggctcgggtgcgcgccgaggcggatgttcccaccgccacggtcgggatgatctggaccggcgaattagccgaggatctactcaacaaggggtgtgccgacgccgtcatggttggccgggcagccctgcgtgacaccaactggccactgcgcgccgcccacgaacttggcgtccccaacgaggaggccccgtggcacccggcgcgattccgcggcgcctggcggtga

SEQ ID NO: 29697 - protein, 366 aa, Propionibacterium acnes KPA171202
MTSPLLFQPLTLRGLTVRNRAWLPPMCQYAVDSQDGIPSTWHLIHYGSFAVGGFGLIVAEATAVSPEGRISPCDTGLWNDAQVAAWRTITDAVHELGGTIAVQLGHAGRKASTEKWWPGFHGGVIPPEKGGWIPVGPTAAPADGKQYAGSPVTALNEDGISKIIDDFRTAASRAVVAGFDAVEIHSAHGYLLHQFYSPLSNTRTDGWGSDYDGRVRLPLAVADAVRGAIPDDMPLLARLSVTDWRDDGWSVEDSIELSRRFALAGVDLVDASSGGNSSAPIPVAPGYQADLAARVRAEADVPTATVGMIWTGELAEDLLNKGCADAVMVGRAALRDTNWPLRAAHELGVPNEEAPWHPARFRGAWR

SEQ ID NO: 29698 - DNA, 1098 bp, Yersinia pseudotuberculosis IP 32953
  CDS (1)..(1098): transl_table=11
atgaaaactgctaaattattctccccattaaaggttggcgcgctcacgttgccaaaccgtgtctttatggccccactcacccgcttgcgtagcattgagcctggtgatatcccaacgccgttaatggccgaatattatcgccaacgggccagtgcaggcttgactatcacggaagccactcagatttcttttcaggcgaaaggctatgctggcgctccagggctacatactcaagaacagttgaacgcatggaaaaaagtgactcagggtgtacataatgagggtggccatattgccgtacaactttggcacgtaggccgtatttcccacaacagtttacaaccaggccagcaagcccctgtagcaccatcggcgattgccgcagatacccgtaccaccgtgcgcgatgaaacaggtgcttgggtacgtgtcccttgctctaccccacgggcgctggagacagaagagattccgggcatcattaatgatttccgtcaggcaaccgccaatgcccgcgaagcaggatttgactacattgaactgcacgcagcccatggttatctgttgcatcaattcatgtccccagcttccaatcagcgtactgaccaatatggcggcagtattgaaaaccgtacccgtctgacgttggaagtggtcgatgccaccgccgctgaatggggggctgaccgaattggtattcgtatttcgccattaggcccatttaatggcctcgataatggtgaagaccaagaagaagccgcactgtatctgattgatcagttgaataaacgtaacattgcttatttgcatatttccgagccagactgggcaggcggtaagccttattctgatacgttccgtgctgctgtccgtgctcattttaacggcgttattgttggtgctggtgcttacagcgcagagaaagctgaatgcttgattcaaaaagggttcattgatgcggtggcttttggtcgcagttatatttctaacccagatctggtgacgcgcctgcaacaacacgcgccactgaatgagcctgatagcaatactttctatggcggcggtgcgaagggctacaccgattacccaacgttgtga

SEQ ID NO: 29699 - protein, 365 aa, Yersinia pseudotuberculosis IP 32953
MKTAKLFSPLKVGALTLPNRVFMAPLTRLRSIEPGDIPTPLMAEYYRQRASAGLTITEATQISFQAKGYAGAPGLHTQEQLNAWKKVTQGVHNEGGHIAVQLWHVGRISHNSLQPGQQAPVAPSAIAADTRTTVRDETGAWVRVPCSTPRALETEEIPGIINDFRQATANAREAGFDYIELHAAHGYLLHQFMSPASNQRTDQYGGSIENRTRLTLEVVDATAAEWGADRIGIRISPLGPFNGLDNGEDQEEAALYLIDQLNKRNIAYLHISEPDWAGGKPYSDTFRAAVRAHFNGVIVGAGAYSAEKAECLIQKGFIDAVAFGRSYISNPDLVTRLQQHAPLNEPDSNTFYGGGAKGYTDYPTL

SEQ ID NO: 29700 - DNA, 1050 bp, Symbiobacterium thermophilum IAM 14863
  CDS (1)..(1050): transl_table=11
atggcccacctgttcgatcccttcacgcagaagtcggtcaccctgcgcaaccgcatcgtcatgtcgcccatgtgcatgtacgttgcgggcgccgacggcgtcgccaccgactggcacctggtccactacggcacccgggcggtgggcggtgccggcctgatcatcaccgaggccacggccgtggagccccgggggcgcatctccgagggcgacctggggctgtggaacgaccagcaggccgaggctctggcccggatcgcccgcttcgtccacgaccagggcgtcgccttcgccattcagctggcccacgccggccggaaggcctggaccccgtgcaagggccaggggccggagcccgcggtggcgcccagcgcgctccccttcgacacggactgggtaacgccgcaggccctggatgccgaggggatcgaccgggtggtggccgccttcggggcggcggcccggcgggcgggggagctgggctgcgacctggtggagatccacgccgcccacggttacctgctgcacgagttcctctcgccgctcaccaaccggcgtaccgacgagtacggcggcccgctggtgaaccgggcccgcctcctgcggcgggtgttcgaggccgtgcgggaggcattccccgccgaccggccggtctgggtgcgcatctcggccaccgactgggtggagggcggctgggacatcgccgagtcggtggagctggcccggatgatgaaggcatggggcgtggacctggtggacgtctccacgggcggcaattcgcccctgcagcggatcccttccatcggtcccggctaccaggtggccttcgccgagcggatccggcgcgaggccgggatcgcgaccggcgcggtggggctgatcaccacccccgagcaggcggactccgtcgtgcgcaccggtcaggcggacgtggcgctgctgggccgggagctgttgcgcaacccgtacttccccctggcggcggcccaccggctgggacatgaggtgacgtggccggagccgtacgtgcggggcaagttccggcggtga

SEQ ID NO: 29701 - protein, 349 aa, Symbiobacterium thermophilum IAM 14863
MAHLFDPFTQKSVTLRNRIVMSPMCMYVAGADGVATDWHLVHYGTRAVGGAGLIITEATAVEPRGRISEGDLGLWNDQQAEALARIARFVHDQGVAFAIQLAHAGRKAWTPCKGQGPEPAVAPSALPFDTDWVTPQALDAEGIDRVVAAFGAAARRAGELGCDLVEIHAAHGYLLHEFLSPLTNRRTDEYGGPLVNRARLLRRVFEAVREAFPADRPVWVRISATDWVEGGWDIAESVELARMMKAWGVDLVDVSTGGNSPLQRIPSIGPGYQVAFAERIRREAGIATGAVGLITTPEQADSVVRTGQADVALLGRELLRNPYFPLAAAHRLGHEVTWPEPYVRGKFRR

SEQ ID NO: 29702 - DNA, 1077 bp, Legionella pneumophila subsp. pneumophila str. Philadelphia 1
  CDS (1)..(1077): transl_table=11
atgacatgcaggagatttatcatggttaactccgatttaattttaagtccttatcagcttaatgataaaattacactaaaaaacagagtcattatggctcctatgactcgtaatatggctaacgatgatttcagtccaaccaggcagatggcagattattatgctcgaagggctgatgccgggttgattattacagaaggcactattattagccctgatggtcagggttatagcaatgctccaggaatatttacgcaaacccatattgacggttggaaaatggtaactgatgctgtgcatgaacggggagggaaaatatttttgcaaatttggcatgttggcagggtatctcatccgatttttttacatggtaacttaccgatttctgcttcagaaacgatgatgacaggtaaggtccggcgtgccgatgatctttattatggaaaatcaagggcggctacattagaggaaattaatgagttaatccaaaactatgcgttggctgcaagaagagcgatgatagccgggtttgatggcattgagattcatggtgccaatggttatttgattgatcagtttttacattaccataccaatcaacgtcatgatcagtatggacaatatccagagaatatggggcgatttgcgctggaagtggtaaaagcctgtatcaatgaaataggtgggcaatctgtaggattgcgcctttctcccggagcttatcttaatgaaattgtcggagatgagcgagatgccatggtatttcgatatgtattggaagaattgaatcactatggaatagcttatgtgcatacaggtaattttgatgacggtattcaattcaaagaattagggttcaaaacgatgacagaatttatgagagctcattttaaaggaaccttaattgccagcggtagctatacgcttcaccaggcaagaaaagatattcaaaataaaaaatacgatttaattgctttgggaaggccatttattgctaatcccgatttaatgaatcgtatcaagtggaatgccgattttctaccttatgaaaacagaatgttggacaccttgttttag

SEQ ID NO: 29703 - protein, 358 aa, Legionella pneumophila subsp. pneumophila str. Philadelphia 1
MTCRRFIMVNSDLILSPYQLNDKITLKNRVIMAPMTRNMANDDFSPTRQMADYYARRADAGLIITEGTIISPDGQGYSNAPGIFTQTHIDGWKMVTDAVHERGGKIFLQIWHVGRVSHPIFLHGNLPISASETMMTGKVRRADDLYYGKSRAATLEEINELIQNYALAARRAMIAGFDGIEIHGANGYLIDQFLHYHTNQRHDQYGQYPENMGRFALEVVKACINEIGGQSVGLRLSPGAYLNEIVGDERDAMVFRYVLEELNHYGIAYVHTGNFDDGIQFKELGFKTMTEFMRAHFKGTLIASGSYTLHQARKDIQNKKYDLIALGRPFIANPDLMNRIKWNADFLPYENRMLDTLF

SEQ ID NO: 29704 - DNA, 1062 bp, Burkholderia pseudomallei K96243
  CDS (1)..(1062): transl_table=11
atgccttctctgttcgatccgctgaccatcggcgacctcacactggcgaaccgcatcatcatggcgccgctcacgcgcgcccgcgccggcgacacgcgcacgcccaacgcgctgatggcgcgctactacgcggagcgcgcatccgcggggctcatcatcagcgaggcgacatcggtcacgccgcaaggcgtcggttacgcaagcacgccgggcatctggtcgcccgaacaggtcgacgggtggcgactcgtgacggacgcggtccacgcggccggcggccgcatcttcctgcagctctggcacgtcggccgcgtgtcggatccggtgttcctcgacggcgcgctgcccgtcgcgccgagcgcgatcgcccccggcggccacgtgagcctcgtgcgcccgcagcggccgtacgtgacgccgcgcgcgctcgagctcgacgagattccgggcgtcgtcgccgcgttccgccgcggcgcggaaaacgcgcgcgcggccggcttcgacggcgtcgaggtacacggcgcgaacggctatctgctcgatcaattcctgcaggacagcgcgaaccgccgcaccgacgcgtacggcggctcgatcgagaaccgcgcgcgcctgttgctcgaggtggtcgacgcggcgatcgacgtctggagcgcggcgcgcgtcggcgtgcatctcgcgccgcgcggcgatgcgcacacgatgggcgattcggaccccgcggctacgttcggccacgtcgcgcgcgaactcggccgccgccgcatcgcgttcctgttcgcacgcgaatcgttcggcggcgacgccatcggccagcaattgaaggcggcgttcggcgggccattcatcgtgaacgagaatttcacgctcgacagcgcgcaggcggcgctcgacgcgggacaggcggacgcggtcgcgtggggcaagctttttatcgcgaatccggacctgccgcgccgcttcaagctgaatgcgccgctcaacgagccgaatgccgctacgttctatgcgcaaggcgaagtaggctatacggactatccggcgctggaaagcgcggcgtga

SEQ ID NO: 29705 - protein, 353 aa, Burkholderia pseudomallei K96243
MPSLFDPLTIGDLTLANRIIMAPLTRARAGDTRTPNALMARYYAERASAGLIISEATSVTPQGVGYASTPGIWSPEQVDGWRLVTDAVHAAGGRIFLQLWHVGRVSDPVFLDGALPVAPSAIAPGGHVSLVRPQRPYVTPRALELDEIPGVVAAFRRGAENARAAGFDGVEVHGANGYLLDQFLQDSANRRTDAYGGSIENRARLLLEVVDAAIDVWSAARVGVHLAPRGDAHTMGDSDPAATFGHVARELGRRRIAFLFARESFGGDAIGQQLKAAFGGPFIVNENFTLDSAQAALDAGQADAVAWGKLFIANPDLPRRFKLNAPLNEPNAATFYAQGEVGYTDYPALESAA

SEQ ID NO: 29706 - DNA, 1119 bp, Methylococcus capsulatus str. Bath
  CDS (1)..(1119): transl_table=11
atgacgaatcccttgttccagcccttccggctcggcccgcacacgttgaagaaccgcatggtgatggcgccactcacccgctcgcgtgccgggcagcccggcaatgtgcctacggcgctgaacgccgaatactaccggcaacgggccagcgccggactgatcatctccgaggccacacaggtttccccccagggccagggttatgcgtggactccgggtatccattctgccgaacaggtggcaggctggcggctcgtcgccgatgccgtccacggcgccggcggcctgatgttcatgcagctctggcatgtcggccgcgtctcccatccggcgttgcagccaggcggcgcactgcctgtggcaccgtccgcgatcgcgcccaccggcatggccttcatcgttaacgccgaaggccagggcgagctggtgcctttcgtcaccccgcgggtcttggaactcgacgagatacccggcatcgtcggccagtaccgcgatggcgcccgcaatgccatggccgccggcatggacggcgtcgaagtgcatgccgccaatggctatctgctcgatcaattcctgaattccagctccaatcaccgtcgagatgcctatggcggctccccggaaaaccgggcgcgtctcctgatggaggtcctggaggcggtatgcggcgtctggggcgcggaccgggtgggtgtgcggctgtcgccgctgggcacgttcaacgacatgggcgatgccgacccggaagcgacgttcggctacgtggccgagcgcctgaacgatttcggactcgcctatctgcacgtggtggaacccttcatggccggaaacgcgcccgccgcaacaccggatccgcgaggtgaggccatcatggcgatgatccggatgagcttccgtggaccactgatcgtctgcggcggctacgaccaggccaaggccgtcgcctgcctcgagtccggtcgggccgacctcgtcgccttcggtcggctgttcatcgccaatcccgacctgcccgaacgtttcaggcgaggcgccgctctgaatggctggaacgaagccaccttctacggtggaggcgcggaaggctacactgattatccgtcattgacggatgcctga

SEQ ID NO: 29707 - protein, 372 aa, Methylococcus capsulatus str. Bath
MTNPLFQPFRLGPHTLKNRMVMAPLTRSRAGQPGNVPTALNAEYYRQRASAGLIISEATQVSPQGQGYAWTPGIHSAEQVAGWRLVADAVHGAGGLMFMQLWHVGRVSHPALQPGGALPVAPSAIAPTGMAFIVNAEGQGELVPFVTPRVLELDEIPGIVGQYRDGARNAMAAGMDGVEVHAANGYLLDQFLNSSSNHRRDAYGGSPENRARLLMEVLEAVCGVWGADRVGVRLSPLGTFNDMGDADPEATFGYVAERLNDFGLAYLHVVEPFMAGNAPAATPDPRGEAIMAMIRMSFRGPLIVCGGYDQAKAVACLESGRADLVAFGRLFIANPDLPERFRRGAALNGWNEATFYGGGAEGYTDYPSLTDA

SEQ ID NO: 29708 - DNA, 1098 bp, Azoarcus sp. EbN1
  CDS (1)..(1098): transl_table=11
gtgaattcccgtttgcttgaacccgttcgcctcggcgcactggaattgccgaaccgtgtcgtgatggcgccgctgacgcgctgccgcgccgacaatccggaatttgccccgaccgagtcgacggcacgctattacgcacaacgcgcgagcgccggcctgatcgtgtcggaggcgacgatcgtctcggcccaggggcgcggctacccctatacgcccggcatctggtccgacgcccaggtcaccggctggcggcgcgtgaccgacgcagtccatgccgcaggcgggcgcatcgtgtgccagctgtggcattgcggtcgcctgtcgctgactgaattccacgacggcgaacttccggtcgcgccgtccgcggtcaatgccgaatggaagatgttctcggcgcaggggctgaagacgacccccacgccgcacgcgctgagccgcgacgagatcgccgcgatcgtcgccgacttcggccgggccgcccgcaacgcggtgctggcaggctttgacggcgtcgagatccattcgtcgaacggctatctgatccaccagttcttttcgccgctcgccaaccggcgcgacgacgaatatggcggcagccacgcgaaccgcgcgcgcttcttcttcgaagtgctcgatgcggtcgccgccgagtggtcgccgtcgcgcatcggcttccgcctcaatccgatgatgaaccgcttccatggcatgcgcgtcgacgaggacacgctgccgatgttcgagcacgtcgtgcgccgtaccaatgcctatgagctggcctatctgcacctgacggaaccgtatctgccgaaccagctcgacggcgcagtcggtgcgatcgacgatgtggcgcgccatttccgcgacatcgcgacgatggcggtcatgacgaatggcggcttcgaccagacgcgtgccgaagctgcgctcgctgccggaacctgcgatgcagtcgcgttcgggcgcccgtacatctcgaaccccgaccttgtcgaacgcttccgtgccggcgcgccgctgaacgagtgggatgcagataccttctatcagggaggcgaccggggctatatcgactatcctacgctcggtggatga

SEQ ID NO: 29709 - protein, 365 aa, Azoarcus sp. EbN1
MNSRLLEPVRLGALELPNRVVMAPLTRCRADNPEFAPTESTARYYAQRASAGLIVSEATIVSAQGRGYPYTPGIWSDAQVTGWRRVTDAVHAAGGRIVCQLWHCGRLSLTEFHDGELPVAPSAVNAEWKMFSAQGLKTTPTPHALSRDEIAAIVADFGRAARNAVLAGFDGVEIHSSNGYLIHQFFSPLANRRDDEYGGSHANRARFFFEVLDAVAAEWSPSRIGFRLNPMMNRFHGMRVDEDTLPMFEHVVRRTNAYELAYLHLTEPYLPNQLDGAVGAIDDVARHFRDIATMAVMTNGGFDQTRAEAALAAGTCDAVAFGRPYISNPDLVERFRAGAPLNEWDADTFYQGGDRGYIDYPTLGG

SEQ ID NO: 29710 - DNA, 1077 bp, Silicibacter pomeroyi DSS-3
  CDS (1)..(1077): transl_table=11
atgagcgagacactctttacccccctcaaggcgggcaatatcgcgttgaagaaccgggtcgttatggcaccgctgacccgcaaccgggccgatgacaccgccggaaccgtgttcgaccggcatgcggaatattatgcccagcgcgccagcgccgggctgctgatcaccgaaggcgcgcagatcagcgccgagggcaagggctatatccagacgccgggcatccacacccccgaacaggttgccgcatggcgcaaggtcaccgacgccgttcatgccaggggcggcaagatcgtgatccagctctggcatgtgggccgcatctcgcacagctcgctgttgccggacgggcaggcgccggtgtcgccttcggcgattgcggcagaggccaagacattcacccatgccgggtttgagacgacctcgaccccgcgcgcgcttgaaacggacgagatcgcccgtgtccttgccgactacgcccatgccgcccaaagcgcccgcgaggcgggattcgacggggtcgagatccatgccgccaatggctatctggtcgaacagttcctcaaggatggcgccaaccagcggcaggacgactatggcggatcggttgaaaaccgcgcccgtttcctgtttcaggtgctggaggcggtgctgacggtctgggagccgggcaatgtcggcatccggctgtcgcccttcaccacggtgaacggcatatccgagagcgatccggtcgccacctatacgccggtgatcaagcggctggacagctatgggctggcctatctgcacatgatcgagggccagaccggcggagcccgcgacggcgcgttcgacgatctgcgccagctctggaccggggcctatatgggcaataacggctatgaccgcgccagcgcgctggagcggaccgaaacgggcgcggtggatctggtcgcctttggccggccctatatcgccaatcccgacctggtcgaacggcttgcggccgatgcgccgctgaacatgggcgataccgccacctattacggcggcggcgacgaaggctataccgattacccggtgttgcagacggcctga

SEQ ID NO: 29711 - protein, 358 aa, Silicibacter pomeroyi DSS-3
MSETLFTPLKAGNIALKNRVVMAPLTRNRADDTAGTVFDRHAEYYAQRASAGLLITEGAQISAEGKGYIQTPGIHTPEQVAAWRKVTDAVHARGGKIVIQLWHVGRISHSSLLPDGQAPVSPSAIAAEAKTFTHAGFETTSTPRALETDEIARVLADYAHAAQSAREAGFDGVEIHAANGYLVEQFLKDGANQRQDDYGGSVENRARFLFQVLEAVLTVWEPGNVGIRLSPFTTVNGISESDPVATYTPVIKRLDSYGLAYLHMIEGQTGGARDGAFDDLRQLWTGAYMGNNGYDRASALERTETGAVDLVAFGRPYIANPDLVERLAADAPLNMGDTATYYGGGDEGYTDYPVLQTA

SEQ ID NO: 29712 - DNA, 1107 bp, Synechococcus elongatus PCC 6301
  CDS (1)..(1107): transl_table=11
atgtccgaatcgctcaaactgctgacgccggtgcaagtcggtcgctacgagttgcgcaatcgcattgtgatggcgccgctgacccgcaaccgtgccactgggccagacaatatccccaacgacctgaacgttctctattaccagcaacgcgcttcagcagggctgattatcacggaagccagtcagatttcaccgcaaggacagggctaccccctcaccccaggcatccactcgcctgaacaggttgaagggtggaaaccgattgtgcaggccgtccacgatcgtggcggctgcatcttcttgcagctttggcacgtcgggcggatttcccatccatcgctgcagcccgacggcgcactgcccgttgctccgagtgcaattcagccagcaggcatggctgcaaccttccaaggagaacagccctttgtgacgccgcgcgctttggaaaccgaggagattgcgggcgttgtggaagactatcgccgtgcggctgaaaatgctttagcggcgggctttgatggtgttgaggtccacggggccaacggctatctgatcgatcagttttcgcaggatggcaccagtcagcgtagcgatcgctatggtggttcctttgaaaaccgcagccgtttcctgcgcgaagtcctcgacgccgtgatcagtgtttggggaagcgatcgcgttggtctacgcctctccccttggggccagttcaatgacatgcgcgactccgatcccgtcggtctgttcagctatgtcgcccagatgctgaatccttacaatctggcttacctgcactggattgaaccgcgttgggacaaggcggaggaaagtcctgaattcaaccagatggcaacgccggtgttccgatcgctctacaacggtccagtgattgccgccggtggttacagtcgctcgactgctgaagccgcgattgcctcgggagcagcagatttagtcgcctttggccgactctacatctccaatcccgacctggtggagcgttttgccttagatgcgccccttaatccctacgatcgcaacaccttctacggtggcgatgagcacggctacaccgactatcccagtttggaagcagcatctgtctaa

SEQ ID NO: 29713 - protein, 368 aa, Synechococcus elongatus PCC 6301
MSESLKLLTPVQVGRYELRNRIVMAPLTRNRATGPDNIPNDLNVLYYQQRASAGLIITEASQISPQGQGYPLTPGIHSPEQVEGWKPIVQAVHDRGGCIFLQLWHVGRISHPSLQPDGALPVAPSAIQPAGMAATFQGEQPFVTPRALETEEIAGVVEDYRRAAENALAAGFDGVEVHGANGYLIDQFSQDGTSQRSDRYGGSFENRSRFLREVLDAVISVWGSDRVGLRLSPWGQFNDMRDSDPVGLFSYVAQMLNPYNLAYLHWIEPRWDKAEESPEFNQMATPVFRSLYNGPVIAAGGYSRSTAEAAIASGAADLVAFGRLYISNPDLVERFALDAPLNPYDRNTFYGGDEHGYTDYPSLEAASV

SEQ ID NO: 29714 - DNA, 1023 bp, Bacillus clausii KSM-K16
  CDS (1)..(1023): transl_table=11
ttgccaaacttaatggacagctttcaactgaaagagcttacgttgaaaaaccgtgtcgtcatgtcgcctatgtgccaatattcggctacaggcaaagacggaatgccgactgactggcatttgcaccattacacgagcagagcaattggcggcgttggcctaattattgtggaaatgaccaatgtcgagccgaatgggcggattagcgattactgccttggcctttggtcagacgcccatcgcgatgcgtttaagccgattgtcgatgcagctcaccaatatggtgccaaaatcgccattcaaatcgcccatgctggcagaaaagcggaagacgcacctgaacccgttgcgccatccgcccaggcatttgacgaaacatacaaaacccctcgagcgctgtcagagaacgaaatcgctgagatggtgcaaacgtttaaggcagcagcccgccgagcagtagaagcgggatttgacgcgattgaactccatggcgcccatggctatttaatccatcaattcctttcaccatatacgaatacacgaacagaccgttacggtaaagaccgcacgctcttcgccaaagaagtcattcgcgcggtcaaaagcgtcatccccgacagcatgcctttattgatgcgtatttcagcaaccgaatatgtcgatggcggctacgatatagaagaagccatccgcttctcacagattttaaaagacgaaggagtcgacgtattcgacgtcagctctggcggcgaagggccaatcggctctagagggctgcctggaagccacgcaggttaccaaacgccgctggcaaaacagatcaaacaggcactatctgtccctgtcatcgccgtcggccgcctcgaaaaccctgttttagccaatgccgtaatcggcaatgaagaagccgatctcgtcgccgttggccgcggcctgttagccaacccatactgggcccttggcgctgcgtctgaattacagcttcctgttgaggctcctactcagtataaggctgggttttag

SEQ ID NO: 29715 - protein, 340 aa, Bacillus clausii KSM-K16
MPNLMDSFQLKELTLKNRVVMSPMCQYSATGKDGMPTDWHLHHYTSRAIGGVGLIIVEMTNVEPNGRISDYCLGLWSDAHRDAFKPIVDAAHQYGAKIAIQIAHAGRKAEDAPEPVAPSAQAFDETYKTPRALSENEIAEMVQTFKAAARRAVEAGFDAIELHGAHGYLIHQFLSPYTNTRTDRYGKDRTLFAKEVIRAVKSVIPDSMPLLMRISATEYVDGGYDIEEAIRFSQILKDEGVDVFDVSSGGEGPIGSRGLPGSHAGYQTPLAKQIKQALSVPVIAVGRLENPVLANAVIGNEEADLVAVGRGLLANPYWALGAASELQLPVEAPTQYKAGF

SEQ ID NO: 29716 - DNA, 1104 bp, Pseudomonas syringae pv. syringae B728a
  CDS (1)..(1104): transl_table=11
atgcatgatccccgtacaactaccgacctgttttcccccgtcaccctgggctccatggagctggcgaaccgtattgtgatggcaccggtaacacgcagccgctatggcgaggatggtgttcccaatgaactgcacgcaacttactacgcacaacgcgctacggcagggctgatcgtcgccgaggcgacaaacatttccgctcagggtcgaggctatgccgcgaccccgggaatctggagtgagcaacaggtcgcaggttggcgcctggtgaccgacgctgtgcatgcagcaggaggcaagattgtcagccagctatggcacgtggggcgattttccagtgtcgacctgcaacccaacggcgaggcaccggtagcgccctccgccatcaaggccgagggcaatacctacaccgccggcggttttgtacctgtctccatgccgcgcgcactggaaaccggcgaaatccccggcatcatcgagcaatacaaacacgccgcagagaacgccaaaagggccggttttgatggcattgaagtccattcggccaacagttacctgctggaccagtttctgcgcgactcgaccaatcagcgcaccgaccagtatggcggttcgatagaaaaccgcgctcgcctgacgctggaagtcacccaggccatcgtggatatctggggcagtgaccgcgtgggtattcgcttgtcgcccgtgacccccgacgccggtaatacggcacccgacagcaacgtcatgggccttcatggctacctgatccagcaactgaacacattcaatctggcctatctgcactttgtcgaaggcgccactgccacctcccgtgaagtgccggagggtgtcgacatggatgccctgagcgccgggttcaacggtccgttcattggcaataacaactatgacctgaagatggcgatcgagcgtcgggcgcagggcaagatcgacgccgtggctttcggccgcttgttcatatccaaccccgacctcgtcgcccgtctgcgccatggtgccgagctgaccattgcaccacgtgagtcgtactacggcggcggtgccaaaggctatatcgactggccaatgggcaagtactaa

SEQ ID NO: 29717 - protein, 367 aa, Pseudomonas syringae pv. syringae B728a
MHDPRTTTDLFSPVTLGSMELANRIVMAPVTRSRYGEDGVPNELHATYYAQRATAGLIVAEATNISAQGRGYAATPGIWSEQQVAGWRLVTDAVHAAGGKIVSQLWHVGRFSSVDLQPNGEAPVAPSAIKAEGNTYTAGGFVPVSMPRALETGEIPGIIEQYKHAAENAKRAGFDGIEVHSANSYLLDQFLRDSTNQRTDQYGGSIENRARLTLEVTQAIVDIWGSDRVGIRLSPVTPDAGNTAPDSNVMGLHGYLIQQLNTFNLAYLHFVEGATATSREVPEGVDMDALSAGFNGPFIGNNNYDLKMAIERRAQGKIDAVAFGRLFISNPDLVARLRHGAELTIAPRESYYGGGAKGYIDWPMGKY

SEQ ID NO: 29718 - DNA, 1050 bp, Pseudomonas syringae pv. syringae B728a
  CDS (1)..(1050): transl_table=11
atgacgactatctttgacccgatcaccctgggcgatctgcaactgcccaaccgcatcatcatggccccactgacgcgctgccgtgccgatgaaggccgtgtgccgaacgcgatgatggccgagtattacgtgcagcgcgcctcggccggcctgatcctgactgaagccacctctgtgacgccgatgggcgtgggctaccccgacaccccgggcatctggtccaacgaccaggtacgtggctggagcaacatcaccaaggccgtgcacaacgccggtggccgtatcgccctgcagttgtggcacgtgggccgtatttcccacccgtcctacctgaacggcgaaaccccggtcgcgccgagtgccattgcggctgaagggcacgtgagcctgatgcgccccatcacaccactgccagtacctcgcgcgctggagctggcggaaatcggtgacatcgtcgaggcctatcgcgtcggtgcggaaaacgccaaggctgcgggcttcgacggcgtggaagtgcatggcgccaacggctatctgctcgaacagttcctgctgaccggcaccaaccagcgcaccgacgagtacggcggttcggtggaaaatcgtgcgcgtctgctgctcgaagtgaccgacgcagtcatcgatgtctggggcgctggccgtgtaggtgttcacctctcgcctcgcttcgacatgcacgacatgagcgatgcaaaccgtgctgaaaccttcagctacgtggccaaagagctcggcaagcgcggtatcgccttcatctgtgcccgtgagcatgatgctgaagacagcctcggcccacagttgaagaaggatttcggcggcgtttatatcgccaacgagaagttcaccaaagacagcgccaatgcctggctggcagaaggcaaggccgacgcaatcgcgttcggtgtgccgtacattgccaaccctgacctgccggagcggctggccagcgatgcccctctgaacgaagcccatccggagacgttctacgccaaagggccggtcggttacatcgactacccgcgcctgtaa

SEQ ID NO: 29719 - protein, 349 aa, Pseudomonas syringae pv. syringae B728a
MTTIFDPITLGDLQLPNRIIMAPLTRCRADEGRVPNAMMAEYYVQRASAGLILTEATSVTPMGVGYPDTPGIWSNDQVRGWSNITKAVHNAGGRIALQLWHVGRISHPSYLNGETPVAPSAIAAEGHVSLMRPITPLPVPRALELAEIGDIVEAYRVGAENAKAAGFDGVEVHGANGYLLEQFLLTGTNQRTDEYGGSVENRARLLLEVTDAVIDVWGAGRVGVHLSPRFDMHDMSDANRAETFSYVAKELGKRGIAFICAREHDAEDSLGPQLKKDFGGVYIANEKFTKDSANAWLAEGKADAIAFGVPYIANPDLPERLASDAPLNEAHPETFYAKGPVGYIDYPRL

SEQ ID NO: 29720 - DNA, 1050 bp, Pseudomonas fluorescens Pf-5
  CDS (1)..(1050): transl_table=11
atgacgactctctttgatccgatcaaactcggcgatctcgaactgtccaaccgcatcatcatggcgccgctgacccgctgccgcgccgatgccggccgcgtacccaacgcgctgatggccgaatactacgtacaacgggcttccgccggcctgatcctcagcgaggccacctcggtgacccccatgggcgtgggctacccggacacccccggcatctggtccaacgaccaggtgcgtggctgggccaatgtgaccaaggcagtacacggcgccggtggcaagatattcctgcagctgtggcacgtcggacgcatctcccacccgtcctatctgaacggcgaaaccccggtggcacccagcgccctgcagcccaaggggcatgtcagcctggtgcgcccgctggccgacttcccaactccgcgggccctggaaaccgctgaaatcgccgacatcgtcgatgcctaccgggtcggcgcggaaaacgccaaggccgccggtttcgacggcgtggaaatccacggcgccaacggctacctgctggaccagttcctgcaaagcagcaccaaccagcgtaccgaccagtacggcggctccctggaaaaccgtgcccgcctgctgctggaagtcaccgacgcggccatcgagatctggggtgccggccgggtaggcgtgcacctggcaccacgtgccgactcccatgacatgggtgatgccaacctggcggagaccttcacctacgtcgctcgggagctgggcaaacgcggtatcgcctttatctgctcccgcgagaaagaaggcgccgacagcctgggcccgcaactcaaagaagccttcggcggcccctacatcgccaacgaacgcttcaccaaggacagcgccaacgcctggctggccgctggcaaggctgacgccgtggcctttggtgtgcccttcatcgccaacccggacctgccagcccgcctgaaggccgatgcgccgttgaacgaagcgcacccggaaaccttctacggcaagggcccggtcggctatatcgactacccgactctgtaa

SEQ ID NO: 29721 - protein, 349 aa, Pseudomonas fluorescens Pf-5
MTTLFDPIKLGDLELSNRIIMAPLTRCRADAGRVPNALMAEYYVQRASAGLILSEATSVTPMGVGYPDTPGIWSNDQVRGWANVTKAVHGAGGKIFLQLWHVGRISHPSYLNGETPVAPSALQPKGHVSLVRPLADFPTPRALETAEIADIVDAYRVGAENAKAAGFDGVEIHGANGYLLDQFLQSSTNQRTDQYGGSLENRARLLLEVTDAAIEIWGAGRVGVHLAPRADSHDMGDANLAETFTYVARELGKRGIAFICSREKEGADSLGPQLKEAFGGPYIANERFTKDSANAWLAAGKADAVAFGVPFIANPDLPARLKADAPLNEAHPETFYGKGPVGYIDYPTL

SEQ ID NO: 29722 - DNA, 1101 bp, Pseudomonas fluorescens Pf-5
  CDS (1)..(1101): transl_table=11
atgaccgatcagaatctgttcaccccttacacccttggcgccctcgcgctggcgaaccgcatcgtcctcgcgccactgacccgcaaccgcgcgggcgcaggctttgttcccagcgaattcgccgccacctattacagccaacgcgctagcgcaggcttgctgatcagcgaagccacgcagatttcccaacagggccagggctatcaggacacccccgggatctacacccaggcgcagattgatggctggcgcacggtgaccgacgcggtccacgcccagggcgcaaagatctttgtgcaactgtggcatgtcggccgcgtgtcccacgttgatctgcaagaaaacggcgccgcccccgtggccccttccgcgctgcgtgcggccaccaaggtgttcgtcaacaaccgctttgaagacgccagcgagccccgcgcactggacatcagcgagctgccggggatcgtcgccgatttccgccaggccgcggcaaacgctatcgctgccgggttcgatggcgtggaaattcacggcgcgaacggctatttgctggatcagttcctcaaggacagcgccaacgtacgcaccgatgcttacggcggctcgattgaaaatcgtgcgcgtctgttgctcgaagtcaccgctgccgtggtcaatgaaatcggcgcggatcgcaccggggtgcgcttgtcgccggtgtcgccggccaacggtgtctccagcagcaatccgcaggcgcaattcaattacgtcgtcgatcaactcgacgccctcgacgtcgtttacctgcacatggtcgaaggcgcgaccggtggcccacgtgacgtggcgccattggatttcaccgccctgcgccagcgtttcaaaaacacctacatcgccaacaacggctatgacctggagctggcaacctcacggctcgccgaagaccaggccgatctgatcgcgttcggtcgcccgttcatcggcaacccggatctggtggagcgtctcaagaccggcgccgccttgtccgcattcaatcccgccaccctctacggcggcggcgcggcaggctacatcgactacccgacgctggttgattcgagcgccagcgcaagctga

SEQ ID NO: 29723 - protein, 366 aa, Pseudomonas fluorescens Pf-5
MTDQNLFTPYTLGALALANRIVLAPLTRNRAGAGFVPSEFAATYYSQRASAGLLISEATQISQQGQGYQDTPGIYTQAQIDGWRTVTDAVHAQGAKIFVQLWHVGRVSHVDLQENGAAPVAPSALRAATKVFVNNRFEDASEPRALDISELPGIVADFRQAAANAIAAGFDGVEIHGANGYLLDQFLKDSANVRTDAYGGSIENRARLLLEVTAAVVNEIGADRTGVRLSPVSPANGVSSSNPQAQFNYVVDQLDALDVVYLHMVEGATGGPRDVAPLDFTALRQRFKNTYIANNGYDLELATSRLAEDQADLIAFGRPFIGNPDLVERLKTGAALSAFNPATLYGGGAAGYIDYPTLVDSSASAS

SEQ ID NO: 29724 - DNA, 1128 bp, Psychrobacter arcticus 273-4
  CDS (1)..(1128): transl_table=11
atgccaaataccagtacattattttcctctatacaacttggaccttatactcttaaaaaccgtatcgtgctgccgcctttgacacgctgtcgtagcacgcaacctggcaatattcctaatgatttaatggcaagctattatgcacagcgtgcctcagcaggttttatggtgactgaaggtacacagattgagccaagaggccaaggttatgcgtggacgccagggattcattcaccagcacaaattgaaggctggaaaaaagtcacgcaggcagtacatgctaaaggtggtattatttttgctcagctgtggcacgttggacgcgtgtctcataccaacttacagccaaatcaaaatcagcctatcgctccatctgctatcaccgctaataacgtcaaagtatttattgagacaggtccaggcgagggcgctttagccgacccaagtgagccacgcgcactgagcacagaagaagtgggtgaactggtcgctatgtacgcacaagccgcgcgcaacgcactagaagcgggtttcgatggggtagagctacactgtgccaatggctatttggtgaatcaatttatctctgagcatagcaatacacgtgatgatcaatatggtggttcgctgaccaatcgtctgcgttttttaaaagaagtggttgctgccgtcagtgatgtggttggtgctgatcgtttaggcgtacgttttgcgcctttatttgcaagtactaatgagactcgtgtgtatctagggctggtagaagcagatcctcatcatacctatattgaagcgattaaggttcttgaacaagcgggcattgcttacttatccattgcagaggctgattgggacaatgcgcctgatttaccagagcctttttatcaagccgtcagagctgagttttcacaacgtattatttatgcaggtaagtacactgtgcaaaagtcggtcgatatattatctaaaggttatggtgatttatttgcttttggtcgtccttttattgctaatcccgatttacctgaacgcatagccaataattggtcactcaatgaagtagatcctgccacgatgtatggtggcactgccattggctacagtgattaccctcgctatcaagaataa

SEQ ID NO: 29725 - protein, 375 aa, Psychrobacter arcticus 273-4
MPNTSTLFSSIQLGPYTLKNRIVLPPLTRCRSTQPGNIPNDLMASYYAQRASAGFMVTEGTQIEPRGQGYAWTPGIHSPAQIEGWKKVTQAVHAKGGIIFAQLWHVGRVSHTNLQPNQNQPIAPSAITANNVKVFIETGPGEGALADPSEPRALSTEEVGELVAMYAQAARNALEAGFDGVELHCANGYLVNQFISEHSNTRDDQYGGSLTNRLRFLKEVVAAVSDVVGADRLGVRFAPLFASTNETRVYLGLVEADPHHTYIEAIKVLEQAGIAYLSIAEADWDNAPDLPEPFYQAVRAEFSQRIIYAGKYTVQKSVDILSKGYGDLFAFGRPFIANPDLPERIANNWSLNEVDPATMYGGTAIGYSDYPRYQE

SEQ ID NO: 29726 - DNA, 1125 bp, Colwellia psychrerythraea 34H
  CDS (1)..(1125): transl_table=11
atgacattttcacctttatttacagcaacagagcttggcccttatacccttaagaatcgtattgtttttccgccattaacacgttctagaagctctcaaccgggaaatattcctaaccagttgatggctaattactattcgcaacgtgctggcgctggctttatggtcactgaaggcactcaaattgaaccaagagggcaaggttatgcgtggacacccggtattcatagtgccgagcaagttcaaggatggaaacaggtaacacaagcagtacacgatgcgggtagcattattttttgtcaattatggcatgttggtcgtgtttctcatacatcattacaaccaaaccaagcagcacctgttggcccatcagcattgaaagctgatgcggttaaagtttttatcgaaactgcaccagagcaaggcgcattagctgatccaagtgagcctcgggcactatcaactattgaagttgaggagctggtacaaatgtacaaacaagctgcggtaaatgctaaagaagccggctttgatggcgttgaattacattgcgctaatggttatctggtgaatcaatttatttctgaacataccaacgatagaactgataaatacggtggtagcttagagaatcgcttacgatttttaaaggaaataacgcaagccgttgctgacgttatgggggctgacaaagtaggcgtaaggttcgcgccattatttgaaagtactgatgaagtgcgggtttatttaggtttagtagaaagcgatccgcatgcaacctatatcgcagccattaaagcgctaaatgatattggtatcgcttatttatcacttgctgaagcggattgggataatgcgcctgatttacctgaagacttctacaaagccgtaagaaacacctttgacggtttagtgatgtatgccggtaaatatacgccagaaaaagcattaagaatcttaactgaaggcaatggtgatatttttggcttcggtcgcccatttatagctaaccctgacttaccagagcgtattaagaacgaatggtcgttaaacgacgttgacccaacaagcatgtatggcggcactgataaaggttataccgattaccctgtgtacgctttataa

SEQ ID NO: 29727 - protein, 374 aa, Colwellia psychrerythraea 34H
MTFSPLFTATELGPYTLKNRIVFPPLTRSRSSQPGNIPNQLMANYYSQRAGAGFMVTEGTQIEPRGQGYAWTPGIHSAEQVQGWKQVTQAVHDAGSIIFCQLWHVGRVSHTSLQPNQAAPVGPSALKADAVKVFIETAPEQGALADPSEPRALSTIEVEELVQMYKQAAVNAKEAGFDGVELHCANGYLVNQFISEHTNDRTDKYGGSLENRLRFLKEITQAVADVMGADKVGVRFAPLFESTDEVRVYLGLVESDPHATYIAAIKALNDIGIAYLSLAEADWDNAPDLPEDFYKAVRNTFDGLVMYAGKYTPEKALRILTEGNGDIFGFGRPFIANPDLPERIKNEWSLNDVDPTSMYGGTDKGYTDYPVYAL

SEQ ID NO: 29728 - DNA, 1050 bp, Pseudomonas syringae pv. phaseolicola 1448A
  CDS (1)..(1050): transl_table=11
atgacgactatctttgacccgatcaccattggcgatctgcaactgccaaaccgcatcatcatggcgccactgacgcgctgccgcgccgacgaaggtcgcgtacccaatgcattgatgtccgagtattacgtgcagcgtgcttctgcaggcctgatcctgactgaagccacatcggtcacgccgatgggtgttggttacccggacacacccggcatctggtccaacgaccaagtacgcggctggagcaacatcaccaaggccgtgcataccgctggtggccggattgtgctgcagctgtggcacgttggccgcatctcccacccggcgtacctgaacggcgaaactccggtggcccctagcgctatcgcagctgaaggccacgtcagcctgatgcgcccgatcaccccgctaccgaccccgcgcgcgctggaactggcagaaatcggtgacatcgtcgaggcctatcgcgtcggtgcggaaaacgccaaggctgcgggcttcgacggcgtggaagtacacggtgccaacggctacctgctggaacagttcctgctgaccggctccaaccagcgcactgacgagtacggcggttcggtagaaaaccgtgctcgtctgctgctggaagtgactgatgcggtcattgaggtgtggggcgctggtcgcgtaggcgtacacctttcgcctcgcttcgacatgcacgacatgagcgatgctaaccgcactgaaaccttcagctacgtggccaaagagcttggcaagcgcggtatcgcgttcatctgtgcccgtgagcgtgacgccgaagacagcctcggcccgcagttgaagaaggatttcggtggcgtctacatcgccaatgaaaaattcaccaaggacaccgcaaatacctggctggcagaaggcaaggccgacgctatcgcatttggtgtgccttatattgccaacccggacctgcctgagcgtctggccagcgacgcgcctctgaatgaagcgcatcccgaaacgttctacggcaaagggccggtcggctatatcgactacccacgcctgtaa

SEQ ID NO: 29729 - protein, 349 aa, Pseudomonas syringae pv. phaseolicola 1448A
MTTIFDPITIGDLQLPNRIIMAPLTRCRADEGRVPNALMSEYYVQRASAGLILTEATSVTPMGVGYPDTPGIWSNDQVRGWSNITKAVHTAGGRIVLQLWHVGRISHPAYLNGETPVAPSAIAAEGHVSLMRPITPLPTPRALELAEIGDIVEAYRVGAENAKAAGFDGVEVHGANGYLLEQFLLTGSNQRTDEYGGSVENRARLLLEVTDAVIEVWGAGRVGVHLSPRFDMHDMSDANRTETFSYVAKELGKRGIAFICARERDAEDSLGPQLKKDFGGVYIANEKFTKDTANTWLAEGKADAIAFGVPYIANPDLPERLASDAPLNEAHPETFYGKGPVGYIDYPRL

SEQ ID NO: 29730 - DNA, 1083 bp, Dechloromonas aromatica RCB
  CDS (1)..(1083): transl_table=11
atgactaccttgttcgatccaatccagatgggcgacatcgcccttgccaaccgtatcgtgatggctccgctgacgcgcaaccgcgccatcgagggcaacaagcccggcccgctgaccgtcgagtactaccgccagcgcgccacggccggcctgatcgtcgccgaagccagcccgatcagcccgaccgcccaggggtacctcgacaccccgggcatctggtcggccgagcaggtcgtggcctggcaggccgtaaccaaggccgtgcatgccgaaggcggcaagatcgtgctgcagctctggcacgtcggccgcatttcgcacatctcgctgctgccggctggcgaagtgccggtgtcgtccaccgacaaggtggccgatgcatcgacctttaccagcgaaggcttcatccccgtgtccaagccgcgcgccctgcacgacgacgaaatcccggcgctgatcgaggactaccgcaaggccgcccgcaatgcgatcgccgccggcttcgacggtgtcgagatccacgccgccaacacctacctgatcgagcagttcctgcgcgacagcgtcaatgaccgcagcggcccgtacggcggcagcatcgagaaccgcacccgcctgttgctcgaagtcacccgcgctgttgccggcgaaatcggtgctggccgcaccggcatccgcctgagcccgatgaccaccttcacggcaccgctcgacagcaacccgcaggcgctctacggctatgtcgtcgagcaactggccccgctcggcctggcttacctgcatgtaatcgaaggcgaaaccggcggcacccgcacgccggagggcaagcctttcgactacgcggccctgcaccgcgcctaccccggcgtctggatgctcaataatggctacgaccgcgacctggcgctgcaaaccgtcgccgacggcaaggccgacctgatcgcctttggccgtccgttcatcagcacgcccgacctcgtccgccgtctgcgcgacggtgcgccgttgaacgaattgcgcgccgacaagctctatggtggtggcgccgagggttacaccgactacccgacgctggccggctaa

SEQ ID NO: 29731 - protein, 360 aa, Dechloromonas aromatica RCB
MTTLFDPIQMGDIALANRIVMAPLTRNRAIEGNKPGPLTVEYYRQRATAGLIVAEASPISPTAQGYLDTPGIWSAEQVVAWQAVTKAVHAEGGKIVLQLWHVGRISHISLLPAGEVPVSSTDKVADASTFTSEGFIPVSKPRALHDDEIPALIEDYRKAARNAIAAGFDGVEIHAANTYLIEQFLRDSVNDRSGPYGGSIENRTRLLLEVTRAVAGEIGAGRTGIRLSPMTTFTAPLDSNPQALYGYVVEQLAPLGLAYLHVIEGETGGTRTPEGKPFDYAALHRAYPGVWMLNNGYDRDLALQTVADGKADLIAFGRPFISTPDLVRRLRDGAPLNELRADKLYGGGAEGYTDYPTLAG

SEQ ID NO: 29732 - DNA, 1065 bp, Thermobifida fusca YX
  CDS (1)..(1065): transl_table=11
gtgagccacctcttcgaaccactgaaactgcgcgacaccctcatccccaaccgggtgtgggtctctcccatgtgccagtactccgcccacaacggagtccccaacgactggcacctcgtccacctcggccaattcgccctcggcggggccggactggtgatcgccgaagccacggccgtcgtccccgaaggacggatcagccccgccgacacgggactgtggaacgacgaacaagcctccgcctggcggcgcatcaccgacttcctccgcgcccacggtgctgtccccgccatccagctcgcgcacgcgggccgcaaagcctccaccgcagtgccctgggaaggcgaacacaccgtccccgaaacagaaggcggctggcctaccgtcagctccaccaaccagcctttcggcagtctcgccgcgccccgggcgctcaccaccgacgaagtcgccgcactaccggaacacttcgccgcagccgcccgccgcgcggaaaccgccggcttcgacgtcgtcgaactccacttcgcccacggctacctggcccaccagttctactcgcccctcgtcaacgaccgcaccgaccgctacggcggcagcttcgacaaccgggtccggctgctgttggagatcaccgaggccgtccgccaagtgtggcccgcccaccggcccctgttcgcccgcatctccgccaccgactgggtggaaggcggatggaccggcgacgactcggtccgcctggcccgcctcctcgctgaccgcggcgtcgacctcatcgacacctccagcggcggcgcggtacccgacgcccgtatcccggtccgccccggctaccaggtgcccttcgcccgccagatcagaaccgaagcccacgtccccaccggcgctgtcggtctgatcaccgcgcccgaacaagccgaagagatcatcgcctccggatcagccgacgcggtcctgctcggtcgcgccatgctccgcgacccccactggccgctgcacgccgccgaccggctccgcgcaggcaacctctggccgaaaccctacgaacgcgctcgcctgaactaa

SEQ ID NO: 29733 - protein, 354 aa, Thermobifida fusca YX
MSHLFEPLKLRDTLIPNRVWVSPMCQYSAHNGVPNDWHLVHLGQFALGGAGLVIAEATAVVPEGRISPADTGLWNDEQASAWRRITDFLRAHGAVPAIQLAHAGRKASTAVPWEGEHTVPETEGGWPTVSSTNQPFGSLAAPRALTTDEVAALPEHFAAAARRAETAGFDVVELHFAHGYLAHQFYSPLVNDRTDRYGGSFDNRVRLLLEITEAVRQVWPAHRPLFARISATDWVEGGWTGDDSVRLARLLADRGVDLIDTSSGGAVPDARIPVRPGYQVPFARQIRTEAHVPTGAVGLITAPEQAEEIIASGSADAVLLGRAMLRDPHWPLHAADRLRAGNLWPKPYERARLN

SEQ ID NO: 29734 - DNA, 1131 bp, Ralstonia eutropha JMP134
  CDS (1)..(1131): transl_table=11
atggcgcttgccgtcgtgccaaagcactgctgtgcgcttctcccacccatacgaaaatacgcaaggccagacctcatgcctaccctcttcgaccccatccgcatcggcgacctcgacctgcccaaccgcgtcatcatggcgccgctgacccgctcgcgcgccgtcggcggcaagcgtgtgccgaacgcactgatggccgagtattacgtgcaacgcgcgtccgccggcctcatcatctcggaagccacggcggtgacgccgcagggcgtcggctatgccgacacgccgggcatctggaccgacgagcaagtcgcgggctggaaacacgtgaccgacgcagtccatgccgctggcggccgcatcttcatgcagctctggcacgtcggccggatctcggacccgatcttcctcgacggcgaactgcctgtggcgccgagcgcgatcgcggcgcaaggccacgtgagcctggtgcgcccgaagcgtgcctacgtcacgccccgtgcgctggaaaccgaggaaatcgctggcgtgatcgcggcctaccggcacggtgccgaaaatgccaaaaaggccggcttcgacggcgttgaaatccacggtgccaacggctacctgctcgaccagttcctgcaggattcgaccaaccagcgcacggatgcctatggtggccccatcgaaaaccgcgcgcggctgctgctcgaaattaccgacgcatgcatcgacgtgtggggtgccgaccgcgtcggcgtgcacctgtcgccgcgcggtgacgtgcactcgatgggcgactccgatctggcggcgacgttcggctacgtggcgcgcgaactgggcaagcgccgcattgccttcatctgcgcgcgcgaggcactcggcgacaatcgcctgggtccggccctgaaggcggctttcggcggcgtctatatcgccaacgagaaaatgaccaagcagaccgccgaacacgtgctggccgccggcgaagccgacgccgtcgcattcgggcagctcttcatcgccaacccggacttgccgcgccgccttgcgctcgacgcatcgctcaacgagccccggccggagacgttctaccacccgggtgccgagggatataccgactatccggcgctggtgtga

SEQ ID NO: 29735 - protein, 376 aa, Ralstonia eutropha JMP134
MALAVVPKHCCALLPPIRKYARPDLMPTLFDPIRIGDLDLPNRVIMAPLTRSRAVGGKRVPNALMAEYYVQRASAGLIISEATAVTPQGVGYADTPGIWTDEQVAGWKHVTDAVHAAGGRIFMQLWHVGRISDPIFLDGELPVAPSAIAAQGHVSLVRPKRAYVTPRALETEEIAGVIAAYRHGAENAKKAGFDGVEIHGANGYLLDQFLQDSTNQRTDAYGGPIENRARLLLEITDACIDVWGADRVGVHLSPRGDVHSMGDSDLAATFGYVARELGKRRIAFICAREALGDNRLGPALKAAFGGVYIANEKMTKQTAEHVLAAGEADAVAFGQLFIANPDLPRRLALDASLNEPRPETFYHPGAEGYTDYPALV

SEQ ID NO: 29736 - DNA, 1095 bp, Methanosarcina barkeri str. Fusaro
  CDS (1)..(1095): transl_table=11
atggcagaagatacagacttattttcacagtataggatgggtgatctcacgctgccaaaccgcatagtgatggcaccaatgacccgcaaccgcgcaggggatgacgacattcctgtcccactgacagttacttattatgtgcagcgagcctcggcaggtataattatcaccgaaggttcacaggttagcccgcagggagtaggctacatgcatacaccaggaatatactctgcagcacaggtcgccggctggaaaaaggtaacggatgcagtccatcgggaaggaggcaggattttcatccagctctggcacgtaggaagggtttctcaccccgacttactgggaggcgctctgccagtcgcaccatccgcactacctgtcgaaggctttacccacgcatcaggtggaaaaaagccgattcctgtgcccagggccctgaagaccgaagaagtgccggacatcgtcaggcaattccggcaggctgctgagaacgcaaaaaccgcaggtttcgatggtgtagaaatccatggagctaacacatacctgctggaccaatttctgaggagcgggtccaataagcgaaccgataaatacggcggcagccttgagaatcggacccgtctgccgcttgaggtcacgaaagccgttatcgaggtatggggtggcgaccgtgtcggctatcgcatctctccgcacaataacgcgcattctatgtcggatgaaaaccccctggagactttttcctattttgccagagagctgaacaaaacgggcctgggataccttcatttaatcgagcccataggaggccggatggggttcgctccacccgaggcacggcttgggcccatcctgcgcaggattttcgaaaggactttcatactgaacggcggctatggcctccacagcgggaacgaagctattgccaacggcgaagccgacctaattgctttcggagtaccattcctggccaatcctgaccttccagagcgctttaggcagaatgctccgctgaatgagccggacgagtccaccttctacgtgggaggcgcgaaaggctacacggactatccggccctagtagtccatagatga

SEQ ID NO: 29737 - protein, 364 aa, Methanosarcina barkeri str. Fusaro
MAEDTDLFSQYRMGDLTLPNRIVMAPMTRNRAGDDDIPVPLTVTYYVQRASAGIIITEGSQVSPQGVGYMHTPGIYSAAQVAGWKKVTDAVHREGGRIFIQLWHVGRVSHPDLLGGALPVAPSALPVEGFTHASGGKKPIPVPRALKTEEVPDIVRQFRQAAENAKTAGFDGVEIHGANTYLLDQFLRSGSNKRTDKYGGSLENRTRLPLEVTKAVIEVWGGDRVGYRISPHNNAHSMSDENPLETFSYFARELNKTGLGYLHLIEPIGGRMGFAPPEARLGPILRRIFERTFILNGGYGLHSGNEAIANGEADLIAFGVPFLANPDLPERFRQNAPLNEPDESTFYVGGAKGYTDYPALVVHR

SEQ ID NO: 29738 - DNA, 1113 bp, Thiobacillus denitrificans ATCC 25259
  CDS (1)..(1113): transl_table=11
gtgagcacactgttttcgcccttccgactcggcacgcgcgtgctgaagaaccgcatcgtcgtctcgccgatgtgccaatactcggccgaggacggctgcgcgaccgactggcacatgatccatctgggccatctcgcactgtccggcgcggggctgctgttcgtcgaggcgacggcggtctcgcccgaaggccgcatcgcggcgtccgatctcggcctgtggtcggacgacaacgaggcggcgctgcgccgcgtcgtcgacgcgatccgccgctacgcgccaccgctggcactcggcatccagctcgcccacgcgggtcgcaaggcgtcgaccgacgtgccctgggcgggcggacacttcatcctgcccgaacagggcggctggcagacgctcgcgccgtccgccctcgcctacgcgcccggcgacgctgccccccgcgcgctcgacacagcaggcctcgagcgggtacgcggagaattcgtcaccgccgcccagcgcgccgagcgactcggtttcgacgtgatcgaactgcacgcggcgcacggttacctgctgcatgaattcctctcgccgctgtcgaacgtgcgcgacgaccgttacggcggcagcctcgaaaaccgcatgcgcttcccgctcgaggtgttcgacgccatgcgcgcggcgcttcacgcagacgtcccgctcggcgtgcggatttccgccaccgactgggtcgaaggcggctgggacatcgcgcaaagcctcgccttcgccgaagcgttgcggcgccgcggctgcgccttcatcgacgtttcgagcggcggcctgtcgccggcgcagcagatcccggtcgcgccgggttaccagctgcctttcgcggcgcagatccgcggcgagaccggcatgccgaccatggccgtcggcctgatcaccgaccctcaccaggccgagaacatcgtcgccggcggccacgccgacctggtcgcgctcgcccgcggcatgctgtacgacccgcgctggccgtggcacgcggcggccgaactcggcgcgcgcgccgacgcgcccaagcaatactgggcggcgccgccgcacggacacggaaccctgttcaagcgtgacaaggacgccgaatga

SEQ ID NO: 29739 - protein, 370 aa, Thiobacillus denitrificans ATCC 25259
MSTLFSPFRLGTRVLKNRIVVSPMCQYSAEDGCATDWHMIHLGHLALSGAGLLFVEATAVSPEGRIAASDLGLWSDDNEAALRRVVDAIRRYAPPLALGIQLAHAGRKASTDVPWAGGHFILPEQGGWQTLAPSALAYAPGDAAPRALDTAGLERVRGEFVTAAQRAERLGFDVIELHAAHGYLLHEFLSPLSNVRDDRYGGSLENRMRFPLEVFDAMRAALHADVPLGVRISATDWVEGGWDIAQSLAFAEALRRRGCAFIDVSSGGLSPAQQIPVAPGYQLPFAAQIRGETGMPTMAVGLITDPHQAENIVAGGHADLVALARGMLYDPRWPWHAAAELGARADAPKQYWAAPPHGHGTLFKRDKDAE

SEQ ID NO: 29740 - DNA, 1098 bp, Anabaena variabilis ATCC 29413
  CDS (1)..(1098): transl_table=11
atgtctaccaacatcaacctattctcttcctaccaattaggagaactaaaattacctaaccggatagtgatggctcccttaaccagacaaagagctggtgagggcaatgtaccacatcaacttaatgctatctactatggtcaacgcgcttcagcaggattaattattgccgaagccacccaagtgacaccccaaggacaaggatatccccatacaccaggcattcattccccagaacaagtagcagggtggaaactagtaactgatactgtacatcagcaaggtggcagaatttttctgcaactgtggcacgtcggcagaatatctcatcctgacttgcaaccagatggagaattacctgtagcaccttcagccattgcgcctaaaggtgaggtgttaacttatgaaggcaagaaaccctatgttacgcctcgcgctttggagacatcagaaattcccggcattgttgaacaatatcgccaaggggcagcaaacgccctagcggccgggtttgatggtgtagaaattcatgctgcgaatggttatttaattgaccagtttctcagggatgggacgaatcaacgtacagacgagtatgggggtgcgattgagaatcgcgcccgacttttattagaagtaaccgaggcggtaacaagtgtgtgggattcccaacgggtaggagtcagactatcgcctagtgggacatttaacgatatccgtgactctcatcctttagaaacctttggttacgtagctcaagcattaaaccgcttcaatctgtcctatttacatatctttgaagctatagacgcagacatcagacatggtggcacaattgtacctactagccatctacgcgatcgctttacaggtacactcattgttaatggtggttatacccgtgaaaaaggcgatactgtcatagccaacaaagcagcagatttagttgcctttgggacgctgtttatctccaatcctgatttacctgaacgcctagaggtgaacgcaccactcaatcaggcagaccccacaaccttttatggtggtggtgaaaaaggctatacagattatccatttttagaagttgctagcaaatag

SEQ ID NO: 29741 - protein, 365 aa, Anabaena variabilis ATCC 29413
MSTNINLFSSYQLGELKLPNRIVMAPLTRQRAGEGNVPHQLNAIYYGQRASAGLIIAEATQVTPQGQGYPHTPGIHSPEQVAGWKLVTDTVHQQGGRIFLQLWHVGRISHPDLQPDGELPVAPSAIAPKGEVLTYEGKKPYVTPRALETSEIPGIVEQYRQGAANALAAGFDGVEIHAANGYLIDQFLRDGTNQRTDEYGGAIENRARLLLEVTEAVTSVWDSQRVGVRLSPSGTFNDIRDSHPLETFGYVAQALNRFNLSYLHIFEAIDADIRHGGTIVPTSHLRDRFTGTLIVNGGYTREKGDTVIANKAADLVAFGTLFISNPDLPERLEVNAPLNQADPTTFYGGGEKGYTDYPFLEVASK

SEQ ID NO: 29742 - DNA, 1065 bp, Pseudomonas fluorescens PfO-1
  CDS (1)..(1065): transl_table=11
atgcaaatgggcgccctgcaattgaccaaccggattgtcatggcgcccgtgacccgcagccggatggctgaagacggcgttccgaacgagttgcacgctacttactacgcacagcgcgcgagtgccggcttgatcattgccgaagcgacaaacatttcggcgcaggggcgtggctacgccatgacgccggggatctggtcggacgcgcagggggcggggtggaaaaaagtcacggacgccgtccatgccgcaggtggcaggattgtcagccagctgtggcacgtggggcgtttttccagcgtcgagttgcagcccgaccgcgccgctcccgttgcgccgtcggcgatcaaggcagaaggcagcacctacaccgagaacggctttgtcgaagtgtcgatgccccgagcgctggagacatcggagattcccggcatcatcgagcaatacaagcgcgccgctgaaaatgccaggcgtgccggtttcgatggcgtggaggttcattcggcgaacagctatctgctcgaccagtttctgcgtgactcgaccaatcagcgcactgaccggtatggcggcaccattgagaaccgcgcccgactgacgcttgaagtcactgaagcggtgatttcgatctggggcagtgaccgcgtcggcattcgtctttcgccggtcacgcccgatgccggaaacacacctcccgacagcaatgtcatggcgacctacggatatctgattcagcagctcaaccggctcaatctggcctatctgcacttcgtcgaaggcgccaccgcgacctcgcgcacggttcctgatggcgttgatctggatgcattgagcgcgcagttcgaaggccccttcatcggcaataacaactacgacctcgagatggcactggagcgccgggcgcagggccggattgacgcggtggcgttcgggcgcctgttcatttccaaccccgacctcgtggagcgcctgcgtcggggcaccgaactgaccatcgcaccacgcgagagctactacggaggcggcgccaagggctacaccgactggccaacggctgaccattga

SEQ ID NO: 29743 - protein, 354 aa, Pseudomonas fluorescens PfO-1
MQMGALQLTNRIVMAPVTRSRMAEDGVPNELHATYYAQRASAGLIIAEATNISAQGRGYAMTPGIWSDAQGAGWKKVTDAVHAAGGRIVSQLWHVGRFSSVELQPDRAAPVAPSAIKAEGSTYTENGFVEVSMPRALETSEIPGIIEQYKRAAENARRAGFDGVEVHSANSYLLDQFLRDSTNQRTDRYGGTIENRARLTLEVTEAVISIWGSDRVGIRLSPVTPDAGNTPPDSNVMATYGYLIQQLNRLNLAYLHFVEGATATSRTVPDGVDLDALSAQFEGPFIGNNNYDLEMALERRAQGRIDAVAFGRLFISNPDLVERLRRGTELTIAPRESYYGGGAKGYTDWPTADH

SEQ ID NO: 29744 - DNA, 1101 bp, Pseudomonas fluorescens PfO-1
  CDS (1)..(1101): transl_table=11
atgaccaagcagactcttttctccccttacacgctaggcagtctcacgctgtcgaaccgcgtcgttcttgcaccgctgacacgcaaccgcgcaggccagggctttgtccccagcgaattcgcggccgtctattacagccagcgcgccagcgccggtttgctgatcagcgaagcgacgcagatttcccaacagggtcagggttatcaggacacccccgggatctacacacaggcacagattgacggttggcgcacagtcactgatgccgtccacgccaaaggcggaaaaatcttcctgcagctgtggcatgtcggccgcgtttcacacgttgacctgcaagaaaacggcgccgcaccggtggccccttctgcgctgcgtgccgcgaccaaagtgttcgtcaacaaccgctttgaagacgtctccgaaccccgcgccctggaaactagcgaactgccggggatcgtctccgatttccgccaggctgcggccaacgcagtcgccgccgggttcgatggcgtggaaattcacggtgcaaacggctatttgctggatcaattcctcagggacaacgccaatctgcgcaccgacgcttacggcggctcgattgaaaatcgtgcgcgtctgttgctcgaagtgacagcggctgtcatcaacgagatcggcgcggatcgcaccggtgtgcgcctgtctcccgtgtcgccggccaatggcgtctccagcagcgatccgcaggcgcaattcaattacatcgtcgagcaactcgacgccctcggtgtggtttatctgcacatggtcgaaggcgcgaccggcggcccgcgcgacgtggcccctttcgatttcggcgccctgcgccagcgcttcaaaaacacctatatcgccaacaacggctatgacctggacctggcggctgcgcggctggccgaagaccaggccgatctgatcgccttcggtcgcccgttcattgccaacccggatctggtggagcgcctcaagcagggcgcgccgctgtccgcgttcaatcccgccaccctctacggcggcggcgcggcgggctacatcgactacccgacgctggctgaatcgagcgtcagcgcaagctga

SEQ ID NO: 29745 - protein, 366 aa, Pseudomonas fluorescens PfO-1
MTKQTLFSPYTLGSLTLSNRVVLAPLTRNRAGQGFVPSEFAAVYYSQRASAGLLISEATQISQQGQGYQDTPGIYTQAQIDGWRTVTDAVHAKGGKIFLQLWHVGRVSHVDLQENGAAPVAPSALRAATKVFVNNRFEDVSEPRALETSELPGIVSDFRQAAANAVAAGFDGVEIHGANGYLLDQFLRDNANLRTDAYGGSIENRARLLLEVTAAVINEIGADRTGVRLSPVSPANGVSSSDPQAQFNYIVEQLDALGVVYLHMVEGATGGPRDVAPFDFGALRQRFKNTYIANNGYDLDLAAARLAEDQADLIAFGRPFIANPDLVERLKQGAPLSAFNPATLYGGGAAGYIDYPTLAESSVSAS

SEQ ID NO: 29746 - DNA, 1089 bp, Rhodobacter sphaeroides 2.4.1
  CDS (1)..(1089): transl_table=11
atgaccgagaaactcttcaccccgatcgcagtcggtgatctgacgctgaagaaccgggtcgtgatggcgccgctcacccgcaaccgggccgagcccgagggcgacctgccgaccgatctcaccgtggaatattatcgtcagcgggccggcgcgggcctgatcgtgacggagggctcgcagatctcgccggagggcaagggctatgcctggacgccgggcatccattccgaggctcaggtcgcaggctggcgcaaggtgacggacgccgtccatgcgcgcggcggccatatcgcgatccagctctggcatgtgggtcgcatcagccacacgagcctgctcgacgggcagaaaccggtggcgccttcggccctcgccgcggcctcgcgcaccttcgatggcacgggctttgtggccacctccgagccgcgcgcgctggagaccgacgagatcgcccgcgtggtcgaggattaccgcaaggccgcgcgcaacgcgaaggccgcgggcttcgatgccgtcgagatccacgccgcgaacggctatctgatcgaccagttcctgcgggacacgtcgaacaagcgcaccgacgcctatggcggcagccaggagaaccgcgtgcgcttcctcgaagaggtcgtgggcgcggtcgtggccgagatggggccggggcgcaccggcatccgcttctcgcccttctcgaacgccaatgatgtgggcatcgacagcgatacggtgggcctcttttccagggccatcgacgtgctgaaccggcacgggatcgccttcctgcacatggtcgagggccagaccggcggggcgcgcgagtggcccgagggcgcgctcgagacgctgcgcgagcggttcggcggcacctatgtcgccaacaacggctatgaccgcgagatggcggtggcggcggtcgagagcggcaaggcggacatggtggccttcggcaagctctatatctcgaaccccgatctggccgagcggctcgctgcccgggcgccgcttgcgccgctgccgaccgaggggctctatggcggcggggccgagggctacacggactatccgacgctgaccccggccgcctga

SEQ ID NO: 29747 - protein, 362 aa, Rhodobacter sphaeroides 2.4.1
MTEKLFTPIAVGDLTLKNRVVMAPLTRNRAEPEGDLPTDLTVEYYRQRAGAGLIVTEGSQISPEGKGYAWTPGIHSEAQVAGWRKVTDAVHARGGHIAIQLWHVGRISHTSLLDGQKPVAPSALAAASRTFDGTGFVATSEPRALETDEIARVVEDYRKAARNAKAAGFDAVEIHAANGYLIDQFLRDTSNKRTDAYGGSQENRVRFLEEVVGAVVAEMGPGRTGIRFSPFSNANDVGIDSDTVGLFSRAIDVLNRHGIAFLHMVEGQTGGAREWPEGALETLRERFGGTYVANNGYDREMAVAAVESGKADMVAFGKLYISNPDLAERLAARAPLAPLPTEGLYGGGAEGYTDYPTLTPAA

SEQ ID NO: 29748 - DNA, 1122 bp, Burkholderia sp. 383
  CDS (1)..(1122): transl_table=11
atgactaccgacagctttctctcgccgccccgggcgcctgcgcgtccgacactgttcgatccgatcgaactcgggcgcatcacgctcaggaatcgcatcgtgatggcgccgatgacgcgcagccgtgccggtgccggcgacgcccccggcccgatgaacgcgacctactacgcacaacgggcctcggccggcctgatcgtcaccgagggaacgcagatctcgccaccgggcaaaggctatccgttcacgccaggcatctacagcgatgcgcagatcgcgggctggaaacaggtgaccgacgcggtgcaccgtgaaggcggccgcattttcgtgcaactggcccatgtcggccgcatcggtcacccggacctgcagccggacggcgcactgccggtcgcgccgtcaccgatccggcccgacggcgacgcctatacgccgaccggcccgcagccctacccggtaccgcgcgcactcgaaaccgccgaattgcctgccatcgtcggccaatatgtgctggcaactcgtgccgcatttcaggccgggttcgacggcgtggagattcatgccggcaacggctatctgctcgaccagttcctgcgtgacggcacgaatcgacggaccgacgactacggcggcacgatcgacaaccggctccgactgccactcgaggtcgcgcgcgcagtcagtctcgtttcaggccccgatcgattaggtatccgtatctcacctgtcacgccgcatttcggcggaattgcggatagcgatccgcaagcgctgttcgaacgattcgccgaccggctgagcggcctcgcggtctatctccatgtcgtcgaaggcatccctcaggtcgcgccggacgcggcgcccgcattcgactacgacgcgctgcgtcacgccttcgccgggcattacatcgcgaacaacggatacacgaaaacacgtgcggaaacggcgctttccgatggccatgccgatctcgtgtcgttcggctacccgttcatcgcgaacccggatttcgctgaacgcctccggcacgaccggccgctcgcgcatgcggacatgtccatggcctacggcggcggcgaagccggctataccgactacccgccgttccgcgcatga

SEQ ID NO: 29749 - protein, 373 aa, Burkholderia sp. 383
MTTDSFLSPPRAPARPTLFDPIELGRITLRNRIVMAPMTRSRAGAGDAPGPMNATYYAQRASAGLIVTEGTQISPPGKGYPFTPGIYSDAQIAGWKQVTDAVHREGGRIFVQLAHVGRIGHPDLQPDGALPVAPSPIRPDGDAYTPTGPQPYPVPRALETAELPAIVGQYVLATRAAFQAGFDGVEIHAGNGYLLDQFLRDGTNRRTDDYGGTIDNRLRLPLEVARAVSLVSGPDRLGIRISPVTPHFGGIADSDPQALFERFADRLSGLAVYLHVVEGIPQVAPDAAPAFDYDALRHAFAGHYIANNGYTKTRAETALSDGHADLVSFGYPFIANPDFAERLRHDRPLAHADMSMAYGGGEAGYTDYPPFRA

SEQ ID NO: 29750 - DNA, 1062 bp, Burkholderia sp. 383
  CDS (1)..(1062): transl_table=11
atgcccaccctgttcgatcccgtcaccctcggcgacctgaccctgccgaaccgcatcgtgatggcgccgctcacccgctcccgtgccggtgcgacgcgcgtgccgaacgccctgatggcccgctactacgccgagcgcgcaacggccggcctgatcattaccgaggccacgtcggtcacgccgcagggcgtcggctacgcggacacccccggcatctggtccgacgagcaggtcgaaggctggaaacaggtgacgcaggccgtgcatgcggccggtgggcgcatcgtgctgcaactctggcacgtcggccggatctccgacccggtgttcctgaacggcgacctgccggtcgcgccgagcgcgatcgccgcgggcggccacgtgagcctcgtgcgtccgcagcgcccgtacgtgacgccgcgcgcactcgagctcgacgaaatcccgggcatcgtcgccgcataccgcaagggtgcggagaacgcgaaggcggccggcttcgacggtgtcgagatccacggcgcgaacggctacctgctcgaccagttcctgcaggacagcaccaatcgccgcaccgatgcctatggcggcccggtcgagaaccgcgcacgcctgctgctcgaagtggtcgacgctgcgatcgacgtgtggggcgccggccgcgtcggcgtgcaccttgcaccacgcggcgacgcgcacacgatgggcgattccgatccggcggcaacgttcggttatgtcgcgcgcgaactcggccgtcgcaagatcgcgttcatcttcacgcgtgagtcgtattcgggcgatcacttgagcccgcgcctgaaggaagcgttcggcggcccgctgatcgcgaacgagcaattcacgctcgacaccgcacaggccacgcttgcaagcggcaacgccgacgcgatcgcatggggcaagctgttcatcgcgaaccccgacctgccgcgccgcctcgaactcggtgcggcgctcaacaagccggtgccggaaacgttctacgcggaaggtgaaacgggttataccgattacccggcgctgagcgacgcggcctga

SEQ ID NO: 29751 - protein, 353 aa, Burkholderia sp. 383
MPTLFDPVTLGDLTLPNRIVMAPLTRSRAGATRVPNALMARYYAERATAGLIITEATSVTPQGVGYADTPGIWSDEQVEGWKQVTQAVHAAGGRIVLQLWHVGRISDPVFLNGDLPVAPSAIAAGGHVSLVRPQRPYVTPRALELDEIPGIVAAYRKGAENAKAAGFDGVEIHGANGYLLDQFLQDSTNRRTDAYGGPVENRARLLLEVVDAAIDVWGAGRVGVHLAPRGDAHTMGDSDPAATFGYVARELGRRKIAFIFTRESYSGDHLSPRLKEAFGGPLIANEQFTLDTAQATLASGNADAIAWGKLFIANPDLPRRLELGAALNKPVPETFYAEGETGYTDYPALSDAA

SEQ ID NO: 29752 - DNA, 1116 bp, Burkholderia sp. 383
  CDS (1)..(1116): transl_table=11
atgacccaagcactgttctcgccgttacgccttggcccattcgcactcgcccatcgcgtggtgatggctccgctcacacgcatgcgcgctgccgaacccggcaacaccccgcatgcactgaacgtggagtactaccgtcagcgtgccacgtacggcgggctgatcatcaccgaaggctcgcaaatttcaccaacaggtcaggggatgcccgcgacaccgggtatccacagtccggaacaggtcgaagggtggaaggcggttacgcaagcggtgcatgccaaaggtggcctggtattcatgcagctctggcacgtaggtcgcatctcacattcgtcgctattgaatggcgagcaaccggttgctccctctgcgatcgcggcgccgggcaatgcatttacttccacgttcgagagggtaccgtttgagatcccgagggcactgggcacaaaggaaattgcttcgctggtcgacgactatgcgcaggcagcgcgcaacgcgcttgaggccggattcgacggcgtggagattcatggcgccaacggctacctgcttgaacagtttttgcaaagccggagcaatcaccgtacagatgaatacggtggctcgatcgaaaaccggtgccgcatcgtgcttgaggtggccgaggccgtgtcggctgtatacgggccagaccgcgtcggtattcgcctgtctccttttggcgtagccaatggcagtggagaagacgcgccactgccgctgtattcccatctcatcgaacgtctggcgcgcctggacctcgcgtatctgcatctgatcgaacctcgggcgagtggcgcgggccaggccgatgtcgaccaccagaacgtaccattcgcttcagagttgttccgtccgcactggcctaatgtattgatcgcggccggaaactacacgcctgccaccgcgggggcagtgatcggagcggggcgcgcggatgccgtcgcgtttgggcgtttgttcatcgccaatcccgatctgcccgaacgcgtacgcctgggcgccagtctcaatgcctacaaccggccaactttttacgggggtggcgcagccggctacaccgactatccggccttgggtgagactgccggtgcctga

SEQ ID NO: 29753 - protein, 371 aa, Burkholderia sp. 383
MTQALFSPLRLGPFALAHRVVMAPLTRMRAAEPGNTPHALNVEYYRQRATYGGLIITEGSQISPTGQGMPATPGIHSPEQVEGWKAVTQAVHAKGGLVFMQLWHVGRISHSSLLNGEQPVAPSAIAAPGNAFTSTFERVPFEIPRALGTKEIASLVDDYAQAARNALEAGFDGVEIHGANGYLLEQFLQSRSNHRTDEYGGSIENRCRIVLEVAEAVSAVYGPDRVGIRLSPFGVANGSGEDAPLPLYSHLIERLARLDLAYLHLIEPRASGAGQADVDHQNVPFASELFRPHWPNVLIAAGNYTPATAGAVIGAGRADAVAFGRLFIANPDLPERVRLGASLNAYNRPTFYGGGAAGYTDYPALGETAGA

SEQ ID NO: 29754 - DNA, 1107 bp, Synechococcus elongatus PCC 7942
  CDS (1)..(1107): transl_table=11
atgtccgaatcgctcaaactgctgacgccggtgcaagtcggtcgctacgagttgcgcaatcgcattgtgatggcgccgctgacccgcaaccgtgccactgggccagacaatatccccaacgacctgaacgttctctattaccagcaacgcgcttcagcagggctgattatcacggaagccagtcagatttcaccgcaaggacagggctaccccctcaccccaggcatccactcgcctgaacaggttgaaggctggaaaccgattgtgcaggccgtccacgatcgtggcggctgcatcttcttgcagctttggcacgtcgggcggatttcccatccatcgctgcagcccgacggcgcactgcccgttgctccgagtgcaattcagccagcaggcatggctgcaaccttccaaggagaacagccctttgtgacgccgcgcgctttggaaaccgaggagattgcgggcattgtggaagactatcgccgtgcggctgaaaatgctttagcggcgggctttgatggtgttgaagtccacggggccaacggctatctgatcgatcagtttttgcaggatggcaccaatcagcgtagcgatcgctatggtggttcctttgaaaaccgcagccgtttcctgcgcgaagtcctcgacgccgtgatcagtgtttggggaagcgatcgcgttggtctacgcctctccccttggggccagttcaatgacatgcgcgactccgatcccgtcggtctgttcagctatgtcgcccagatgctgaatccttacaatctggcttacctgcactggattgaaccgcgttgggacaaggcggaggaaagtcctgaattcaaccagatggcaacgccggtgttccgatcgctctacaacggtccagtgattgccgccggtggttacagtcgctcgactgctgaagccgcgattgcctcgggagcagcagatttagtcgcctttggccgactctacatctccaatcccgacctggtggagcgttttgccttagatgcgccccttaatccctacgatcgcaacaccttctacggtggcgatgagcacggctacaccgactatcccagtttggaagcagcatctgtctaa

SEQ ID NO: 29755 - protein, 368 aa, Synechococcus elongatus PCC 7942
MSESLKLLTPVQVGRYELRNRIVMAPLTRNRATGPDNIPNDLNVLYYQQRASAGLIITEASQISPQGQGYPLTPGIHSPEQVEGWKPIVQAVHDRGGCIFLQLWHVGRISHPSLQPDGALPVAPSAIQPAGMAATFQGEQPFVTPRALETEEIAGIVEDYRRAAENALAAGFDGVEVHGANGYLIDQFLQDGTNQRSDRYGGSFENRSRFLREVLDAVISVWGSDRVGLRLSPWGQFNDMRDSDPVGLFSYVAQMLNPYNLAYLHWIEPRWDKAEESPEFNQMATPVFRSLYNGPVIAAGGYSRSTAEAAIASGAADLVAFGRLYISNPDLVERFALDAPLNPYDRNTFYGGDEHGYTDYPSLEAASV

SEQ ID NO: 29756 - DNA, 1098 bp, Rhodospirillum rubrum ATCC 11170
  CDS (1)..(1098): transl_table=11
atgtccagccctttcccccatcttttcgaccccttggcgcttggcgatctccaccttcccaatcgcatcgttctcgccccgctgacccgcagccgcgccctgcccggcgaggtcgccggcgctttgaccgcccgctattacgcccagcgcgccagcggtggcctgttaatcagcgaaggaacccagatctcgccaagcggccggggttatccgcgcaccccgggcatccattcccccgagcagatcgccggctggaagggcgtgaccgaggcggtccatgccgccggcgggcggatcttcgcccagctttggcatgtcgggcgcatctcgcaccgctcgctccagcccggcggcgttttgcccgtcgcccccagcgccatccgccccaagaccaaaatcttcaccgaaagcggcttggtcgccctggaaaccccgcgcgccctggacaccgccgaaatggcggatatcgtcgccagcttccgcgccgccgccgagaacgcccgcgccgccggcttcgatggcgtcgagatccacgccgccaatggctatctgctcgaccagttcctgcgcgatggcaccaatcaccgcgacgacgcctatggcgggtcgatcgacaaccgcctgcgcctggtgctcgaggttgtcgaggcggtgctcggcgtctgggacaaagcccgcgtcggcctgcggctgtcgccggccaatcccttcaacgacatccttgattcgaccccccaggccactttcgaggcggtggtcagcgcccttgatggcttcggcctgggttatctgcatatggtcgaaggcagcctgggcagcggcgaaggcgcgcccgagatcgatttcgccgcgctccgccgcctgtggcagggggtctatatggccaatggcggctatgacggcccgcgcgccgaagccgccctcgcctcgggccatgcccaattggtgtccttcggcaccgcctatctggccaatcccgatctgcccgagcgcctgcgcaccaacgcgccgctgaatacccccgattccaccacgttctaccagggcgaggacaaggggtatgttgattaccccacgctcgccgatggcgccgcctaa

SEQ ID NO: 29757 - protein, 365 aa, Rhodospirillum rubrum ATCC 11170
MSSPFPHLFDPLALGDLHLPNRIVLAPLTRSRALPGEVAGALTARYYAQRASGGLLISEGTQISPSGRGYPRTPGIHSPEQIAGWKGVTEAVHAAGGRIFAQLWHVGRISHRSLQPGGVLPVAPSAIRPKTKIFTESGLVALETPRALDTAEMADIVASFRAAAENARAAGFDGVEIHAANGYLLDQFLRDGTNHRDDAYGGSIDNRLRLVLEVVEAVLGVWDKARVGLRLSPANPFNDILDSTPQATFEAVVSALDGFGLGYLHMVEGSLGSGEGAPEIDFAALRRLWQGVYMANGGYDGPRAEAALASGHAQLVSFGTAYLANPDLPERLRTNAPLNTPDSTTFYQGEDKGYVDYPTLADGAA

SEQ ID NO: 29758 - DNA, 1062 bp, Burkholderia thailandensis E264
  CDS (1)..(1062): transl_table=11
atgccttctctgttcgatccgctgaccatcggcgacctgtcgcttccgaaccgcatcatcatggccccgctgacccgcgcccgcgccggcgccacacgcacgcccaacgcgctgatggcgaggtactacgcagagcgcgcgtccgccgggctcatcatcagcgaggcgacgtcggtcacgccgcaaggcgtcggctatgcgggcacgccgggcatctggtcgcaggagcaggtcgacggctggcggctcgtgacggacgccgtccatgcagtcggcggccgcatcttcctgcaactctggcacgtcggccgcgtatcggacccggtgttcctcgacggcgcgctgccggtcgcgccgagcgcgatcgcacccggcggccacgtgagcctcgtacgtccgcaacggccctacgtgacgccgcgcgcgctcgatctcgacgagattccgggcgtcgtcgccgcgtttcgccgcggcgcagaaaacgcgcgcgcagccggcttcgacggcgtcgaggtgcacggcgcaaacggctatctgctcgatcagttcctgcaggacagttcgaaccgccgcgacgacgcgtacggcggctcgatcgagaatcgcgcgcggctcttgctcgaggtggtcgacgaggcgatcgacgtgtggggcgcggcgcgcgtcggcgtgcatctcgcgccgcgcggcgatgcgcacacgatgggcgattcggcccccgccgcgacgttcggctacgtcgcacgcgaactcggccgccgccgcatcgcgttcctgttcgcgcgcgaatcgttcggcgatgattccatcggcccacagttgaaggcagcgttcggcggaccgttcatcgcgaacgagaatttcacgctcgacagcgcgcaggcggcgctcgaggcgggacgggctgacgcgatcgcgtggggcaagctctttatcgcgaatccggacctgccgcgccgcttcgagctgaacgcgccgctcaacgaaccgaattccgcgactttctacgccgaaggcgaagcgggatatacggactatccggcgctggaaagcgcagcgtga

SEQ ID NO: 29759 - protein, 353 aa, Burkholderia thailandensis E264
MPSLFDPLTIGDLSLPNRIIMAPLTRARAGATRTPNALMARYYAERASAGLIISEATSVTPQGVGYAGTPGIWSQEQVDGWRLVTDAVHAVGGRIFLQLWHVGRVSDPVFLDGALPVAPSAIAPGGHVSLVRPQRPYVTPRALDLDEIPGVVAAFRRGAENARAAGFDGVEVHGANGYLLDQFLQDSSNRRDDAYGGSIENRARLLLEVVDEAIDVWGAARVGVHLAPRGDAHTMGDSAPAATFGYVARELGRRRIAFLFARESFGDDSIGPQLKAAFGGPFIANENFTLDSAQAALEAGRADAIAWGKLFIANPDLPRRFELNAPLNEPNSATFYAEGEAGYTDYPALESAA

SEQ ID NO: 29760 - DNA, 1116 bp, Burkholderia thailandensis E264
  CDS (1)..(1116): transl_table=11
atgactcaggaccctctgttcgaaccgctgcggctcggcgtgctgatgctgccgaaccgcatcgtgatgccgccgatgacgcgctcgcgcgcgagccggcccggcgacgaagccaacgacctgatggccgcgtattacgcgcagcgcgcgagcgcgggcctcatcgtcagcgaaggcacgtacatcgcgccgctcggcaagggctatgcgtggacccccggcattcacacgcccgcgcaggtcgccggctggcgcaaggtcacgcgcgccgtgcacgccgccggcgggcggatgttcgcgcagctctggcacgtcggccggctgagccacgtgagcctgctgggcggccggcagccggtgtcgtcgtcgccgatccaggcgaagggcgtgaacgtgttcatcgcgggcgacgacggcagcacgccgggcttcgtgcaggcgtccgagccgcgcgcgctcggcgtcgacgagatccgcgagatcgtcggccagtatcgcgccgccgcgcgccatgcgatcgacgcgggcttcgacggcgtcgagctgcacggcgcgaacggctacctcgtgaaccagttcatcgattcgcaggcgaacacgcgcaccgacgaatacggcggctcgctcggcaaccggctgcgcttcctgcgcgaagtcgcgcaggcgttgatcgaaggcgcgggcgatgcgtcgcgggttggcgttcgcctcgcgccgctgacgacgctgaacggctgcgtcgacgacgatccgcaaacgacgtacctcgcggccgcgaagctgctcggcgagctcggcgtcggctacctgcacatcgcggaagccgactgggacgatgcgccgctgatgccggtcgagttcaagcggaagctgcgcgaggcgttcccgggcgtgctgatctatgcgggcaagtacacggcgcaacgcgcgcgcgaggcgatcgcggccggctgggcggatctgatcgcgttcggccgcccgttcgtcgcgaacccggacttgcccgaacgcctgcgcgccggcgcgccgctcgcgccgcacgatcgcagcacgctgttcggcggcggcgcgcacggccttaccgattatccgaccctcgcgcaagacgcggcgtga

SEQ ID NO: 29761 - protein, 371 aa, Burkholderia thailandensis E264
MTQDPLFEPLRLGVLMLPNRIVMPPMTRSRASRPGDEANDLMAAYYAQRASAGLIVSEGTYIAPLGKGYAWTPGIHTPAQVAGWRKVTRAVHAAGGRMFAQLWHVGRLSHVSLLGGRQPVSSSPIQAKGVNVFIAGDDGSTPGFVQASEPRALGVDEIREIVGQYRAAARHAIDAGFDGVELHGANGYLVNQFIDSQANTRTDEYGGSLGNRLRFLREVAQALIEGAGDASRVGVRLAPLTTLNGCVDDDPQTTYLAAAKLLGELGVGYLHIAEADWDDAPLMPVEFKRKLREAFPGVLIYAGKYTAQRAREAIAAGWADLIAFGRPFVANPDLPERLRAGAPLAPHDRSTLFGGGAHGLTDYPTLAQDAA

SEQ ID NO: 29762 - DNA, 1104 bp, Novosphingobium aromaticivorans DSM 12444
  CDS (1)..(1104): transl_table=11
atgcatgaaccgctgttccagcctgtgcgcctcggcgccatcgaagcgcccaatcgcatcatcatggccccgctcacccgtggccgcgcgaatccccaggcggtgccgacaccgatcatgggcgaatattatcgccagcgcgccagcgccggcctgatcatctccgaggcgaccgcgatcagccccgagggcgccgggtggccgagcgcgccgggcatctggaccgacgagcagaccgaggcgtggaagccgatagtcgatgaagttcatgcggcgggcggacgcatcgtcctgcagctttggcacatgggccgcgtggtccacccctatttcctcggcggcgagccacctgtttcggcatcggcgacgcgtgcacccggccatgcccatacgccggaaggcaccaaggactacgagacagcgcgccccctgcggctggacgagattccccgtctgatcgacgattatggccgggcggctgaaaatgcacggaaggccgggttcgacggggtgcagctccacgccgcgaacggctaccttatcgaccagttcctgcgcgacggcaccaaccttcgcgacgacgattacggcggcagccccgagaaccgggtgcgcctgatgcgcgaggtgatggagcggctgatctcgatctggggcaaggagcgggtgtcgatccgcctttcgcccaacggcgattcgcaaggggtcgacgatagcaaccccgaggcaacctttggcgaagccgcgcgagtgctcgaggaactgggcgtcggcttcgtcgaacttcgccagccgggaccggaaggcacattcggcaacactgacgtgcccaagcaggacggcctgatccgctcgatctacaccggaccgcttgtgctcaacagcgactacacgccggaggaggctgccgcagacgtggcgtccggccgcgcggacgcgataagctttggccgcccgttcatctccaatcccgatctcgtcgagcgcatccgcgtgggcgcgcacctcaatccgaacaagggggtgcctgcaacgtggtatttcccgggcgaagcaggctataccgactatccgacactggccgaggaaacggccatagcctga

SEQ ID NO: 29763 - protein, 367 aa, Novosphingobium aromaticivorans DSM 12444
MHEPLFQPVRLGAIEAPNRIIMAPLTRGRANPQAVPTPIMGEYYRQRASAGLIISEATAISPEGAGWPSAPGIWTDEQTEAWKPIVDEVHAAGGRIVLQLWHMGRVVHPYFLGGEPPVSASATRAPGHAHTPEGTKDYETARPLRLDEIPRLIDDYGRAAENARKAGFDGVQLHAANGYLIDQFLRDGTNLRDDDYGGSPENRVRLMREVMERLISIWGKERVSIRLSPNGDSQGVDDSNPEATFGEAARVLEELGVGFVELRQPGPEGTFGNTDVPKQDGLIRSIYTGPLVLNSDYTPEEAAADVASGRADAISFGRPFISNPDLVERIRVGAHLNPNKGVPATWYFPGEAGYTDYPTLAEETAIA

SEQ ID NO: 29764 - DNA, 1077 bp, Methylobacillus flagellatus KT
  CDS (1)..(1077): transl_table=11
atgcctgctgatttattcagcccaaccaaattgggcagcatcgcactcaagaaccgcatcgtgatggcgccactgacccgcaaccgtgccggcaagggcaatgtgccacagcctatcaatgccgagtattatgcccagcgcgcttccgccgggctgatcatcaccgaggcgacaccgatttctcccactgcacatggctatcccgccacgccaggcatacacgagcccgagcaagtggagggctggaagctggtgacgaaggccgtccatgacaaggggggcaagatcgtgctgcagctctggcatgtaggccgtatctcgcacccgtccctgcagcctggcaatgccctgcccgtagcaccttcggccatcaagccggcagggcaggcctttacctacgagggcttgcaggatttcgtcacgccgcgtgcattggcgattgaggagctgccgggcatcgttgcagattatgcgcaggctacgcgcaacgcactcgaagccggtttcgacggggtcgagattcatgctgctaatggctacctgctagaccagttcctgcgcgacagcaccaaccgccgtaccgatgagtatggtggcagtatcgagaaccgcacccgtctgttgttggaagtgacccaggccgtggtcgatgtggctggtgcggaccgtgttggggtgcgcatttcgccgctgaatccattcaatgacatcagcgattccaatccgcaggccttgttcaaccatgtggctgacagcctcagtccgtttggactggcttatcttcatgtcgtcgagggcggaatgggcggcggggatataccgccattcgatttctccgctttgcgtcgacacttcaagggcggctatattgccaaccttggctacgacaaggccaagggcaatgccgccattgcctcgggccatgccgatgcagtggcctacggcagcttgtacattgccaatcctgacctggtggagcgattccagcaggatgcgccattgaatacgcctgaccaggcgacgttctatggcggggatgccaagggctataccgattacccaactttacaaggataa

SEQ ID NO: 29765 - protein, 358 aa, Methylobacillus flagellatus KT
MPADLFSPTKLGSIALKNRIVMAPLTRNRAGKGNVPQPINAEYYAQRASAGLIITEATPISPTAHGYPATPGIHEPEQVEGWKLVTKAVHDKGGKIVLQLWHVGRISHPSLQPGNALPVAPSAIKPAGQAFTYEGLQDFVTPRALAIEELPGIVADYAQATRNALEAGFDGVEIHAANGYLLDQFLRDSTNRRTDEYGGSIENRTRLLLEVTQAVVDVAGADRVGVRISPLNPFNDISDSNPQALFNHVADSLSPFGLAYLHVVEGGMGGGDIPPFDFSALRRHFKGGYIANLGYDKAKGNAAIASGHADAVAYGSLYIANPDLVERFQQDAPLNTPDQATFYGGDAKGYTDYPTLQG

SEQ ID NO: 29766 - DNA, 1062 bp, Burkholderia xenovorans LB400
  CDS (1)..(1062): transl_table=11
atgccgactcttttcgatccgctgcaaattggtgacatcacgctgccgaaccgcatcatcatggcgccgctcacacgccagcgcgccggagaaatccgcgtgcccaacgcgctgatggcgaagtactacgctgaacgcgcaacggccggtctgatcatcagcgaggcgacctcggtgacgccgcaaggcgtgggttatgccgacacgccgggcatctggtcgcaggaacaggttgaaggctggaagctcgtgacgagcgccgtgcatgcggccggcggcaggatctttctgcaactgtggcacgtgggccgtatttccgacccgctgttcctgaacggcgaactgccggtcgcgccgagcgcgatcgccgcacagggccacgtgagcctggtgcgtccggaacgtgcctacgtgacgccgcgcgcactggaactcgatgaaatcgccggcgtggtcgaagcattccgcaaaggcgcggaaaacgccaaagcggccggtttcgacggcgtcgaagtgcacggcgccaacggctatctgctcgaccagttcctgcaggacagcaccaacaaacgtaccgacgcctacggcggcccgatcgaaaaccgcgcccgtctgctgctcgaagtgaccgacgcgtgcatcggcgtgtggggcgcgaaccgtgtcggcgtacacctcgcgccgcgccgcgattcgcacactatgggtgactccgatccggccggcaccttcggctatgtggctcgcgagctcggcaagcgcaagatcgcattcattgccgcacgtgaagcgctcggcgacgaccgtctcggcccgcaactgaagaaggcattcggcggcccgtacatcgccaacgaaaagttcaccacggaaaccgcgcaacaggtgctcgacgcgggtgaggcagatgcggtggcctggggtcagctgttcatcgcgaacccggatctggtgcgccgcttcgccacgaatgcgccgttgaacaagccgaatccggcaacctattacgcgcgcggcgaaaccggctatgtggattatccgacgctggaaaccgtggaataa

SEQ ID NO: 29767 - protein, 353 aa, Burkholderia xenovorans LB400
MPTLFDPLQIGDITLPNRIIMAPLTRQRAGEIRVPNALMAKYYAERATAGLIISEATSVTPQGVGYADTPGIWSQEQVEGWKLVTSAVHAAGGRIFLQLWHVGRISDPLFLNGELPVAPSAIAAQGHVSLVRPERAYVTPRALELDEIAGVVEAFRKGAENAKAAGFDGVEVHGANGYLLDQFLQDSTNKRTDAYGGPIENRARLLLEVTDACIGVWGANRVGVHLAPRRDSHTMGDSDPAGTFGYVARELGKRKIAFIAAREALGDDRLGPQLKKAFGGPYIANEKFTTETAQQVLDAGEADAVAWGQLFIANPDLVRRFATNAPLNKPNPATYYARGETGYVDYPTLETVE

SEQ ID NO: 29768 - DNA, 1116 bp, Burkholderia xenovorans LB400
  CDS (1)..(1116): transl_table=11
atgtcaactgattccgcgcgtatagatagttacctgttcgaacccgtcgagctgggaccgctgcaattgcccaatcgcatcgtgatggcgccgctcacgcgcagccgcgcgaaagagggcgatgtgccgggcgagctggccattgagtactacgcgcagcgtgcgtcggcgggtctcatcattgctgaggcgacgcagatttcgccgcagggcaaaggctatgtgttcacgcccggcatttacaacgacgcccaggtgcaggcgtggaagcgcattaccggcgccgtgcacgagaagggcgggcgcatctttctgcaactgtggcatgtgggccgcatttcgcacccgtcgctgcagccgggcaacgcgctgccggtcgcgccctcggcgatcaagcccgaaggccaggcttatacgaacgaaggctttgtgccgctcgtcacacctcgcgcgctcgaaacttcggagatagctggcattgtcgagcaataccgcgttgctgcgcaaaacgcgaaggcagcgggtttcgacggcgtggagattcatgcggccaatggctacctgctcgaccagttcctgcgcgacaagaccaatcggcgcaccgatcaatatggcggctcgatcgggaatcgcgcgcgcctgctgctcgaagtggccgatgccgtgaccggcgtatggggcagcgaccgggtgggcgtgcggatttcgccgctcagcagttttggcgatattgccgatagcaatcccgagccgctgttcacgtatgtcgtgcagcaactgagcgcgcgcaagctggtgtatctgcatgtgatcgaaggcgacacgggcggcccgcgcgacgtgccgggcggcttcgacctgcaggttctgcgcgaggcgttcgacggcctgttcatggccaacaacggctacgacatggaactcgcgcaacgaacgctcaaggcgaagcgggctgatctgatcgccttcggccggcccttcatttccaaccccgatctggtggcgcggctcaggagcggtgcaccgctgaacgagccggataaagacacgatgtacggcggcggcgccgaagggtatatcgattacccgactatggagcaggaggcgaagcgctga

SEQ ID NO: 29769 - protein, 371 aa, Burkholderia xenovorans LB400
MSTDSARIDSYLFEPVELGPLQLPNRIVMAPLTRSRAKEGDVPGELAIEYYAQRASAGLIIAEATQISPQGKGYVFTPGIYNDAQVQAWKRITGAVHEKGGRIFLQLWHVGRISHPSLQPGNALPVAPSAIKPEGQAYTNEGFVPLVTPRALETSEIAGIVEQYRVAAQNAKAAGFDGVEIHAANGYLLDQFLRDKTNRRTDQYGGSIGNRARLLLEVADAVTGVWGSDRVGVRISPLSSFGDIADSNPEPLFTYVVQQLSARKLVYLHVIEGDTGGPRDVPGGFDLQVLREAFDGLFMANNGYDMELAQRTLKAKRADLIAFGRPFISNPDLVARLRSGAPLNEPDKDTMYGGGAEGYIDYPTMEQEAKR

SEQ ID NO: 29770 - DNA, 1122 bp, Ralstonia metallidurans CH34
  CDS (1)..(1122): transl_table=11
atgatgaccagcaccagcaatccgctgttccagccgtattcgctcggccccctctcgctgcccaaccgcatcgtgatgccaccgatgacgcgctcgcgcgccagccagcccggtgacgtgcccaatgcgctgatggccgagtactacgcgcaacgcgccagcgccggcctgatcgtcagcgaaggcacgtggatctcgccgctcggcagggggtatgcgtggacccccggcattcacacgccggagcaggtcgccggctggcgcaaagtcaccactgccgtccatcaggccggcgggcgcatcttcgcgcagctctggcacgttggccgcctgagccatatcagcctgctggatggccatgcgccggtatcgtcgtcagccatccaggcgcagggcgtgaacgtgttcgtcgcgcaaagcgatggcaagcccggcttcgcccaggcgtcgcagccacgcgcgctgtcggtggaggaaatccacgccatcgtcgacgactttcgccaggccgcgcgcaatgccatggcggcgggcttcgacggtgtggaactgcacgcggccaatggctatctggtcaaccagttcatcgactcgggcgccaacgatcgcaccgacgaatacggcggttcgctggaaaaccggctgcgctttctgggcgaggtggcacaggcgctgatcgaaggcacgggtggcaaagaccgcgtcggcatccgtctggcgccgctgaccacgctgaatggttgcgtcgatgccgatcccgagactacctataccgctgcggccaggttgctcggcgagatcggcgtgggctacatccatatcgcggaagcagactgggaagatgccccgcatatgccgacggccttcaagcagcaactgcgcaaggtctatccgggcacgctgatctacgccggcaagtacacggcggcgcgcgcccaggctgcattgcacgaaggatgggccgacctgatcgcgtttggccgcccgttcgtggccaaccccgatctgccggagcgcctgcgcaccggcgccaccctcaacgcccacgatcgcgacacgctgttcggcggcgacgcgcgtggcctgaccgactatccgccacttgttgccaaggcggcctga

SEQ ID NO: 29771 - protein, 373 aa, Ralstonia metallidurans CH34
MMTSTSNPLFQPYSLGPLSLPNRIVMPPMTRSRASQPGDVPNALMAEYYAQRASAGLIVSEGTWISPLGRGYAWTPGIHTPEQVAGWRKVTTAVHQAGGRIFAQLWHVGRLSHISLLDGHAPVSSSAIQAQGVNVFVAQSDGKPGFAQASQPRALSVEEIHAIVDDFRQAARNAMAAGFDGVELHAANGYLVNQFIDSGANDRTDEYGGSLENRLRFLGEVAQALIEGTGGKDRVGIRLAPLTTLNGCVDADPETTYTAAARLLGEIGVGYIHIAEADWEDAPHMPTAFKQQLRKVYPGTLIYAGKYTAARAQAALHEGWADLIAFGRPFVANPDLPERLRTGATLNAHDRDTLFGGDARGLTDYPPLVAKAA

SEQ ID NO: 29772 - DNA, 1101 bp, Silicibacter sp. TM1040
  CDS (1)..(1101): transl_table=11
atgaccaccctttttgaccccataaaagtgggcgcgctttcgcttccgtcccggattgccatggctccaatgacgcgcagccggacggaccagcccggaaacctccccaacgacatgatggcggcgtattatgctcaacgggccagtgccgggcttatcatcacagaagccacccagatcagccgccaaggacaaggctattccttcacgccgggcattcattccgatgatcaggtcgcaggatggcgcgtggttacgcaggcggttcatgaggcaggcggacgcattgtgaaccagctctggcatgttggccggatgggccacggaatgttccatgccgatgggctgcctgtcgccccttcggcgatagcaccagatgcaagcgtgtgggtcgtcgatcccaaaaccaacagggccggcatggtggaatgcccggtgccacgtgcgctgaagacgaccgagatcgcggaggttgttgcggactatgctgcggctgcgcgcaatgcaaaggtggccgggtttgatggcgtcgagatccacgcagccaatgggtatctgattgatgcgttcttacgttccagttcgaacaaacggcaggaccgctacggtggcagcgtgcagaaccgcatccggtttgccatcgaggtggtcgaggccgtcgcagcggaaatcggtgcggatcgcgtcgggctgcggatctcgccttttatcacccagcgtggaatggacgatcccagcgcgcccgagacgattcttgagatggccaaagcgctggcgcgtatcgggatcgcctatatccatatcgccgaggccgattgggatgatgctcctgaaacaccgcgcgcctttcgcgcggctctgcgtgaggtgttttccggcagcatccttgtcgccggaggctacgacaaagaaagggccaaggtgatcttggacgctggtctggcggatgtggtggcctttggtcgtgcgttcgtcgccaaccccgatctgccgcatcgctttgcccaggatttgccgctgtccgcatttgacagcgagacgctttttggcggcgatcatcagggctatacaacctatgggccctatgcgccgggagcttga

SEQ ID NO: 29773 - protein, 366 aa, Silicibacter sp. TM1040
MTTLFDPIKVGALSLPSRIAMAPMTRSRTDQPGNLPNDMMAAYYAQRASAGLIITEATQISRQGQGYSFTPGIHSDDQVAGWRVVTQAVHEAGGRIVNQLWHVGRMGHGMFHADGLPVAPSAIAPDASVWVVDPKTNRAGMVECPVPRALKTTEIAEVVADYAAAARNAKVAGFDGVEIHAANGYLIDAFLRSSSNKRQDRYGGSVQNRIRFAIEVVEAVAAEIGADRVGLRISPFITQRGMDDPSAPETILEMAKALARIGIAYIHIAEADWDDAPETPRAFRAALREVFSGSILVAGGYDKERAKVILDAGLADVVAFGRAFVANPDLPHRFAQDLPLSAFDSETLFGGDHQGYTTYGPYAPGA

SEQ ID NO: 29774 - DNA, 1086 bp, Myxococcus xanthus DK 1622
  CDS (1)..(1086): transl_table=11
atgaccgacctgttcgcgcccctcgagctccgaaagagtgtcatcgcgcccaaccgcatctggctggcgcccctgacgaacacccagagccatcccgatggcacgctctccgacgcggagcttcgcttcctcgcgatgcgcgccgatggcgggttcggcatggtggagacgtgcgccgcctacgtttcccaggacggcaagacgtggccgggcgagctgggcgttcacgacgacgcgatgctgcccggactgaagcgaatggccgcgcgcatccatgaagggggcgccctgctctccgcgcagctcttccacggaggacttcgcgccaacgccgaggtcagccagcgcgaggtgtggagcgccagcgcgtatgacgcggacggcctccactgccgcgaagccaccgaggccgacatcgagggcgtcatcgcggccttcgcgaacgcggcgcgccgctgcgccgaggcggggttcgacgccgtggaactccatggggcgcacggctacctattctcgcagttcctgagcaccgtcttcaaccgccggcaggaccgatggggcggctcgctggagaaccgctggcgcctccttcaggagacagtccgcgcggtgcggcgcgcggcgccctccctggtcctcgccgtgcgcctgtcgccggaggacgcgaggcaggccaggggcctggacctggacgagtcgctggaggtcgcgcgcatgctcacgcgcgagggcgtggacatcctccacctgtccctgtggaaggcggcccacaacaccctgaagcggccggaccagcacgcgacgccgctcttccggcaggccgtgggcaccggtgtccgcatcgtggtcgcgggcgaggtgcgcacgcgcgaggaggcagaggcccagctcgcgcgcggggcggatgccgtggccgtgggccgagcggccatcgcgaaccatgactggccgcgccgcgtgcagcgaggcgacgcgctccaggtgccgccgctgtcccccaccacgctcaacgccgagggcctgtccgacgtcttcgtgaactacatgcgcaactggcgcggcttcgtgacggaccaaccggcctga

SEQ ID NO: 29775 - protein, 361 aa, Myxococcus xanthus DK 1622
MTDLFAPLELRKSVIAPNRIWLAPLTNTQSHPDGTLSDAELRFLAMRADGGFGMVETCAAYVSQDGKTWPGELGVHDDAMLPGLKRMAARIHEGGALLSAQLFHGGLRANAEVSQREVWSASAYDADGLHCREATEADIEGVIAAFANAARRCAEAGFDAVELHGAHGYLFSQFLSTVFNRRQDRWGGSLENRWRLLQETVRAVRRAAPSLVLAVRLSPEDARQARGLDLDESLEVARMLTREGVDILHLSLWKAAHNTLKRPDQHATPLFRQAVGTGVRIVVAGEVRTREEAEAQLARGADAVAVGRAAIANHDWPRRVQRGDALQVPPLSPTTLNAEGLSDVFVNYMRNWRGFVTDQPA

SEQ ID NO: 29776 - DNA, 1089 bp, Cytophaga hutchinsonii ATCC 33406
  CDS (1)..(1089): transl_table=11
atgaaaacatctaacctatttgaacccttgaaaattggttctatctctttaaagaacagcattgtaatggcgccgatgacgcgttgcagagctataggcaatattcccaacgacttgatggcaacctattatggtcagcgtgcaaccgcagggcttattattaccgaaggagcgtctccttcaccaaacggtttgggttatgcgcgcataccgggtattttcaacaaagagcaggttgaaggctggaaaaaaataactacggcggtacatgataaaggcggtaaaattgtaatacagctgatgcataccggccgtatcagtcacccggctaatatgcctgaaggcgcaagcattttatcggcatcttcggtaaagcctggcggacaaatgtggactgactcgttacagatgcaggattatccgattccaaaaaccatgacggtagaagaaattttacagaccaaagaagaatttgtaacggctgctaaaaacgcgatcgaagcaggttttgatggtgttgaattgcacggtgcgaacggttatttactggaacagtttatctctccgcataccaacatgcgcggcgatgagtacggcggcggtattgacagacggtgtaaatttgtgctggatgttgttgaagcggttgcagcagcaatcggcaaagacaaaacaggtatccggctttctccatatggcgttgccagtgatatgcctccgtatccggatattgaagtaacatatgaatacctggccctagcattaaacgatttaggtattgactatatccacgtggtagatcattccgcgataggtgcgcctgcagtgccgttaagtatcaaagaaaaaatccgtgccgggtttagcaataccattattctttgcggcggctttgatcaggctgctgctgaaagagcaatagacaccggacttacaaatgccgtggcttttggacgaccgtttataaacaatcccgatctggttgaacgtttaaaaaataatcagccattgtctgataaactgaatacagatgcattctattcagcagatgaaaaaggatacacggattatccggtgtttggtggttaa

SEQ ID NO: 29777 - protein, 362 aa, Cytophaga hutchinsonii ATCC 33406
MKTSNLFEPLKIGSISLKNSIVMAPMTRCRAIGNIPNDLMATYYGQRATAGLIITEGASPSPNGLGYARIPGIFNKEQVEGWKKITTAVHDKGGKIVIQLMHTGRISHPANMPEGASILSASSVKPGGQMWTDSLQMQDYPIPKTMTVEEILQTKEEFVTAAKNAIEAGFDGVELHGANGYLLEQFISPHTNMRGDEYGGGIDRRCKFVLDVVEAVAAAIGKDKTGIRLSPYGVASDMPPYPDIEVTYEYLALALNDLGIDYIHVVDHSAIGAPAVPLSIKEKIRAGFSNTIILCGGFDQAAAERAIDTGLTNAVAFGRPFINNPDLVERLKNNQPLSDKLNTDAFYSADEKGYTDYPVFGG

SEQ ID NO: 29778 - DNA, 1056 bp, Rhodococcus sp. RHA1
  CDS (1)..(1056): transl_table=11
ttgacactcggcgaactcgaactgcccaatcgggtcgtgatggcacccctgacccgcgtccgctccgggcgtgacggtgtgcccggaccgctggtggtcgagcactaccgtcagcgggcctctctcggtctgatcgtcggtgaaggcacctaccccagccacgccggccagggcttccccggccagcccgggctggtgacacccccgcaggttgcgggctggaagaacgtcgccgacgccgtgcatggagccggtggacggatcgtcgcccaggtcatgcacgccggccgcgtcacgcacgagggaaccaccggcggtcacgaggtagtcggcccgagcgccgtcgccatcgacggtgagacccgcacatacgaggggaaggagccgtacccggtgccccgcgcgctgcgtaccgaggaacttcccgccgtcatcgaggagttcgtccaggcgtcgcggaacgcggtggcagccgggatggacggggtcgaaatccacgccgccaacggctacctgctgcacgaattcctctccccggcgtccaacctgcgtgaggacgcgtacggcggctcccccacgaaccgggcacgcttcgtcgtcgaggtggtcgaggccgtggccgacgccatcggcgcaggccgggtgggtatccgcatctcacccgaacacaacatccaggacgccctggaactggacgccgacgacgttcgggccacctacggcgcgctggtcgacgccattgctccgttgaagcccgcctacctgagcattctgcacaaggacccgtccgggccccttgcgcaggacctgcggacgcgcttcggcggtccggtgctgatcaacagtggtttcggagcagtcaccacccgcgacgaggcgctggccatcctcgacgacggccacgccgatgccgtcgtcgtcgggcgtcccgcgatcgccaacccggatctcgtgcggcgctggcaggaagacctgccgctcaacaccccggaccccgagaccttctactcggaaggcgcgaagggctacaccgactacccggtgttgcagcactga

SEQ ID NO: 29779 - protein, 351 aa, Rhodococcus sp. RHA1
MTLGELELPNRVVMAPLTRVRSGRDGVPGPLVVEHYRQRASLGLIVGEGTYPSHAGQGFPGQPGLVTPPQVAGWKNVADAVHGAGGRIVAQVMHAGRVTHEGTTGGHEVVGPSAVAIDGETRTYEGKEPYPVPRALRTEELPAVIEEFVQASRNAVAAGMDGVEIHAANGYLLHEFLSPASNLREDAYGGSPTNRARFVVEVVEAVADAIGAGRVGIRISPEHNIQDALELDADDVRATYGALVDAIAPLKPAYLSILHKDPSGPLAQDLRTRFGGPVLINSGFGAVTTRDEALAILDDGHADAVVVGRPAIANPDLVRRWQEDLPLNTPDPETFYSEGAKGYTDYPVLQH

SEQ ID NO: 29780 - DNA, 1128 bp, Trichodesmium erythraeum IMS101
  CDS (1)..(1128): transl_table=11
gtgaatcaactaaaaatacttgaaccatttacactaggagatttacaattacctaatcgaattgtaatggcacctttaaccagaagacgtgctgatattaataatgctcctaccccattaaatgccttatattatagtcaaagatcttctgctggtttaattattagtgaagctagtcaaatttctccccaaggtacaagtttaccaaaaactcccggaatttatagccaaaagcaaattgaagggtggcaactggtcacaaaagccgtacacaattctggtggtagaatttttatacaattatggcatggtggacgatgttcccatccttctttacaacctaatggagaattacctgttgcacctagcgcgagggccccgatagaggaaaaagccttaacagcacaggaaaaagaagtcccttttgttaatccaagaagtcttttaaccacagaaatacctgaaattattgctcaatatcgtcaaggagcgataaatgctttagaagcaggtgctgatggtgtagaaattcatggtgcaaatggttatttactagatcagtttttacaagataatagtaatcaacgcactgataaatatggtggaagtatcgaaaaccgtagtcgtttactcttagaagtaactcaagcagtaacagaagtttggggctcgcagcgtgtaggaatacgtctttctcctagtagtacctatcaagatatgtatgattctaacccagaggctttatttaattatatagtaagcaaaatcgatcagtttaatttagcttatcttcatattgttgagcctcgaataaaaggcagtcacgatgatttaactgaaaagaaattacaacttggagttaaacatttccgccctttatatagtggaaatttaatgacagctggaggttatacccgcgatctaggagaagagataattagtcaaggttatactgatttagtagcttatggaaggctatttattgctaatcccgatctacctaaacgttttgccttaaatgcaccattaaatccttattatcgtcctacttttacgggaggaaatgagataggatatactgattatccttttctatcaattgatacacttgccaagaatataatttga

SEQ ID NO: 29781 - protein, 375 aa, Trichodesmium erythraeum IMS101
MNQLKILEPFTLGDLQLPNRIVMAPLTRRRADINNAPTPLNALYYSQRSSAGLIISEASQISPQGTSLPKTPGIYSQKQIEGWQLVTKAVHNSGGRIFIQLWHGGRCSHPSLQPNGELPVAPSARAPIEEKALTAQEKEVPFVNPRSLLTTEIPEIIAQYRQGAINALEAGADGVEIHGANGYLLDQFLQDNSNQRTDKYGGSIENRSRLLLEVTQAVTEVWGSQRVGIRLSPSSTYQDMYDSNPEALFNYIVSKIDQFNLAYLHIVEPRIKGSHDDLTEKKLQLGVKHFRPLYSGNLMTAGGYTRDLGEEIISQGYTDLVAYGRLFIANPDLPKRFALNAPLNPYYRPTFTGGNEIGYTDYPFLSIDTLAKNII

SEQ ID NO: 29782 - DNA, 1125 bp, Rhizobium leguminosarum bv. viciae 3841
  CDS (1)..(1125): transl_table=11
atggtcaagctcttcgaacccacgaaagtcggcgacatatccgtcaagaaccgcatcgtcatggcgccgctcacccgtaaccgctcgccgggcgcaatccccaacgacctcaacgtcgaatattaccgtcagcgcgctaccgctggcctgatcatcaccgaagcaaccgcgatcacccatcagggccagggctatgccaacgtgccgggcctctatagcaaagaggctctcgacggctggaagcgcgtcaccgacgccgttcacgcagccggtggcaagatcgtcgtccagatgtggcatgtcggccgtatctcgcacacgacgctgcagccgaacgacggcaagccggtttcatcgaccaaccggatcgccaaggccaagacctatctggtcaatgccgacggcaccggcagctttgccgacacctccgagccgcgcgcgctcgaaaccgccgaaattcccggcatcatcgaggattatcgcaaggctgcccgtgcggcgatcgacgccggcttcgacggtgtcgagatccacggcgccaacggctacctgctcgaccagtttatccgcgacggtatcaacgaccgcaccgaccaatatggcggctcgatcgaaaaccgcacccgtctgaccttcgaagtcgtcgacgccgtggtcaaggaaatcggcgccggccgcaccgcaatccgcatctcgccggtcacgccgtccggcgaaagctacgattccaatccgcaagcgaccttcacccacgtcgtcgaagaactggccaaatacgatctcgcctatatccatgtcatcgaaggccagaccggcggcgaccgcgactacaggcagggcgacaatccctccttcgattacaaggcgctgtgccagacttatgaaaaggccggcggcaaggccgactggatggtcaacaatggctacgatcgcgatctggcgatcgacgccgtcgaaagcggccgcgccgatctcgtcgccttcggcaagcccttcatcgccaatcccgatctcgtcgagcgcctggtacacaacctgccgctcaacacgcccgaccagtcgaccttctatggcggcaccggcaagggctatatcgactatcccattctcgaaaaggtcgcctga

SEQ ID NO: 29783 - protein, 374 aa, Rhizobium leguminosarum bv. viciae 3841
MVKLFEPTKVGDISVKNRIVMAPLTRNRSPGAIPNDLNVEYYRQRATAGLIITEATAITHQGQGYANVPGLYSKEALDGWKRVTDAVHAAGGKIVVQMWHVGRISHTTLQPNDGKPVSSTNRIAKAKTYLVNADGTGSFADTSEPRALETAEIPGIIEDYRKAARAAIDAGFDGVEIHGANGYLLDQFIRDGINDRTDQYGGSIENRTRLTFEVVDAVVKEIGAGRTAIRISPVTPSGESYDSNPQATFTHVVEELAKYDLAYIHVIEGQTGGDRDYRQGDNPSFDYKALCQTYEKAGGKADWMVNNGYDRDLAIDAVESGRADLVAFGKPFIANPDLVERLVHNLPLNTPDQSTFYGGTGKGYIDYPILEKVA

SEQ ID NO: 29784 - DNA, 1113 bp, Pseudomonas aeruginosa UCBPP-PA14
  CDS (1)..(1113): transl_table=11
atgctgttcagcccctatgcctttggccacctgaccctccccaatcgcatcgtcatgccgccgatgacccgttcccgagccgccagtggtgaagtcgccaccgcgctgatggccgagtactacagccagcgcgccggcgccggcctgatcgtttccgaaggcacccagatcagccggcagggccagggctacgcctggacaccgggcatccacagcgccgagcaggtcgccggctggcgccaggtcaccgacgcggtgcacgccgccggcgggcgcatcttcgcccagctctggcacgtcggcagggtctcgcacacctcgctgcaaccgggcaacgccgccccggtgtcctcctcggcgctggtggccgaaggcgtgaaggtcttcgtcgatccccagggccgcggagcgcaggccggcggcggcgagatggtccagcactcggcgccgcgtgcgctggccgtggaggaaatccgggagatcgtcgccgactatgcccaggccgcacgcaacgccctcgacgccggcttcgacggggtcgagctgcacggcgccaacggctacctgatcaaccagttcatcgactcccaggccaatgcgcgcaacgaccaatacggcggctcgctggagaaccgcctgcgcttcctccgcgaagtcgccgaggcggtcaccgcggtggtcggcagggagcgcatcggcgtgcgcctggcgccgctgaccaccctgcagggcgcggtcgacgacaccccgcaagccacctacctggccgcggcgcggctactggacgagatcggcgtggcctacatccacatcgccgaggccgactgggaagacgccccggccatgccggcggcgttcaaggaagcgttgcgcatcgtctaccgtggcagcctgatctactccggcatgtacaccaaggcgcgcgccgaggaagccctggccaagggctgggccgacctgatcggcttcggccggccgttcatcgccaaccctgacctgccctaccgcctggagcacgacctggcgctggccgacggcgaccgctcgacctacttcggtggcggcgccgccggctacaccgactacccgagcctgccgcaggcggccggttga

SEQ ID NO: 29785 - protein, 370 aa, Pseudomonas aeruginosa UCBPP-PA14
MLFSPYAFGHLTLPNRIVMPPMTRSRAASGEVATALMAEYYSQRAGAGLIVSEGTQISRQGQGYAWTPGIHSAEQVAGWRQVTDAVHAAGGRIFAQLWHVGRVSHTSLQPGNAAPVSSSALVAEGVKVFVDPQGRGAQAGGGEMVQHSAPRALAVEEIREIVADYAQAARNALDAGFDGVELHGANGYLINQFIDSQANARNDQYGGSLENRLRFLREVAEAVTAVVGRERIGVRLAPLTTLQGAVDDTPQATYLAAARLLDEIGVAYIHIAEADWEDAPAMPAAFKEALRIVYRGSLIYSGMYTKARAEEALAKGWADLIGFGRPFIANPDLPYRLEHDLALADGDRSTYFGGGAAGYTDYPSLPQAAG

SEQ ID NO: 29786 - DNA, 1053 bp, Pseudomonas aeruginosa UCBPP-PA14
  CDS (1)..(1053): transl_table=11
atggctactctgttcgatcccatcgtgctcggcgacctcgagctgcccaaccgcatcgtcatggcgccgctgacccgctgccgcgccgatgaaggccgcgtgcccaacgccctgatggccgagtactacgcccagcgcgccgatgccggcctgatcctcagcgaggccaccgcggtcacgccgatgggcgtgggctatcccgacacccccggcatctggtccgatgaccaggtccgtggctggagcaacgtgaccaaggcggtgcacgccgccggcgggcgcatcttcctgcaactctggcacgtcgggcggatttccgacccgctctacctgaatggcgagctgccggtggcgccgagcgccatcgccgccgaggggcacgtcagcctggtgcgcccgaagcgtccctacgtcaccccgcgcgcgctggacaccgaggagatcgccgacatcgtcgaggcctaccgccagggcgccgagcgggccaaggccgccggcttcgacggcgtggagatccacggcgccaacggctacctgctcgaccagttcctccaggacagcaccaacaagcgcaccgaccgctacggcggctccatcgagaaccgcgcgcgcctgctgctggaagtcaccgacgcggcgatctccgtatggggcgcccagcgcgtcggcgtacacctggcgccgcgtgccgactcccacgacatgggcgattccaaccgcctggaaaccttcagccatgtcgcccgtgagctgggcaagcgcggcatcgccttcatctgcgcccgcgaagcgcaggccgacgacagcatcggcgtagccctgaagaaagccttcggcggaccctacatcgccaacgagcagttcaccctcgacagcgccaacgccatcctggccaagggcgacgccgatgcggtggccttcggcgtccccttcatcgccaacccggacctggtcgaacgcctgcgccagggcgccgaactgaacccgccgcgcccggaaaccttctataccggcggtaccgaaggctacctggactatccgaccctggcctga

SEQ ID NO: 29787 - protein, 350 aa, Pseudomonas aeruginosa UCBPP-PA14
MATLFDPIVLGDLELPNRIVMAPLTRCRADEGRVPNALMAEYYAQRADAGLILSEATAVTPMGVGYPDTPGIWSDDQVRGWSNVTKAVHAAGGRIFLQLWHVGRISDPLYLNGELPVAPSAIAAEGHVSLVRPKRPYVTPRALDTEEIADIVEAYRQGAERAKAAGFDGVEIHGANGYLLDQFLQDSTNKRTDRYGGSIENRARLLLEVTDAAISVWGAQRVGVHLAPRADSHDMGDSNRLETFSHVARELGKRGIAFICAREAQADDSIGVALKKAFGGPYIANEQFTLDSANAILAKGDADAVAFGVPFIANPDLVERLRQGAELNPPRPETFYTGGTEGYLDYPTLA

SEQ ID NO: 29788 - DNA, 1137 bp, Solibacter usitatus Ellin6076
  CDS (1)..(1137): transl_table=11
atgcggccgaacgaaggctgggaaggagtatggagcagttatcttactgttaggagcgggagcacttgcgatactgaacagatgctgctcacgccactgacccttcgcgaagttaccctgcggaatcgtatcggagtttccccgatgtgccagtactcctcagaagatggattcttcaatgactggcacctggtacatttaggcagccgtgccgccggaggcgccgggctggtgtgcacggaggccaccgcggtggtgccggaaggccgcatttcgccgcacgacgccggtatctggaaggacgagcatatcgagtttctgacgcggatcacggcgtttctgcatcggcacagcgcggtggccggaatccagctggcgcacgccggacgcaaggccagtgtgcggcgtccgtgggaaggcggcacggcgattcgcgagtccgagggcggatggcaggcggtcgcgcccagcgagattcccttccgcgatacagaccccacgccgcacgcgctctcggccggcgagattcagggattggtggaggctttcgcaaaggccgcgcggcgcgcgctacaggcgggcttcgacgtggtggagattcacggcgcgcacgggtatttgatccacgaattctgctcgccgctgagcaaccagcgcaccgatcaatacggcggctcgcttgttaaccggatccgcttcgcgctcgaagtcacggaggcggtgcgcagcgtttggccggcgggtctgccggtgctctaccgcatctccgccacggattgggtggaaggcggctggtcgcccgacgattcggtggaactggcgcgggcgctgaaggcgaggggcgtggacctgatagattgctcgtcgggcggcaactcgacggcgcagaagatcccgctggttccgggataccaggttccgtatgcggagaagattcgccgcgaagccgaaataccgaccgcggcggtcgggatgatcacgacggcggagcaggccgagggaattgtgagcgaggggaaggccgacctggtgctgctggcgcgggaatttctgagggacccttacttcccgctgcatgcagccgcggagcttggggaaaaaccctctccaccgctacagtacgcaagggcgttctag

SEQ ID NO: 29789 - protein, 378 aa, Solibacter usitatus Ellin6076
MRPNEGWEGVWSSYLTVRSGSTCDTEQMLLTPLTLREVTLRNRIGVSPMCQYSSEDGFFNDWHLVHLGSRAAGGAGLVCTEATAVVPEGRISPHDAGIWKDEHIEFLTRITAFLHRHSAVAGIQLAHAGRKASVRRPWEGGTAIRESEGGWQAVAPSEIPFRDTDPTPHALSAGEIQGLVEAFAKAARRALQAGFDVVEIHGAHGYLIHEFCSPLSNQRTDQYGGSLVNRIRFALEVTEAVRSVWPAGLPVLYRISATDWVEGGWSPDDSVELARALKARGVDLIDCSSGGNSTAQKIPLVPGYQVPYAEKIRREAEIPTAAVGMITTAEQAEGIVSEGKADLVLLAREFLRDPYFPLHAAAELGEKPSPPLQYARAF

SEQ ID NO: 29790 - DNA, 1074 bp, Magnetococcus sp. MC-1
  CDS (1)..(1074): transl_table=11
atgaaccatctgtttaaaccgctccgtattggtgatctggagttgccaaatcgtctgcttatggcgccgctcacccggtgccgggcggatgcccaacatgtgcccaccgctatgatggtcgactattatgcgcaacgcgccagtgccgggctgcttattaccgaggccaccatggtcatgcaaggttactcggccttttggcgtgaaccgggcatctactccgacgcccagatcgagggttggaaaaagattacccaggccgtacacgcaaagggggggcgcatcttcatgcaaatttggcacggaggacgcgcctgtcaccccttgttgaatgatggccgcgaggcggtagcaccctcgccactggctattgcccatgatgaggtccacaccccccagggcaaacaaccctatactctgcctagggccttgcgagatgacgaactgccggccattgtaaatgggtttgcccgtgcggcccgccatgcccgcgcagccgggtttgatggggtagaggtgcatggggccaatggctacctgctcgatcaatttctgcgggatggcagcaaccatcgcagcggtgcctatggtggctcggtggagaaccgcgcccgtttgttgttggaggtgattgaggcggtctccctagcctggggcagtgagcgggtggggctgcggatctctccccttaacagctttaacgatatgatcgacagcgatcctatggggttggcggagtggctggccaagcgactaaacgcctatccattggcctatctgcacctgatgcgtcgcgactttttgggtcaacaacagggagatgtggttcccctggtacggcagcactataagggcaccctgatcggtaatatgggttatgggggagaggaagccgaggcggctatcgcggcgggtcaactggatggggtggcctttgggagcgcctatctggccaatccagatctaccggagcgtctgcgctgcggggcgccattaaacacgcctgatcccaccactttttatacgcaaggggcggagggctacaccgattatccgacgctggcccaagggtaa

SEQ ID NO: 29791 - protein, 357 aa, Magnetococcus sp. MC-1
MNHLFKPLRIGDLELPNRLLMAPLTRCRADAQHVPTAMMVDYYAQRASAGLLITEATMVMQGYSAFWREPGIYSDAQIEGWKKITQAVHAKGGRIFMQIWHGGRACHPLLNDGREAVAPSPLAIAHDEVHTPQGKQPYTLPRALRDDELPAIVNGFARAARHARAAGFDGVEVHGANGYLLDQFLRDGSNHRSGAYGGSVENRARLLLEVIEAVSLAWGSERVGLRISPLNSFNDMIDSDPMGLAEWLAKRLNAYPLAYLHLMRRDFLGQQQGDVVPLVRQHYKGTLIGNMGYGGEEAEAAIAAGQLDGVAFGSAYLANPDLPERLRCGAPLNTPDPTTFYTQGAEGYTDYPTLAQG

SEQ ID NO: 29792 - DNA, 1134 bp, Mycobacterium smegmatis str. MC2 155
  CDS (1)..(1134): transl_table=11
atgaccaacacccatcccgcactgacctccgtacgcctcggcggcctcaagctcgacaaccgattcgccgtcgcgcccatgaccagggtgtccgcgaccgccgacggcgccccgaccgacgcgatggccggctattacgccgaattcgcccgcggcggtttcggtttggtgatcaccgagggcacctacaccgacaccacccacagccagggctacctcaaccagccgggactggccaccgacgcccacgctgccggttggcggcccgtgaccgacgccgtacacgccgcaggcgtgccgatcgtcgcgcaactcatgcacgcgggcgcgttgtcgcaggggaactcccacggcgtggagaccatcgcgccgtcggcggtggcaccgcgcggcacgatgctcgaagagtacggcggagcgggcacctggcccacgccgcgtgagatgagtgccgccgacatcgacgccgcgatcgcgggcttcgtcgacgccgctgtccgtgcccgcgccgcggggttcgacggcgtcgagatccacgctgccaacgggtatctgctcgaccagttcctcaccacctacaccaaccaccgcaccgatgagtacggcggcaccgtcgcccaccggatccgcctcgccgcgcagatctccgcggccgtccgcaccgcggtgggcgcggatttcctggtgggtgtgcgcctgtctcagaccaaggtcaacgacttcgagtaccggtggcccgggggagcacaggacgccgaggtgatcttcaccgcgctggccgcaaccgggatcgactacctgcacatcgccagtgagggacgcgatttcatcgacggggcccgcctcgacgacggccgcaccatcacggcgctggcacgccaggtcaccggtctgcccgtcatcgccaacggcgggatgcacgacacgacgcaggcggccggcgtgctcgacggcggtcacgccgacgtgctgtcgatcgggcgcggtgcgctggccaatccggatctgccacagcgggtttcctccggagccccactggagcggttcgaccacggcatgctctcgcccatggcgaccatcgtcaacgccgccgcgtggacggccgcccgccaccgcgaacgggtgccgcggtga

SEQ ID NO: 29793 - protein, 377 aa, Mycobacterium smegmatis str. MC2 155
MTNTHPALTSVRLGGLKLDNRFAVAPMTRVSATADGAPTDAMAGYYAEFARGGFGLVITEGTYTDTTHSQGYLNQPGLATDAHAAGWRPVTDAVHAAGVPIVAQLMHAGALSQGNSHGVETIAPSAVAPRGTMLEEYGGAGTWPTPREMSAADIDAAIAGFVDAAVRARAAGFDGVEIHAANGYLLDQFLTTYTNHRTDEYGGTVAHRIRLAAQISAAVRTAVGADFLVGVRLSQTKVNDFEYRWPGGAQDAEVIFTALAATGIDYLHIASEGRDFIDGARLDDGRTITALARQVTGLPVIANGGMHDTTQAAGVLDGGHADVLSIGRGALANPDLPQRVSSGAPLERFDHGMLSPMATIVNAAAWTAARHRERVPR

SEQ ID NO: 29794 - DNA, 1113 bp, Azoarcus sp. BH72
  CDS (1)..(1113): transl_table=11
atgacgaccctgttcgacccgatcgccgccggcgacctccagctcgccaaccgaatcgccatggcgccgctcacccgcaaccgtgccccgaatgcggtgccggccgcgatcaccgccacctactacgcccagcgcgccagcgcgggtctgctgatcagcgaggcaacggcgatcagccagcagggccagggttatgccgacgtgccgggcctgtatggcgccgaccagatcgcgggctggaagaaggtgaccgacgcggtgcacgcggccggcggcaggatcgtcgtccagctgtggcacgtgggccgcgtctcgcacacctcgctgcagcctggcggcgccgcgccggtggcaccgtcggccattgccgcccataccaagacctacatcatcgaagccgacggcaagggcagcttcgtgcccacctccaccccgcgcgcgctggatatcgaagagctgcccggcatcgtcgaagactaccggcgtgcagcccgcgccgcgatcgaagcgggcttcgacggcgtcgaagtgcacgccgccaacggctacctgatcgaccagttcctgcgcgccggcagcaaccagcgcaccgacgcctacggcggcagcatcgagaaccgcacccgcctgctggtggaggtgatggaagcgatcaccgccgagatcggcgccagccgcaccggcatccgcatctcgccggtcaccccggccaatgacatcgccgaccccgatccgcagccgctgttcacccacgtggtggagcaactcgcgcgctggccgctcgcctacgtccatgtcatcgaaggcgccaccgggggcgcgcgcgacttccagcagggcgaccagcccttcgactacgccgcgctgcgcgccgcctaccaggccgccggcggcaaggccgcgtggatggtgaacaacggctacacccgcgaactggcggaagcggcggtggcagaaggccgcgccgacatcgtcgccttcggcaaggcattcatctccaacccggacctcgtcgtgcgccttcgcgagaaggttgcgctgaatccgtgggacaccaccaccttctacggtggcggcgaaaagggctatctcgactatcccacgctgggctga

SEQ ID NO: 29795 - protein, 370 aa, Azoarcus sp. BH72
MTTLFDPIAAGDLQLANRIAMAPLTRNRAPNAVPAAITATYYAQRASAGLLISEATAISQQGQGYADVPGLYGADQIAGWKKVTDAVHAAGGRIVVQLWHVGRVSHTSLQPGGAAPVAPSAIAAHTKTYIIEADGKGSFVPTSTPRALDIEELPGIVEDYRRAARAAIEAGFDGVEVHAANGYLIDQFLRAGSNQRTDAYGGSIENRTRLLVEVMEAITAEIGASRTGIRISPVTPANDIADPDPQPLFTHVVEQLARWPLAYVHVIEGATGGARDFQQGDQPFDYAALRAAYQAAGGKAAWMVNNGYTRELAEAAVAEGRADIVAFGKAFISNPDLVVRLREKVALNPWDTTTFYGGGEKGYLDYPTLG

SEQ ID NO: 29796 - DNA, 1125 bp, Acidovorax sp. JS42
  CDS (1)..(1125): transl_table=11
atgcccactctgttcgatcccatccaggccggtgacctgcacctggccaaccgtatcgccatggcgccgctgacgcgcaaccgctcgccccgggccgtgccgcgcgacatcaccgccacctactacgcccagcgcgccagcgccggcctgctgatcaccgagggcacggccatcacccaccagggccagggctattccgacgtgccagggctgtacggcaccgagcaactggacggctggaagcgcgttacccaggccgtgcatgcacgtggcggcaagatcgtcacccagctgtggcacgtggggcgcgtgtcgcacactgccctgcagccggagggcggcgcacccgtggcgccgtcggccgtgcgcgcgcaatcgcagacctacttggtggacgcggccagcggccagggccaattcgtgcccacgtccgagccccgcgcgctggcggccgaggaactgccggacatcgtgcatgccttcgccgccgccgcgcgcaacgcggtgcagacggcgggctttgacggcgtggagatccacggcgccaacggctacctgctggaccagttcctcaaggacggcgccaaccagcgcaaggacgactacggcggcggcatcgccaaccgcgtgcgcctgatggtggaggtgacgcgcgccgtggtggacgccatcggcgggggccgcgtgggcattcgtctctcgcccgtcacgcccgccaacgacatccgcgacagcgacccgcagccgctgtttgaacacctggcacgcgagctggcgccgctgggcctggccttcatccacgtgatcgagggcgccaccggcggcccgcgcgaggtggaaggccgccccttcgactacgccgcgttcaagaacgcctaccgcagcgcgggcgggcgcggcgcctggatggtgaacaacggctacgaccgcgacatggcccaggaggcgctggccagcggccgcgccgacatcgtggcctttggccgcgcgttcatctccaaccccgacctggtggagcgcctgcggcggggcgccccgctcaacgcctgggacaaaaccacgttctacggcggcggcgagcacggctacatcgactaccccgcgctggagcaggtcccggcctga

SEQ ID NO: 29797 - protein, 374 aa, Acidovorax sp. JS42
MPTLFDPIQAGDLHLANRIAMAPLTRNRSPRAVPRDITATYYAQRASAGLLITEGTAITHQGQGYSDVPGLYGTEQLDGWKRVTQAVHARGGKIVTQLWHVGRVSHTALQPEGGAPVAPSAVRAQSQTYLVDAASGQGQFVPTSEPRALAAEELPDIVHAFAAAARNAVQTAGFDGVEIHGANGYLLDQFLKDGANQRKDDYGGGIANRVRLMVEVTRAVVDAIGGGRVGIRLSPVTPANDIRDSDPQPLFEHLARELAPLGLAFIHVIEGATGGPREVEGRPFDYAAFKNAYRSAGGRGAWMVNNGYDRDMAQEALASGRADIVAFGRAFISNPDLVERLRRGAPLNAWDKTTFYGGGEHGYIDYPALEQVPA

SEQ ID NO: 29798 - DNA, 1113 bp, Nostoc punctiforme PCC 73102
  CDS (1)..(1113): transl_table=11
atgactactgagatcaatttattctcttcttaccaattagggaatttggaactccctaaccgaattgtgatggcacccttaacccgaaaccgagccagtaagggaaacgtgccatacgaactgaatgctacctactacgctcaacgtgcttccgccggattgattatttctgaagcaacacaggtaactcctgaaggacaaggttatcccgctacaccaggaattcattcaccagaacaggtggaaggatggaagttaataactgatgccgtacatcagcagggtggaagaatttttctgcaactatggcatgtaggcagaatttcccatcctgacttacaaccaaatggagctttacctgtggcaccttctgccattgctcctaaaggtgaagctgcaacttatgaggggccaaaaccctttgttactccccgcgctttagaaacttcagaaataccgcaaatagtagaacagtatcgtcagggagctgcaaatgctctagcggctgggtttgatggggtagaaattcactcagctaatggttatttaatagatcaatttctccgcgatcgcaccaatcaacgtacagataaatatggaggttccattgagaatcgcacccgattcttgttggaagtgacagaggcggtaactagtgtgtgggattctaaccgagttggggttcgtttgtctcccagtgggacttttaatgatataggtgactccaatcccctagagacattcggttatgcggctcaagcgttgaaccagtttaatttggcatatctgcatatttatgaggcaaccgaggcagatatcagacatggcgggataattgtacccaccagtcatatccgcgatcgctttacaggtacactcatcgtcaatggtggttatacccgtgaaaaaggtgatgcagtgctggcaaacaaagcagcagatttagttgcctttggcacattatttatatcaaacccagatttaccccgacgcttggctttaaatgcaccactaaatgaagcaaatcaagcaaccttttatggtggcggtgaacaaggatatacagactatccattttggtcggctgctaatgaggcggtagctaaggcgtaa

SEQ ID NO: 29799 - protein, 370 aa, Nostoc punctiforme PCC 73102
MTTEINLFSSYQLGNLELPNRIVMAPLTRNRASKGNVPYELNATYYAQRASAGLIISEATQVTPEGQGYPATPGIHSPEQVEGWKLITDAVHQQGGRIFLQLWHVGRISHPDLQPNGALPVAPSAIAPKGEAATYEGPKPFVTPRALETSEIPQIVEQYRQGAANALAAGFDGVEIHSANGYLIDQFLRDRTNQRTDKYGGSIENRTRFLLEVTEAVTSVWDSNRVGVRLSPSGTFNDIGDSNPLETFGYAAQALNQFNLAYLHIYEATEADIRHGGIIVPTSHIRDRFTGTLIVNGGYTREKGDAVLANKAADLVAFGTLFISNPDLPRRLALNAPLNEANQATFYGGGEQGYTDYPFWSAANEAVAKA

SEQ ID NO: 29800 - DNA, 1374 bp, Bifidobacterium longum DJO10A
  CDS (1)..(1374): transl_table=11
atgagcaacgacgatctgacgcatgagaattttgattttcgtggattcgacgtgccggatctcaaagcggtgacgctggcttcgtcttcggacggcgatcagtccaagcagccgaagaccaagcacgaggatgcatcgaagaaccgtaagcacggtaagaagaagtcaaaatccgatgcacggtccaagaagcgggccggcgcgggcaagacgagcgaatcgttcgatgattatgaggattatgaggaaagggaagctgtgagcaaggcagataagaaagtcagcaaggaccgtccggggctgtttgcgccaatgacgctgcgcgaggtgaccgtgcgtaatcgtatttggttgccgccgatgtgcacgtattcgtcgttcgcccgcgatggtaggcccacgccgttccactaccagcattacgtgtctcgcgcgttcggcggattcggcatggtgattgtcgaatccaccgccgtggctcctgaggggcgtatcacgccgtgcgatctgggcctgtgggaagacgggcagattgatgcttggcgctggatcgtggacggtattcgcgaggcgggtgcggtgcctgccatccagctcaaccatgcggggcgtaaggcttcgactggttgctttgccgttggttacgacggtcagagcgtgccggaggaggcgggcggctggcctaccatggcaccgtctgaaatcgcgttcggtgggttgcgtacgccgcgcgcgctgtccgtggatgagattcatggtctggtcggcgcgttcgccgcggcggcgggccgtgcggtggccgccggcttccaggcgattcagattcatgccgcgcatggctatctgatttctcagttccttgacccgctgagcaatgagcgtgatgacgaatatggtggcgatttgaccggtcgctctcggttcctggtcgaggttgtggatgccgtgcgtggggccgtccctgagggcgtgccggttctggtgcgcatttcggccacggattgggccgccggcggttgggatttggaccagaccatcgcactatccaaggtgctgaaggagcatggcgtcgatgtgatggacgtgtctaccggcggcatcatgtcgggagtgtcgattccggtcaagccgaactatcaggtgccgttctccgagcaggtcaaggccaaggccgatattccggtgaccgcggtgggtcttatcaccaagccgaagcaggcggccaagattctggcccatggcgaagccgatgccgtggagattggccgcgccgcattgcgtgatccatactggccgttgcgtgcagccaacaagctgggcataccgtccaccgagatcccctacgccccgcaatacgtggccggtgcgtactaa

SEQ ID NO: 29801 - protein, 457 aa, Bifidobacterium longum DJO10A
MSNDDLTHENFDFRGFDVPDLKAVTLASSSDGDQSKQPKTKHEDASKNRKHGKKKSKSDARSKKRAGAGKTSESFDDYEDYEEREAVSKADKKVSKDRPGLFAPMTLREVTVRNRIWLPPMCTYSSFARDGRPTPFHYQHYVSRAFGGFGMVIVESTAVAPEGRITPCDLGLWEDGQIDAWRWIVDGIREAGAVPAIQLNHAGRKASTGCFAVGYDGQSVPEEAGGWPTMAPSEIAFGGLRTPRALSVDEIHGLVGAFAAAAGRAVAAGFQAIQIHAAHGYLISQFLDPLSNERDDEYGGDLTGRSRFLVEVVDAVRGAVPEGVPVLVRISATDWAAGGWDLDQTIALSKVLKEHGVDVMDVSTGGIMSGVSIPVKPNYQVPFSEQVKAKADIPVTAVGLITKPKQAAKILAHGEADAVEIGRAALRDPYWPLRAANKLGIPSTEIPYAPQYVAGAY

SEQ ID NO: 29802 - DNA, 1227 bp, Prosthecochloris aestuarii DSM 271
  CDS (1)..(1227): transl_table=11
atggatgcgtttcgaggggcattcgagattggtctcttttgtcagccagcagcacatacgctatattgcagcattgaccaggatttgcctgaacaggcgataacgggctatgcaccatgccttgatgatgcaaaggaggtttctctgatgactatgcttttttcccctgcctctcttggaacgcttaccctgcagaaccatattgtcatggcgcccatgacgcgcagccgtgccactggtaatgtcgccaatgcgcttatgcgtgagtattatgcagcacgaagttctgccggtctcatcataaccgaggggacatctccctcgccagacggccttggctatcccagaattccaggtatattttccggagcccagatcgaaggatggaaatccattacggaggcggtgcatcagcgggatggaaaaattttcatgcagctcatgcattgcggtcgaattgctcatcctctgaacatgcctgatggggcggaaattatcgccccttccgcagtggctgctcaggggacgatgtataccgatacggacggattgcagccgtatcccgttccgagagctatgagcgaggaagatatcgccatcgcaaaagccgggtacgtcgatgcctctctgcatgccatggaggccggtttcgacggtgtcgaactgcatggcgccaacggttacctgctcgaacagtttttcaggccgaataccaatctcagaacagactgttacggcggttcggtggaaaatcgggcccgtttcatgctggaagtgctcgatgaggtgatcgctgctgttggtgaccaacgggtgggtattcgtctttcgccgttcggcgtcttcaatgatatgccgctctatgaggcaatggaggaagagtatcgctggcttgccggggctatcgccagggtcgccccgctctacattcatcttgtcgatcactcctctatgggagcaccgacggtgcctgattcgatcaaggaatcatttcgcaaaagcttcaaggcaacgcttattctttccggcggttatgatgcagcgcgtgcagcaagagatctcgatgcccgaaagtgcgatctggttgccgttgggagagcgtttatcgctaatcctgatctcgtcgaacgctggcatgcgggagctcctctcaatacccctgatcccgatacgttttattcagcaggaccgaaaggatacatcgattatccggttctggaggggtag

SEQ ID NO: 29803 - protein, 408 aa, Prosthecochloris aestuarii DSM 271
MDAFRGAFEIGLFCQPAAHTLYCSIDQDLPEQAITGYAPCLDDAKEVSLMTMLFSPASLGTLTLQNHIVMAPMTRSRATGNVANALMREYYAARSSAGLIITEGTSPSPDGLGYPRIPGIFSGAQIEGWKSITEAVHQRDGKIFMQLMHCGRIAHPLNMPDGAEIIAPSAVAAQGTMYTDTDGLQPYPVPRAMSEEDIAIAKAGYVDASLHAMEAGFDGVELHGANGYLLEQFFRPNTNLRTDCYGGSVENRARFMLEVLDEVIAAVGDQRVGIRLSPFGVFNDMPLYEAMEEEYRWLAGAIARVAPLYIHLVDHSSMGAPTVPDSIKESFRKSFKATLILSGGYDAARAARDLDARKCDLVAVGRAFIANPDLVERWHAGAPLNTPDPDTFYSAGPKGYIDYPVLEG

SEQ ID NO: 29804 - DNA, 1140 bp, Croceibacter atlanticus HTCC2559
  CDS (1)..(1140): transl_table=11
ttgggtaaaaccaaaaaaattacaatgaaagatcaacctatattacaaccacataaaattggcgacttgtcgttacctaatcgtgcaataatggcacctatgacacgtagtcgcgctgtaaacgatgaaaatgcacctacagacttgcacgtagaatattacacacaacgtgctacagcaggactcataattacagaaggtgcgcaagtatctaaacaagcagttggttacatacatactgcaggaatacactctaaagcacaagtagaaggctggaaaaaagtaacaaaaagtgtacacgatgctggcggacgtatttttatacaattatggcatgtaggccgtatgagtcatccagattttcatgatggcgatttgccagtagcaccatcagccataaatccacacgcacaatcttatactccagaaggttttaaagatactgtaaccccaaaggcaatgacacttgaggaaataaaaattacagtaaatgattttaagcaagcagcaaaaaatgcagttgaagcaggttttgatggcgtagagatacattcttcaaacggatatctatttcatcaattcttcagtagcttcagtaataaaagagacgaccaatacggcggaagcatagaaaacagagcgcgtttcttttttgaagttttagatgctgtaaaacaggtaattccgcagaataggattggagctcgatttaatccatcattacacggtacatttggaatggaagtcgttgaagataccatcccaacattcgactatgtgattgaaagattagaaaaagaatacgatttatcctacatacatttatctgagccttttacagatgtctcagatgttgattatgcagaagagcatatagcaaagcgataccgtcctaaatattcagggacactaatgataaatactgggtttacaaaagataccgctaataaagtaatagaaaatggtgatgcagaccttgttgcttttggaaaactatatatatcgaatccagacttagtaggtcgatttaaagaaaatataccaactgcagaatgggatgctaataccttttattcacaaggtcctgaaggctatatagattatgaagccaaaactagagaccttataccaacaagctaa

SEQ ID NO: 29805 - protein, 379 aa, Croceibacter atlanticus HTCC2559
MGKTKKITMKDQPILQPHKIGDLSLPNRAIMAPMTRSRAVNDENAPTDLHVEYYTQRATAGLIITEGAQVSKQAVGYIHTAGIHSKAQVEGWKKVTKSVHDAGGRIFIQLWHVGRMSHPDFHDGDLPVAPSAINPHAQSYTPEGFKDTVTPKAMTLEEIKITVNDFKQAAKNAVEAGFDGVEIHSSNGYLFHQFFSSFSNKRDDQYGGSIENRARFFFEVLDAVKQVIPQNRIGARFNPSLHGTFGMEVVEDTIPTFDYVIERLEKEYDLSYIHLSEPFTDVSDVDYAEEHIAKRYRPKYSGTLMINTGFTKDTANKVIENGDADLVAFGKLYISNPDLVGRFKENIPTAEWDANTFYSQGPEGYIDYEAKTRDLIPTS

SEQ ID NO: 29806 - DNA, 1098 bp, Sulfitobacter sp. EE-36
  CDS (1)..(1098): transl_table=11
atgaccgaggcattattcacccccttgaaggtcggtgggatcgaggccgcgaaccgcattgtgatggccccgctgacccgcagccgcgctgatgacgacagtggcgaagtcggcgatatgcacgtcgaatactacgcacagcgcgccggtgccgggatcatcatcaccgaagcgtcccagatcagcgccgaaggcaaaggctacatcaagacccccggcatctacaccgaagggcaggttgctgcctggaaaaaggtgacggacgcggtgcacgccaagggcggcaagatcgtgatccagctgtggcacgtgggccggatcagccatgtggacatccagcctgacggacaaaagcccgtcgccccctcggccatcgcggcagaggtgaagacctttaccaaagacggtatgaccccgacatctgaaccgcgcgccttggagttggacgagatgccgcgcattgtcgccgattatgtccacgcaaccaagatggcgcgcaaggcaggctttgacggggtcgaggtccacggggcgaacggctatctgctggaccaattcctcaagacctcaagcaacaaacgcgatgacgcctatggcgggtcggtcgagaaccgcgcgcggctgctgttcgaagtgctggacggtgtcgtaaacgcatgggacggcgatcacgtcggcctgcgcctgtcgcctttctcgcctgcgaacggcatcgcggatgataacccgcaagagacgttcacctacgtcgtggatgcgctgaacaaatacaatctggcctatctgcacatggtcgaaggctcgaccggccagtcgcgcgatctggatagcggcgaagaccttggcaagctgcggtcgctgttcaacggcgtctacatggcaaataacctttatgaccgcgacatggcgatcgatgccgtggccagcggcaaggctgatctggtggcctttggccggccctatatcgccaaccccgatctggcaaaacggctggaacttaacgcaccgctgaacgagggggatacgaaaaccttctatgccggtggcgaagagggctataccgattatcccttcctcgaagaggtcgcggcagagtaa

SEQ ID NO: 29807 - protein, 365 aa, Sulfitobacter sp. EE-36
MTEALFTPLKVGGIEAANRIVMAPLTRSRADDDSGEVGDMHVEYYAQRAGAGIIITEASQISAEGKGYIKTPGIYTEGQVAAWKKVTDAVHAKGGKIVIQLWHVGRISHVDIQPDGQKPVAPSAIAAEVKTFTKDGMTPTSEPRALELDEMPRIVADYVHATKMARKAGFDGVEVHGANGYLLDQFLKTSSNKRDDAYGGSVENRARLLFEVLDGVVNAWDGDHVGLRLSPFSPANGIADDNPQETFTYVVDALNKYNLAYLHMVEGSTGQSRDLDSGEDLGKLRSLFNGVYMANNLYDRDMAIDAVASGKADLVAFGRPYIANPDLAKRLELNAPLNEGDTKTFYAGGEEGYTDYPFLEEVAAE

SEQ ID NO: 29808 - DNA, 1191 bp, Oceanicola batsensis HTCC2597
  CDS (1)..(1191): transl_table=11
atgagcgcactcttccagccaatccagctcggcggcctgaacctgcccaatcgcatcgcggtctcgccgatgtgccaatacagcgccgtggaaggcttggcccagacctggcacctggttcatgtcggtggactcgccctgtccggcgccggtgtcgtcgtgatggaagccaccgcgaccgaggctgccggccgcatcacgcatggctgcctcggcctctataccgatgcccacgaagaagcattgggcaagctcgtcaccgagatcaagaaactggcaccggccgcgatcggtatccagcttggccatgccggccggagggcctcttgccggcccgtccgcgaccgttggaagggcgagtgtctgacagccgaagaaggggcgtggcagaccgttgcgccctcggcgataccctacgatgaaacctggcatgaacctgtcgcgatggactctgccgctctggagcgggtccgttcctccttcgtcgacgccgcccggcgggcagatcgggcggggttcgaccttgtcgagatccatggggctcacggctacctgttgcaccagttcctgtcgccggtgaccaaccacaggacggatgcctatggcggcagcctcgagaaccggatgcgcttcgtgctcgagatcgcgcaggcgatgagggcggtctggccacgggaaaaggcgctcgggtttcggatgaacagcaccgactggcatcccgaggggttgacccaggacgatgcggacacgcttgccaaggcattgaaagcgattggcgtcgactatgtggtgatgtctgcgggcaatcttgcgccgggctgcaagatcccgcctgccgcaccgggtcaccaggtcgaatatgcgcgccgggtgaaggccgcgaccggcatgaccaccatggccgtggggctgatcgccacagccgacctcgccgaacgcatcatcgagagcggcgacgccgacatggtggctatcgggcgcggcatgctggacaatccacgctggggtcttctggctgcggcggaatgcggcgtggatgttgactatgtaccgcaatacatccgctcccggcccaacaactggatcggcttccccatcgcccatcccaaggcacggcccatcgtgggaacgcggcagatggaccgtcccagctccggtggctgggacaggcccgatgtggtgacgaagtag

SEQ ID NO: 29809 - protein, 396 aa, Oceanicola batsensis HTCC2597
MSALFQPIQLGGLNLPNRIAVSPMCQYSAVEGLAQTWHLVHVGGLALSGAGVVVMEATATEAAGRITHGCLGLYTDAHEEALGKLVTEIKKLAPAAIGIQLGHAGRRASCRPVRDRWKGECLTAEEGAWQTVAPSAIPYDETWHEPVAMDSAALERVRSSFVDAARRADRAGFDLVEIHGAHGYLLHQFLSPVTNHRTDAYGGSLENRMRFVLEIAQAMRAVWPREKALGFRMNSTDWHPEGLTQDDADTLAKALKAIGVDYVVMSAGNLAPGCKIPPAAPGHQVEYARRVKAATGMTTMAVGLIATADLAERIIESGDADMVAIGRGMLDNPRWGLLAAAECGVDVDYVPQYIRSRPNNWIGFPIAHPKARPIVGTRQMDRPSSGGWDRPDVVTK

SEQ ID NO: 29810 - DNA, 1062 bp, Synechococcus sp. WH 5701
  CDS (1)..(1062): transl_table=11
atggccgacctgttcactcccctgcggctcggccccctggagctgcccaaccgggtactgatggcgcccctcacccgttcacgggccgaggtgggccatgtgcccggcccgctgatggcggagtactacgcccagcgggcttcggctgggctgatcatcgccgaggccacgatggtgatggagggggagtcgtcgttcatccgtgagccgggcatccattccaaggcccaggtcgacggctggacgctcaccaccgacgcggttcacgcggcgggaggccgcatcgtgctgcagctctggcacgggggacgggcctgccacccgctcctcaacggcggccggcagccggtggcccccagcccgatcgccatcagcggcgatgagatccacaccccagagggcaagaagccctacgtggtgccgcgggagctggccgacgctgagctgcccgccatcgtggccgggttccgccaggctgcccgcaacgccatcgctgccggtttcgacggtgtggaggtgcatggcgccaacggctatctgctcgatgaattcctgcgcgacgggagcaaccgccgcgctggcccctatggcggtccgatcgagaaccgggcccgcctggtgctcgaggtgatcgaggcggtgcgccaggaagcggagctggtgggactgcggatctcgccgctcaacagctacaacgccatggtcgattccgatccggtcggcctcacccgctggctggcggagcggctcaatagctgcggtctggagtatctccatgtgatgcgcggcgatctcctcggccagcagcatggggatgtgctcacgccggtgcgtgaacacttcaacggcaccctgatcgccaacatggggtacgacggcagcgaggccacaacagccatcgccgccggcgccatcgacgcggtggccttcggcacggccttcctggccaaccccgatctgcccgagcgcctgcggtgtggggccccgctcaacagccccgaccccgccaccttctacaccccgggccccgcggggtacaccgactaccccgccctgccatga

SEQ ID NO: 29811 - protein, 353 aa, Synechococcus sp. WH 5701
MADLFTPLRLGPLELPNRVLMAPLTRSRAEVGHVPGPLMAEYYAQRASAGLIIAEATMVMEGESSFIREPGIHSKAQVDGWTLTTDAVHAAGGRIVLQLWHGGRACHPLLNGGRQPVAPSPIAISGDEIHTPEGKKPYVVPRELADAELPAIVAGFRQAARNAIAAGFDGVEVHGANGYLLDEFLRDGSNRRAGPYGGPIENRARLVLEVIEAVRQEAELVGLRISPLNSYNAMVDSDPVGLTRWLAERLNSCGLEYLHVMRGDLLGQQHGDVLTPVREHFNGTLIANMGYDGSEATTAIAAGAIDAVAFGTAFLANPDLPERLRCGAPLNSPDPATFYTPGPAGYTDYPALP

SEQ ID NO: 29812 - DNA, 1047 bp, Pseudoalteromonas tunicata D2
  CDS (1)..(1047): transl_table=11
atgacaacgcaaaatttatttacctcagtaaaactcaatgatgatattgaacttaacaatcgtattttaatggcgccacttacacgctgtatggctgatgaaaatttagtgccaactgatgctatggtgcaatattatgctcgtcgtgcagctgcaggtttaattatttctgaagcaacgattattcgcccagatggccaaggttacccaaatactccagggctatttagtgcagagcaagtacaaggttggcgtaaagtgaccgacgcagtacatcaaggtggtggtaaaatttttgctcagttgtggcatgttggccgtgttgcccatccacatttctttggtgaaggtgacgttttagcgccatctgcattaggtgtcgaaggctcagtgcctagaatgcgtgaattaacttatcaaattcccaaagctgtaagccaagatgaaattaatcaacttgtgtctgattatgctaaagcggctgaaaatgcgatagaagcagggtttgatggtgtcgagatccacggagcaaatggctatttaatcgatcagtttttacatcacgcaagtaatgtacgcacagacaattacggtcaaacaccagagaatatgagtcgttttgcccttgaagtcgttgatgccgtaatgagtgttattggtgcaaatcgtactgcattacgtgtatcaccgggcgcatattttaatatggcagcagatccgcgcgatcgcgcaatatttgactatttattgcctgagctacaaaagcgtaagcttgcatatttacatggtggtatttttgatgatgccatgacatttgattacttggatggttcaatttctcagtatttacgtagtcattaccaaggaacgttagtaggagtgggtggttatagcgcacagaccgcaagtcaagcgatagctaacaatcaatttgatctaattgcgattggtcgcccatttatcgccaatcctgattatgttgagcgagtacgcaatactctacctttggtagaatattcagaagacatgctggcgtcattaatttaa

SEQ ID NO: 29813 - protein, 348 aa, Pseudoalteromonas tunicata D2
MTTQNLFTSVKLNDDIELNNRILMAPLTRCMADENLVPTDAMVQYYARRAAAGLIISEATIIRPDGQGYPNTPGLFSAEQVQGWRKVTDAVHQGGGKIFAQLWHVGRVAHPHFFGEGDVLAPSALGVEGSVPRMRELTYQIPKAVSQDEINQLVSDYAKAAENAIEAGFDGVEIHGANGYLIDQFLHHASNVRTDNYGQTPENMSRFALEVVDAVMSVIGANRTALRVSPGAYFNMAADPRDRAIFDYLLPELQKRKLAYLHGGIFDDAMTFDYLDGSISQYLRSHYQGTLVGVGGYSAQTASQAIANNQFDLIAIGRPFIANPDYVERVRNTLPLVEYSEDMLASLI

SEQ ID NO: 29814 - DNA, 1092 bp, Photobacterium sp. SKA34
  CDS (1)..(1092): transl_table=11
atgagcaagctttttgaatcaacacagcttaacgaattgaatttacaaaaccgtattgtaatggcaccgatgacacgtgcgcgtagtagccaaccgggcaatattccaaatgcgatgatggcgagttattaccagcaacgtgccagcgcaggattaattatctctgaagcgacgcagatttctgatgattcgcaaggctattcgtttacgcctggtgtttataccgatgagcaagtagcgggttggaattcagtaacgcaagcggtacataagaacggcgcggcgatgttttgtcagctatggcatgtaggtcgtgtatctcaccctgtattccaaaatggtgagaagccgattgcgccatcagcacttagacctgttgaaaccaaggtgtggattgcggatgaacaaggcaatggcaacatggtcgattgtgttgaaccaagagctatgacacaagcagatattgatcgggttatcgcagattttgcttatgctgcaaaacgcgctattgatgcaggttttgatggtgtcgaaattcacggtggtaatggctaccttatcgatcagttcttgcgtactaactctaatcatcgcacagatagttacggtgtcactagagagaatcgtattcgcttcttactagaagttgttgatgctgttagtaatatcattggtgctaacaaagtgggtgttcgacttgcgcccttcatcactttcaaagatatgaattgccctgatattgtgccgactattttagaggcagcaaaacaactccaagcccgtgacattggttatctgcatttatcagaagcggattgggatgatgcgccagtgatccccgagctgtttagaattgatctgcgtgagtatttcactaataccatcattgttgcaggtagttatacgcaagcgcgtgcagatgaagtgcttaataaaggctatgcggatttggtggcgtttggtcgtccgtttgtggctaatcctgattttgtctcacgcttacagcatcaacaaccattagcagaactggatggcgcaacgctatttggcggtaatggccacggttataccgactatcctactcttggctaa

SEQ ID NO: 29815 - protein, 363 aa, Photobacterium sp. SKA34
MSKLFESTQLNELNLQNRIVMAPMTRARSSQPGNIPNAMMASYYQQRASAGLIISEATQISDDSQGYSFTPGVYTDEQVAGWNSVTQAVHKNGAAMFCQLWHVGRVSHPVFQNGEKPIAPSALRPVETKVWIADEQGNGNMVDCVEPRAMTQADIDRVIADFAYAAKRAIDAGFDGVEIHGGNGYLIDQFLRTNSNHRTDSYGVTRENRIRFLLEVVDAVSNIIGANKVGVRLAPFITFKDMNCPDIVPTILEAAKQLQARDIGYLHLSEADWDDAPVIPELFRIDLREYFTNTIIVAGSYTQARADEVLNKGYADLVAFGRPFVANPDFVSRLQHQQPLAELDGATLFGGNGHGYTDYPTLG

SEQ ID NO: 29816 - DNA, 1077 bp, Oceanospirillum sp. MED92
  CDS (1)..(1077): transl_table=11
atgtcttcagaatcaaatctattcagcccggcaactctgggcagcgttgaacttaaaaaccgtattctaatggctcccctaaccagagcccgttccgaagcggagcatgtgcccggcgaacttatcgcgcaacactatgctgatcgcgccagcgctggattgatcatcgcagaagccaccatggcgatggaaaactgctgtgcattcatcaacgagcctggcatctattctcaggctcagatcgaaggctggaaaaaagtgacggatgcagtgcatcaagcgggtggaaaaatattcttacagctttggcatggagggcgtgcgtgccaccctgatctgaataatagcattcagccgattgccccgagcgcgatcgccattgaagatgaagtttatacccgtgaaggtaaaaaaccttataccgttcccagagcaatgacacttgaagatatcagcgatgttattgccggttttaaacaggccgcaatcaacgcgaaagaggcggctttcgacggtgtagaagtacatggcgctaacggctatctgctggatagttttcttcgcgatagcagtaacaaacgccaagataactatggcggaaatgtggaaaaccgtgcccgactgctgcttgaggtactcgatgttgtttgtgatgtttggggcagtgacaaagtggggattcgcacctcaccactgaatggctttaacagcatgagcgacagtgaccctgaaggacacacacgttggttagctaagcagcttaacggccgcaaccttgcctactggcacctgatgcgaagcgacttcctgggccagcaaacaggagatgtcattgccgcagcgaacgagttctacaaaggcaatctgattggcaatatgggttacaacttagaggaagctaaccgatcagtgagtgctggcgacttaacagctgtagctttcggcgtaccttttatcgccaaccccgatctggttgaacgttttcaaaacggtgccgcactcaatgaagcgaaccctactactttttacacacgcggcccagaaggctataacgattatccaacactctcagcgtga

SEQ ID NO: 29817 - protein, 358 aa, Oceanospirillum sp. MED92
MSSESNLFSPATLGSVELKNRILMAPLTRARSEAEHVPGELIAQHYADRASAGLIIAEATMAMENCCAFINEPGIYSQAQIEGWKKVTDAVHQAGGKIFLQLWHGGRACHPDLNNSIQPIAPSAIAIEDEVYTREGKKPYTVPRAMTLEDISDVIAGFKQAAINAKEAAFDGVEVHGANGYLLDSFLRDSSNKRQDNYGGNVENRARLLLEVLDVVCDVWGSDKVGIRTSPLNGFNSMSDSDPEGHTRWLAKQLNGRNLAYWHLMRSDFLGQQTGDVIAAANEFYKGNLIGNMGYNLEEANRSVSAGDLTAVAFGVPFIANPDLVERFQNGAALNEANPTTFYTRGPEGYNDYPTLSA

SEQ ID NO: 29818 - DNA, 1113 bp, Flavobacteria bacterium BBFL7
  CDS (1)..(1113): transl_table=11
atgagtaataaacaaccacttttagaacctataactataggagctgtagaattgaaaaatcgaattgttatggcacctatgactagatgtagagccactaatgagcatcaagcaccagatgaaaaacatgtcgattattacacacaacgtgcgggcgctggtttaataataacagaaggtagtgaggtttctagaaaaggtagaggatacccatttgttgcaggaatttttaacgacgctcaggtagaaggatggaaaaaagtagtggatagtgtgcatgaagctgatggtaaaatattcttgcaattatggcatgtaggacggacatcactacctgattaccatgagggacaactaccatgggcacctagtgctgttaatccagataccgaactgcgcaatcagtatggtgaaaaaaaacttaccgcaacacctcacgcaatgactaatgaagagattgcacaaacggttaaagaatttggtgatgcagcagcaaatgctaaaaaagcgggatttgatggagttgaaatccatagttctaacggatacctgattcatcagttttttaataacaagtctaacattcgtacggatgaatatggtggcagcaatgaaaataaggcgagattcttttttgaagttctagatgcagttaaagaatcatttccagataatagaataggatgtagattaaacccatcgctcaatggggtttttggtattgaaggaacaccggataccattccgttttttgattatttagttaatcgtcttaatgattatgacctcgcatatttgcacttatcagaaccatttacagatgtaagtaatatcaactttttagttagtgatattgctaagcattacagacctatttatagtggcaatttaatgatcaataatgagtttgatcgtgaatctggtaatcaagttattgaaaacaaacatgccgacttagtggcttatggtaagttatttatctctaatcctgatctacctaaacgctttgaattaaaggcagaaactgctgactggaatcaagaaactttttattcccaaggacgtgaaggttatacagactaccctactttagatgaagaagctaagagctaa

SEQ ID NO: 29819 - protein, 370 aa, Flavobacteria bacterium BBFL7
MSNKQPLLEPITIGAVELKNRIVMAPMTRCRATNEHQAPDEKHVDYYTQRAGAGLIITEGSEVSRKGRGYPFVAGIFNDAQVEGWKKVVDSVHEADGKIFLQLWHVGRTSLPDYHEGQLPWAPSAVNPDTELRNQYGEKKLTATPHAMTNEEIAQTVKEFGDAAANAKKAGFDGVEIHSSNGYLIHQFFNNKSNIRTDEYGGSNENKARFFFEVLDAVKESFPDNRIGCRLNPSLNGVFGIEGTPDTIPFFDYLVNRLNDYDLAYLHLSEPFTDVSNINFLVSDIAKHYRPIYSGNLMINNEFDRESGNQVIENKHADLVAYGKLFISNPDLPKRFELKAETADWNQETFYSQGREGYTDYPTLDEEAKS

SEQ ID NO: 29820 - DNA, 1071 bp, Oceanobacter sp. RED65
  CDS (1)..(1071): transl_table=11
atgtcacaatctgtcgatgctttatttcaaccaatccaattgggtgcaaatcaccttgccaatcgcatggccatggcacctcttactcgttgtcgagcgccaggtcatcaacccaatgaactcatggcggaatattatggtcagcgtgcgagcgcgggcctgattattagtgaatgcaccatgattcagcctaatacctcaagcttcgccacagaaccgggtatttactcgaaagagcaaattgaaggctggaaactcaccaccaaagcggtacatgaaaaagacggtaaaatctttatgcagatctggcatgccggccgagccgttcatccagcgctaaacgtagaagagaatgtcgtctccgcatcggatatcggcttaagcggtgaaacccatacaccggatggcaagcaaccgtatgtggcacccaagccactcaccagagaacaaatcagagatatcattggtgatttccgacaagcagcagccaacgccatagaagcgggttttgatggtgtcgagattcacagtgccaatggttatcttatcgatcagttcttacgagacggaagcaataaacgcgatgatgaatacggtggtagtcttgaaaatcgtgcgcgctttttctttgaagtgatcgaagcggtatccgacgaaatcggcagtgatcgagttggtgtgcgcctatcgccattaaatagttttaacgatatgcaagactctgatccggaagcattcattacttatttgagtcagcagttaaatcaatttgagctggcgtatttgcatttaatgcgtgcggatttctttggtcagcagcaagccgatgtggtttccattgcccgtgaaaactataaaggtaacttaatggtgaacatgggttacagcggcgaagaagcggcggccgtcattgaagcgggtcatgcggatatggtcgcctttggtgtgccgttcttagcaaacccagacctacccgcgcgaatcaaggcaggtgcagcattaaacgagcctgatcaatccacgttctatacgcaaggtgcggaaggttatacaacctatccaacaatgtag

SEQ ID NO: 29821 - protein, 356 aa, Oceanobacter sp. RED65
MSQSVDALFQPIQLGANHLANRMAMAPLTRCRAPGHQPNELMAEYYGQRASAGLIISECTMIQPNTSSFATEPGIYSKEQIEGWKLTTKAVHEKDGKIFMQIWHAGRAVHPALNVEENVVSASDIGLSGETHTPDGKQPYVAPKPLTREQIRDIIGDFRQAAANAIEAGFDGVEIHSANGYLIDQFLRDGSNKRDDEYGGSLENRARFFFEVIEAVSDEIGSDRVGVRLSPLNSFNDMQDSDPEAFITYLSQQLNQFELAYLHLMRADFFGQQQADVVSIARENYKGNLMVNMGYSGEEAAAVIEAGHADMVAFGVPFLANPDLPARIKAGAALNEPDQSTFYTQGAEGYTTYPTM

SEQ ID NO: 29822 - DNA, 1077 bp, Vibrio sp. Ex25
  CDS (1)..(1077): transl_table=11
atgtccaactctgtagacttattttctcctatcgaactgggtcaattagcattagataaccgtgctattatggcccctttaacgcgcgctcgtgccagcgcagatcatatcccgaatgaccttatggttgagtattatgctcaacgcgcgagtgctggacttatcattgcagaatgcaccatggtgatggaaggaacgtctgcttttatggctgaaccgggcatttataacgaagaacaaattgcagcttggaaaaaggtaacggatgcggttcatgaaagaggcggtaagatcgtattgcaaatttggcatgcgggacgagcttgtcatcctgaactgaatgatgggaaaacgcctgttgcagcgagcgcactagccattcgtgatgagttagttcataccccttcaggtaagcaagcatatacggtaccacgagcactcgaagtggatgagatagcttccattgtggcagcgtttaagcaaggtgcgaaaaacgccaagagagcaggctttgatggtgtggagatacatggcgccaatggttatcttatcgataactttcttcgtgatggttcgaatttacgtactgatgagtacggtggctcggtcgaaaatcgtgcccgttttttacttgagatagttaaagaagtggtcgaggtatggggacctggaagagtagggctgcgcacatcaccattaaatggatttaatgacatgaaagacagcgatccggttggcttggttcgttacttagctaagcaacttaatgctttcgatcttgcttattggcacgtgatgcgtgcggatctaaagggcgtacaaaaagcagatgttctcaagccagcacgcgaaaactatcaaggttacctaatggccaacgtgggctacagtgcacaagaagcgacaacggcaattgcagaaaatcaagttgatgtggtcgcatttggcgttccatttatcgccaaccctgatttagttgagcgatttaagaaaaatgcacctcttaatgaggcaaaacctgagcacttttatttaggtggagcagaaggttataccgattacccagtaatggcataa

SEQ ID NO: 29823 - protein, 358 aa, Vibrio sp. Ex25
MSNSVDLFSPIELGQLALDNRAIMAPLTRARASADHIPNDLMVEYYAQRASAGLIIAECTMVMEGTSAFMAEPGIYNEEQIAAWKKVTDAVHERGGKIVLQIWHAGRACHPELNDGKTPVAASALAIRDELVHTPSGKQAYTVPRALEVDEIASIVAAFKQGAKNAKRAGFDGVEIHGANGYLIDNFLRDGSNLRTDEYGGSVENRARFLLEIVKEVVEVWGPGRVGLRTSPLNGFNDMKDSDPVGLVRYLAKQLNAFDLAYWHVMRADLKGVQKADVLKPARENYQGYLMANVGYSAQEATTAIAENQVDVVAFGVPFIANPDLVERFKKNAPLNEAKPEHFYLGGAEGYTDYPVMA

SEQ ID NO: 29824 - DNA, 1044 bp, Alteromonadales bacterium TW-7
  CDS (1)..(1044): transl_table=11
atgaacacagatttacttacaccatatcaattaaatgacacgattgaacttaaaaatcgtgtattaatggcaccgcttacacgttgtatggctgacgaaaatttagtgccaacgcaagatatggttgagtattatgctcgccgcgcagacacaggtctcattattagcgaagcgacaattattcgcccagacgggcaaggttacccaactacgcctggtttgtttactagcgagcaaattcaaggttggaaaaaagtgactgacgctgttcatgcaaatggtggcaaaatgtttgctcaactttggcatgttggccgagttgcgcaccctcatttttttgatggtgaagtactcgcaccttcagcaatcggcgtagaaggttctgtgccccgcatgcgcgagcttacttacatcacgccaaaagccgcgacaactgacgatattaaatcgttaattgcagattttgccaaagccgccgaaaacgcaattgaagccggttttgacggtgtagaaattcatggcgcaaacggctacttaattgatcaatttttacattatgaagccaatgtacgtgaagacgagtacggccaaacaccgcaaaacatggctcgctttgcacttgaggttaccgatgcagttattgctgcagtaggtaacgagcgtacagcactgcgtgtaacacctggtgcctactttaatatgagcgaagataaccgcgacaaagcggtatttgactacttactacctgaacttgaaaaacgaaaccttgcttacttgcacggtggtatttttgacgacagcacaacattcgaatcgctagaaggcaaaactacatcagcgtttttacgtgcgggatacaaaggagtacttgttggtgttggtagttacagctttgagtcagctaaagatgcaattaatgaaggtaagtttgatttaattgcgattggccgcccgctaattgcaaaccctgattacattagcaaagtaacaaacggcgaagagttagtcccttatagcgacgaaatgcttgctgagcttaaataa

SEQ ID NO: 29825 - protein, 347 aa, Alteromonadales bacterium TW-7
MNTDLLTPYQLNDTIELKNRVLMAPLTRCMADENLVPTQDMVEYYARRADTGLIISEATIIRPDGQGYPTTPGLFTSEQIQGWKKVTDAVHANGGKMFAQLWHVGRVAHPHFFDGEVLAPSAIGVEGSVPRMRELTYITPKAATTDDIKSLIADFAKAAENAIEAGFDGVEIHGANGYLIDQFLHYEANVREDEYGQTPQNMARFALEVTDAVIAAVGNERTALRVTPGAYFNMSEDNRDKAVFDYLLPELEKRNLAYLHGGIFDDSTTFESLEGKTTSAFLRAGYKGVLVGVGSYSFESAKDAINEGKFDLIAIGRPLIANPDYISKVTNGEELVPYSDEMLAELK

SEQ ID NO: 29826 - DNA, 1080 bp, marine gamma proteobacterium HTCC2080
  CDS (1)..(1080): transl_table=11
atgaactatgcgcacttgtatagcccccttgaaatgggtgacttgcgacttcgtaatcgcattgtgatggcgccgatgactcgtagccgggctcggcaagatgacgacgcggtctcagaattgcaagccaattactatggtcagcgcggcgacgccggactgattgtgaccgagggcgtgcatccttctgccgacggtaaaggttacaaccgcaccccggggatttacaacgatacgcacacgaaggcttggtcaacagtgaccgaccgggttcatggtcggggcgggctgatcgcttgccagctgatgcattgtggtcgggtaggccatgcactcaataagggacgaaacacacggtttttagctccatcagctctagctgctaacgccgagatttttaccgagtcagggatgatgcccatgccgacgcccgaggcgatgactttggccgagatcaaaacagttgtggcagattatcaagccgctgctgcccgcgccctgaaagctgggttcgatgctgtagagctccactgtgcatcgggttacttgccagctcaattcttggcgacgggaagcaaccttcgtgatgatcaatacggtggcagtttggagaatcgtttacgttttgtggaggaggttcttcaggcgattaaagttgaaaccggcgctgggcgtatagggctgagaatctctcccggcaatccttacaacgatcacgttgatgacaatccgactgaaacttacgctgcgctccttcaggtagcgaaccgtttaggacttgcctgggtgcatgcgattcggatggcgtcgacgggtattgatagcctggcattaagccgcgaatatttttcaggagcgctgatcggcagcgacagcttcaatgctgccgaggcagatcaatttatcgctgagcattgtgtagatgcggtgtctttcgggcgcgcttatattgcaaaccctgacttagtgacaaggttcgcctgcgatgcgccattaaacaccctagataaacgaacaatttatgcgggcgagggcccagggggctataccgattacccaagtttaactgcctcgggttga

SEQ ID NO: 29827 - protein, 359 aa, marine gamma proteobacterium HTCC2080
MNYAHLYSPLEMGDLRLRNRIVMAPMTRSRARQDDDAVSELQANYYGQRGDAGLIVTEGVHPSADGKGYNRTPGIYNDTHTKAWSTVTDRVHGRGGLIACQLMHCGRVGHALNKGRNTRFLAPSALAANAEIFTESGMMPMPTPEAMTLAEIKTVVADYQAAAARALKAGFDAVELHCASGYLPAQFLATGSNLRDDQYGGSLENRLRFVEEVLQAIKVETGAGRIGLRISPGNPYNDHVDDNPTETYAALLQVANRLGLAWVHAIRMASTGIDSLALSREYFSGALIGSDSFNAAEADQFIAEHCVDAVSFGRAYIANPDLVTRFACDAPLNTLDKRTIYAGEGPGGYTDYPSLTASG

SEQ ID NO: 29828 - DNA, 1098 bp, Pseudomonas putida GB-1
  CDS (1)..(1098): transl_table=11
atgaaactcttgcaaccgctgcaaatcggcccactcaccttgcccaaccgtgtgttcatggcccccctcacccggctgcgcagcctggaaccgggcgacgtacccaccgcgctgatggccgagtactaccgccagcgcgccagcgccgggttgatcatcaccgaggccacgcagatctccttccaggccaagggctattccggctcgcccggcattcacagcgccgaacagatcgctgcctggcagcacatcaaccaaggtattcatgctgatggcggccacagcgccgttcaggtgtggcacaccgggcgggtgtcgcacacctcgctgcaacctggcggcgaagcgccggtggcgccatcggcgctgccggccggtgcgcgtacgaccctgcgtgacgagcaaggcaacctgatgcgcgtggaaacctcggcgccacgggcgctcggcgaagcggaaatcgccgagatcgttgccgacttcggtcaggcagcggtcaatgcccgcgaggctggcttcgatttcatcgagttgcacgctgcgcacggttatctgttgcatcagttcctgacgccaagcgccaaccagcgcgaagaccgctacggcggcagtgtcgaaaaccgtgcacgcatcgtgcttgaagcggtggacgcagccattgccagctggagcgccgaacgtgtgggtatccgtgtattcccgctgggtggcttcaatggcgtggacaatggcgaagaccaggaagccgctggtctgtatctgatccgcgagctggccaagcgcaaccttgcctacctgcacctgtccgagccggactgggctggcggcaagccgctgcgtgacgaattccgccaggcgatacgcgcggcctacccaggggtgatcatcgcagcaggtgcctacaccgccgagaaaggtgaagacctgatcgcacgcggcttgatcgatgccgtggcgtttgggcgcagctacatcgccaacccggacctggtggagcggctgcgggtgcaggcgccgttgaatgagcaccgggcgcagttcgattatgccaatggggctgaggggtatacggattacccgttcctgaagcaggcttga

SEQ ID NO: 29829 - protein, 365 aa, Pseudomonas putida GB-1
MKLLQPLQIGPLTLPNRVFMAPLTRLRSLEPGDVPTALMAEYYRQRASAGLIITEATQISFQAKGYSGSPGIHSAEQIAAWQHINQGIHADGGHSAVQVWHTGRVSHTSLQPGGEAPVAPSALPAGARTTLRDEQGNLMRVETSAPRALGEAEIAEIVADFGQAAVNAREAGFDFIELHAAHGYLLHQFLTPSANQREDRYGGSVENRARIVLEAVDAAIASWSAERVGIRVFPLGGFNGVDNGEDQEAAGLYLIRELAKRNLAYLHLSEPDWAGGKPLRDEFRQAIRAAYPGVIIAAGAYTAEKGEDLIARGLIDAVAFGRSYIANPDLVERLRVQAPLNEHRAQFDYANGAEGYTDYPFLKQA

SEQ ID NO: 29830 - DNA, 1107 bp, Pseudomonas putida GB-1
  CDS (1)..(1107): transl_table=11
atgagcctgctgcttgagccttacaccctgcgtcagctgaccctgcccaaccgcatcgccgtctcgccgatgtgccagtattccgctatcgatggcctggccaacgattggcaccttgtccatttaggcagccgcgccgttggtggtgcgggcctggtgatcaccgaagccgtggcggtcaccgccgatggccgcatcaccgccgaagacctcggcctgtgggacgacacgcagatcgccccgttgcaacgcatcactcgcttcatcaccgcccaaggcgccgtgcccggtatccagctggcacacgccgggcgcaaggccagcacctatcgcccatggctgggcaggcagggtagtgtgaagctcgaagacggcgggtggcagccggtgggcccttcgaagatcgccttcgacccgcagcacacagcgccacgcgagctgaccgagaacgagatccagggtgttatcgacgccttcgttgcctcgactgagcgcgccttgaaggccggtttcaaggtggtggaaattcatgctgcccatggctacctgttgcaccagttcctctcgccgctgagtaaccaacgccgcgacgagtacggcagctgcttcgaaaaccgcatccgcctgaccttgcaagtggtggaggccgtgcgcaaggtctggccggccgagttgccattgttcgtgcgggtatcggcaaccgattgggtcgaagatggctggaaccccgatgaaaccgttgaactggcccgacgtctgcgagggttgggcgtagacctgatcgatgtgtcctctggcgggacctcggtaaacgccgaaatccccaccggccctggctatcagacccgcttcgccgagcgcgtgcgcaaggaatcggaaatcgccaccggcaccgtgggcatgatcaccgaaccggcccaggccgagcatattttgcgcaccggccaggccgatatcatcttcctcgcccgtgaactgctgcgcgacccgtactggccgctgcatgccgacgatgacctgggcggcaacaaggcgacctggcctgcgcaataccagcgcgcgaccagccgggccaacccgattcacgagtcggatctgcgggactga

SEQ ID NO: 29831 - protein, 368 aa, Pseudomonas putida GB-1
MSLLLEPYTLRQLTLPNRIAVSPMCQYSAIDGLANDWHLVHLGSRAVGGAGLVITEAVAVTADGRITAEDLGLWDDTQIAPLQRITRFITAQGAVPGIQLAHAGRKASTYRPWLGRQGSVKLEDGGWQPVGPSKIAFDPQHTAPRELTENEIQGVIDAFVASTERALKAGFKVVEIHAAHGYLLHQFLSPLSNQRRDEYGSCFENRIRLTLQVVEAVRKVWPAELPLFVRVSATDWVEDGWNPDETVELARRLRGLGVDLIDVSSGGTSVNAEIPTGPGYQTRFAERVRKESEIATGTVGMITEPAQAEHILRTGQADIIFLARELLRDPYWPLHADDDLGGNKATWPAQYQRATSRANPIHESDLRD

SEQ ID NO: 29832 - DNA, 1050 bp, Pseudomonas putida GB-1
  CDS (1)..(1050): transl_table=11
atgaccacgcttttcgatccgatcaccctgggcgacctgcaactgcccaaccgcatcatcatggccccgctcacccgctgccgcgccgatgaagggcgcgtgcccaatgcgctgatggccgagtactacgtacagcgtgccagtgccgggctgattctcagcgaggcgacctcggtcagcgccatgggggtcggctacccggatacccccggtatctggaacgatgaacaagttcgtggctggaacaatgtgaccaaggccgtacacggcgcaggcgggcgtatcttcctgcagctgtggcacgtgggccgcatctcccaccccagctacctgaatggcgaactgccggtggctcccagcgcgatccaggccaagggccatgtcagcctggtacgcccactgagtgactaccccaccccgcgtgcgctggaaaccgaagaaatcactgacatcgtcgaggcctaccgcagcggcgcggaaaatgccaaggcggccggcttcgatggtgtggagatccacggtgccaacggttacctgctcgaccagttcctgcaaagcagcaccaaccagcgcaccgaccgttacggcggctcactggaaaaccgcgcgcgcctgctgctggaagtgaccgatgcggccattgaagtgtggggcgcgaaccgcgtgggcgtgcacctggcgccgcgtgccgacgcccacgacatgggcgacgccgaccgcgccgaaaccttcacttatgtggcgcgcgagctgggcaagcgcggcatcgccttcatctgctcgcgggaacgggaagccgacgacagcattggccaactgatcaaagaagcgttcggcggcccgtacatcgtcaacgagcggtttgacaaagccagtgccaatgcggccctggccagtggcaaggccgatgcggtggcgttcggcgtgccgttcatcgccaaccccgacctgccggcgcggctggcggcggatgcgccgttgaatgacgcccggccggacactttctatagcaaggggccggtggggtatatcgattatccgcggttgtaa

SEQ ID NO: 29833 - protein, 349 aa, Pseudomonas putida GB-1
MTTLFDPITLGDLQLPNRIIMAPLTRCRADEGRVPNALMAEYYVQRASAGLILSEATSVSAMGVGYPDTPGIWNDEQVRGWNNVTKAVHGAGGRIFLQLWHVGRISHPSYLNGELPVAPSAIQAKGHVSLVRPLSDYPTPRALETEEITDIVEAYRSGAENAKAAGFDGVEIHGANGYLLDQFLQSSTNQRTDRYGGSLENRARLLLEVTDAAIEVWGANRVGVHLAPRADAHDMGDADRAETFTYVARELGKRGIAFICSREREADDSIGQLIKEAFGGPYIVNERFDKASANAALASGKADAVAFGVPFIANPDLPARLAADAPLNDARPDTFYSKGPVGYIDYPRL

SEQ ID NO: 29834 - DNA, 1128 bp, Marinobacter sp. ELB17
  CDS (1)..(1128): transl_table=11
atgagcaaccaacaaccgaatgatccgctatttcagcctttgactatgggcagcctcacactgcccaaccgggttctgatgtcaccgctaacccgttcacgttcaagccaaccgggcgatattccgaacgacatgaacacgcagtattaccagcagcgagccagtgctgggctgatcctgagtgaagccactcagatttcttcccagggcaagggctacgccttcacgccgggaattcattctcaggaacagattgatggctggaaaaaggtaaccgacgcagtgcgcctggccggcggtcgtatccacatgcaactgtggcacgttggtcgcatctcccgccccgaactgcagccgaatggccagttaccggttgcaccgtctgccatcaaaccgaaaggcgccaaaacctatatcagtgccgattccggcatggtggatgtgcttgagccccgggcgctggaaacccacgagatggccggcattgtcgaacagtatcgccagggcgccctgaacgcacaaaatgcagggtttgacggcgttgaggttcacgccgccaatggttatctgttggagcaattcataaaaagcggcagtaaccaccgcaccgacgaatacggtggctcattggaaaatcgcctgcgcctgccgctaatggtgattgaagccgtcatcgatgtgtggggcaaagacaaagtgggcgttcgtgttggcccaaccggcagctttaacggcatgcacgatgacaaccccatcgaaacctttacggcctttgccaaacacctgaacgacctggggatcgcttatcttgaggtggtagaagactcattccagggcaatcacgccagcggtcgcccggaagatatcatcgacgcgattcgagctgtttatgaaggcacttacatcgccaacggcgcctacacagccgaagaagcccgcacgcgcatcagcgaaggccgttgcgacctggtgaccttcggccgcccgtttattgccaacccggacctgcccgagcggttccgccagaatgcaacgctcaacggctgggatgacagcaccttctacggtggcgatgagcacggctataccgattaccccacactgcaagaactcgatattagtgcctga

SEQ ID NO: 29835 - protein, 375 aa, Marinobacter sp. ELB17
MSNQQPNDPLFQPLTMGSLTLPNRVLMSPLTRSRSSQPGDIPNDMNTQYYQQRASAGLILSEATQISSQGKGYAFTPGIHSQEQIDGWKKVTDAVRLAGGRIHMQLWHVGRISRPELQPNGQLPVAPSAIKPKGAKTYISADSGMVDVLEPRALETHEMAGIVEQYRQGALNAQNAGFDGVEVHAANGYLLEQFIKSGSNHRTDEYGGSLENRLRLPLMVIEAVIDVWGKDKVGVRVGPTGSFNGMHDDNPIETFTAFAKHLNDLGIAYLEVVEDSFQGNHASGRPEDIIDAIRAVYEGTYIANGAYTAEEARTRISEGRCDLVTFGRPFIANPDLPERFRQNATLNGWDDSTFYGGDEHGYTDYPTLQELDISA

SEQ ID NO: 29836 - DNA, 1113 bp, Erythrobacter sp. SD-21
  CDS (1)..(1113): transl_table=11
atgcacgaaaaactgctcgaaccgctcactctcggcgccatcgaggcgaagaaccggatcttcatggccccgctcactcgtggccgctcgacccagcccggctcggtcccgaacgagatgatggcgacctattaccgccagcgtgcgggcgccggcctgaccatttccgaagccaccggtattagcgtcgaaggcctcggctggcccgccgcgccggggatctggagcgatgcgcagaccgagggctggaagcctgtcaccgaagccgtgcatgaggaaggaggcaagatcgtcctccagatgtggcacatgggccgcctcgtccatcccgatttcctcggcggcattccgccggtttcggccagcgccaccaaggcaccgggtcacgcgcacactttcgaagggcgcaaggattacgagcaggcgcgcgagctttcgaatggcgagatcgcccgcgtggtcgaggattaccgccacgccgccgaaaacgcgaaaaaggccggtttcgacggcatccagctccacggcgcgaatggctacctcgtcgaccagttcctgcgcgacagcacgaacctgcgcgaagatgactacggaggtagccccgaaaaccgcacccgtttcctgcgcgaagtcctgaccgcgctggtcgatgtttggggcgcggaccgagtgggcgtgcgcctctcgcccaatggcgaaacgcagggctgcgacgacagcgacccgcccgccaccttcggcgcggcggcaaaggtcgtcgaagaccttggcctggccttcctcgaactgcgcgaacccggccccgaaggcaccttcggttcaaccgaagtgccaaagcagagcccgctgatccgcaaggcctattccggtccgctgatcctcaacagcgactacacgcccgaacaggccgtggccgatatcgaagccgaccgctgcgacgccgtgagctggggccgcgacttcatttccaaccccgacctgcccgaacgcttccgactgggcgcccagttgcagcccaatgtcaacgtgccgcaaagctggtaccttccgggccccgaaggctacatcgattacccgatgctaaccaaccaggtcgatattgcggcgggatga

SEQ ID NO: 29837 - protein, 370 aa, Erythrobacter sp. SD-21
MHEKLLEPLTLGAIEAKNRIFMAPLTRGRSTQPGSVPNEMMATYYRQRAGAGLTISEATGISVEGLGWPAAPGIWSDAQTEGWKPVTEAVHEEGGKIVLQMWHMGRLVHPDFLGGIPPVSASATKAPGHAHTFEGRKDYEQARELSNGEIARVVEDYRHAAENAKKAGFDGIQLHGANGYLVDQFLRDSTNLREDDYGGSPENRTRFLREVLTALVDVWGADRVGVRLSPNGETQGCDDSDPPATFGAAAKVVEDLGLAFLELREPGPEGTFGSTEVPKQSPLIRKAYSGPLILNSDYTPEQAVADIEADRCDAVSWGRDFISNPDLPERFRLGAQLQPNVNVPQSWYLPGPEGYIDYPMLTNQVDIAAG

SEQ ID NO: 29838 - DNA, 1128 bp, Moritella sp. PE36
  CDS (1)..(1128): transl_table=11
atgatgaaaaatgacgtattattcacgccaaccaaattaggcgctcacgtgttaaaaaaccgcattgtaatgccaccattaacacgttcacgcagtacacaaccgaacaatattccgaatgaattaatggctaagtattacactcagcgcgcgtcagctgggtttatggtaaccgaaggcactcagattgaaccgcgtggtcagggttacgcttggacaccgggaatttactctgatgagcaagtagaaggttggaaaaaagtaaccaaatctgtacatgatgcaggcggcattatctttgctcaactgtggcatgtcggccgtgtttcccataccagtttacaacccggtggcgcagcgcccgtcgcaccatcagctattctagcggataacgtgaaagtgttcattgaaacagcgccaggtgaaggtgcattggcagacccaagcatgccacgtgagctatcaaccgcggaagtaaaagaacttgttacgctgtatgcacaagccgcgaagaatgccatgaaagctggttttgatggggttgaattacattgtgcgaacggttacttagtgaatcaattcatctcggagcacagtaataaacggtccgatgaatacggtggtagtttagaaaatcgtttacgcttcttaaaagaaatcacgcaggcagtagccgatgaagtaggaaaagaaaatgtcggtgttcgatttgcgccactgttttccagcactgacgatgtacgcgtttatcttggcttagttgaagataatccacatgaaacgtatatcgaagcaattaaaacaatcgaaaatatcggtattggttacctgtcattagcagaagcggattgggataatgcccctgatttacctgacgctttctatcaagatgtacgtaacacatttactggcatcatcatgtatgcaggtaagtactcggtagaaaaagccaagcatatccttaacctcggttacggtgatatttttgggtttggccgtccatttattgccaacccagatttgcccgctcgcattaaacatgattggacattcaatgaggtggacccgacaacgatgtacggtggtacagaagtaggctacgcggattacgctgaatatatagtttaa

SEQ ID NO: 29839 - protein, 375 aa, Moritella sp. PE36
MMKNDVLFTPTKLGAHVLKNRIVMPPLTRSRSTQPNNIPNELMAKYYTQRASAGFMVTEGTQIEPRGQGYAWTPGIYSDEQVEGWKKVTKSVHDAGGIIFAQLWHVGRVSHTSLQPGGAAPVAPSAILADNVKVFIETAPGEGALADPSMPRELSTAEVKELVTLYAQAAKNAMKAGFDGVELHCANGYLVNQFISEHSNKRSDEYGGSLENRLRFLKEITQAVADEVGKENVGVRFAPLFSSTDDVRVYLGLVEDNPHETYIEAIKTIENIGIGYLSLAEADWDNAPDLPDAFYQDVRNTFTGIIMYAGKYSVEKAKHILNLGYGDIFGFGRPFIANPDLPARIKHDWTFNEVDPTTMYGGTEVGYADYAEYIV

SEQ ID NO: 29840 - DNA, 1119 bp, Polyangium cellulosum
  CDS (1)..(1119): transl_table=11
gtgaccactgccgccgacctgctgttcagccccttcaagctcggccccctgtcgctgccgaaccgcctcgtgatggcgccgatgacgcgctgccgcgcgggcgagggcaacgtgcccaccgagctcaacgcggtgtattacgagcagcgcgcgtccgccggcctcatcatcaccgaggccacccaggtcagccagcagggcgtggggtacctccgcacgccgggcatccacaccgacgcgcaggtcgaggggtggcggcgcgtcacggacgcggtgcaccgggcaggggggcacatcttcgcccagctctggcacgtcgggcgggcgtcgcacgtctcgttccagccgggccggcaggcgcctgtctcgtcctcggccctccccatccgcaccggccacgcgcacacgcccgagggcgcgcagccgtacagcaccccgcgcgccctcgagacgcgcgagatccccggcgtcgtcgcgcagttcgaggacggcgcgcgccgggcgagggcggccggcttcgatggaatcgagctccacgcggcgaacggctacatcatcgaccagttcctccgcgacggcgtgaaccagcggacggaccagtatggcggctcggtcgagaaccgggcgcggttcctgctcgagatcgtcgacgcggtgaccggcgtcttcgacccggaccgggtcggcgcgcgggtctcgccgctgggcggctacaacgacatgagcgactcgaacccgaaggcgatcttcggccacgtcgccgccgagctctcggcgcgcaagctcgcctacctgcacgtcgtggagcccgtggacgggcaggcggaggacgccgcgggtcgcgtgatgcccctgctccgcgagcggttccgcggcgtcctcatggcgaacggcggctacacgctcgagacagcggaggcggcgctgcggacgggcgcggcggacctcgtctcgttcggcgcgccgttcctggccaaccccgatctgcccgagcgcctgtcgcgccgggcgccgctcaacccgcccgacgtgtcgacgttctactccgaggggccgcgcggctacaccgattatccgcgcctcgccgaggcgcaggccgccgcgcagccgtcggcctga

SEQ ID NO: 29841 - protein, 372 aa, Polyangium cellulosum
MTTAADLLFSPFKLGPLSLPNRLVMAPMTRCRAGEGNVPTELNAVYYEQRASAGLIITEATQVSQQGVGYLRTPGIHTDAQVEGWRRVTDAVHRAGGHIFAQLWHVGRASHVSFQPGRQAPVSSSALPIRTGHAHTPEGAQPYSTPRALETREIPGVVAQFEDGARRARAAGFDGIELHAANGYIIDQFLRDGVNQRTDQYGGSVENRARFLLEIVDAVTGVFDPDRVGARVSPLGGYNDMSDSNPKAIFGHVAAELSARKLAYLHVVEPVDGQAEDAAGRVMPLLRERFRGVLMANGGYTLETAEAALRTGAADLVSFGAPFLANPDLPERLSRRAPLNPPDVSTFYSEGPRGYTDYPRLAEAQAAAQPSA

SEQ ID NO: 29842 - DNA, 1143 bp, Neotyphodium lolii
  CDS (1)..(1143)
atgtcaacttcaaatcttttcacgccgctccaatttggaaaatgtctcctccagcacaagctagtcctctcaccgatgactcgttttcgtgcggataatgaaggcgtcccgcttccctatgtcaagacttactactgtcaacgagcatctctccctggcaccctgcttcttaccgaagctactgccatctctcgccgagccagagggtttcccaatgtccccgggatttggagtcaggagcaaattgcaggctggaaagaggtagttgatgctgtgcatgcgaaggggtcttatatctggctgcagctttgggcgactggacgagcagccgaggttggtgttctgaaagcgaatggatttgatctcgtatccagcagtgccgttccagtctcccccggtgagcccacaccccgggcgctcagcgacgatgagatcaactcatacatcggtgatttcgttcaagcagccaaaaatgcagtcctagaagcaggatttgacggagtcgaactccacggtgccaatggatttctcatcgatcagtttctccaatctccttgcaaccaacgtaccgatcaatggggcggttgcattgagaatcgctcacggttcggtcttgaaatcacccggcgagtcatcgacgctgtcggtaaagaccatgtgggcatgaagctttccacttggagtaccttccagggaatgggcaccatggacgacctcatacctcagttcgagcatttcatcatgcgccttcgtgagataggcattgcctatctacaccttgctaactctcgctgggtagaggaggaagaccccaccatcagaacacatccagatattcataatgagacttttgtgcgcatgtgggggaaagagaagcctgtccttttggctggtggctacggcccggagtccgccaagcttgtggtagatgaaacatactctgaccacaagaacatcggtgtcgtttttggacgacactatatatccaacccagatcttccattccggctgaaaatgggactccctcttcaaaagtacaatcgggaaactttctacattccgttctctgacgagggatacttggattacccctatagtgaggaatacataacagagaacaagaagcaggcagttctagcataa

SEQ ID NO: 29843 - protein, 380 aa, Neotyphodium lolii
MSTSNLFTPLQFGKCLLQHKLVLSPMTRFRADNEGVPLPYVKTYYCQRASLPGTLLLTEATAISRRARGFPNVPGIWSQEQIAGWKEVVDAVHAKGSYIWLQLWATGRAAEVGVLKANGFDLVSSSAVPVSPGEPTPRALSDDEINSYIGDFVQAAKNAVLEAGFDGVELHGANGFLIDQFLQSPCNQRTDQWGGCIENRSRFGLEITRRVIDAVGKDHVGMKLSTWSTFQGMGTMDDLIPQFEHFIMRLREIGIAYLHLANSRWVEEEDPTIRTHPDIHNETFVRMWGKEKPVLLAGGYGPESAKLVVDETYSDHKNIGVVFGRHYISNPDLPFRLKMGLPLQKYNRETFYIPFSDEGYLDYPYSEEYITENKKQAVLA

SEQ ID NO: 29844 - DNA, 1125 bp, Setaria italica
  CDS (1)..(1125)
atggttcatcaagaggtgatgccgctcctgacgccattcaagatggggcggttcgagctctcccaccgggtggtgctcgcgccgctgacccggtgccgctcctacggtaacgtgccgcagccgcacgccgcggtgtactactcccagcgcgccaccaggggtggcctcctcatcacggaggctacaggtgtgtctgccactgcgcaggggtacccggagacccccggcatctggacgcaagagcaggtcgaggcgtggaagcccatcgtcgacgccgtccaccgcaagggcgccctcttcttctgccaaatgtggcatgtcggcagggtctccacaaacgattttcaacctgatggacaggcgcccatttcaagcacggacaagcagatttccccagacgccgagcccggcatggtgtactccaagccgcggcggctgcaggtggacgagatcccagggatcgtcgacgacttccggcgcgctgcgcggaatgccattgaggcagggtttgatggcgtggagatacacggtgcgaatgggtacctccttgagcaattcatgaaggacggagccaatgaccgagatgatgagtacggtggaagcctcgagaataggtgccgcttcgcagtggaggtggtcgacgctgtggtccgtgaggtgggagcgcagcgtgtgggcatcaggctgtcaccgttcctcgactacatggactgtgtggactctgacccagcggcgctcgccgactacatggttcggcagcttaacaagcacgaggggttcctctactgtcacatggtggagcctagaatggccgttgttgatggtcgtaggcagatccctcacaggcttttgccattccggaaggcattcaatggtatgttcattgccgctggcggatatgatcgtgaggaaggcaacaaagtagtcacagatggctacaccgacctcgttgcttatggaaggctcttcttggccaatccggacctacctaaaaggtttgagcttggcgcgccgctgaatgagtatgaccgttccacattctacacgcaggatccaattgttggctatacggattatccgttccttgacgaagacagcagtgacctaactgcaaatgatgcttaa

SEQ ID NO: 29845 - protein, 374 aa, Setaria italica
MVHQEVMPLLTPFKMGRFELSHRVVLAPLTRCRSYGNVPQPHAAVYYSQRATRGGLLITEATGVSATAQGYPETPGIWTQEQVEAWKPIVDAVHRKGALFFCQMWHVGRVSTNDFQPDGQAPISSTDKQISPDAEPGMVYSKPRRLQVDEIPGIVDDFRRAARNAIEAGFDGVEIHGANGYLLEQFMKDGANDRDDEYGGSLENRCRFAVEVVDAVVREVGAQRVGIRLSPFLDYMDCVDSDPAALADYMVRQLNKHEGFLYCHMVEPRMAVVDGRRQIPHRLLPFRKAFNGMFIAAGGYDREEGNKVVTDGYTDLVAYGRLFLANPDLPKRFELGAPLNEYDRSTFYTQDPIVGYTDYPFLDEDSSDLTANDA

SEQ ID NO: 29846 - DNA, 1098 bp, Magnetospirillum gryphiswaldense
  CDS (1)..(1098): transl_table=11
ttgaccgcatccgctctccatcccctgtttcagcccctgcatttgggccccatcaccctggccaaccgcatcgtcatggcgcccctgacccgtaaccgggccgatgccggcaacgtggcggcggcgatcaccgccgattactacgctcagcgcgccggtgccggactgatcgtggccgaaggctcgcaggtcagccccatgggccaaggctatctggcgacgccgggtatccacagctccgaacaggtgaccggctggcgccgggtcaccgatgcggtgcacgctgccggcggtcgtatcttcctgcaattgtggcatgtgggccgggtgtcgcatgtgtcgctgttgcccggccaagccgcccccctggcgccatcggcggtcaccgccaataccaagacctatctgggggaaggtttcgtgccggtctcggcgccgcgcgcccttgatctggcggaaatccccggcatcgtcgacgatttccgccggggcgccgccaatgcggccctggccggcttcgacggcgtcgaaattcacgccgccaacggctatctgatcgatcaattcatgaaggacggcgccaacaagcgcaacgatgcctatggcggttccatcgacaaccgtacccgtctgttggccgaggtggccgccgccgtctgcgccgagatcggacgtgaccgcgtcggcgtgcggttgtcgcccgccggccccatcaacgattgcgccgacactgccccgcaagccttgttcgaactggcggtggacaagctggaatccatcggcccggtctatatccacatgatcgagggcatcaccggcgccacccgcgatactgatccggtggtggatttccaggcgctgcgccgccgtttcagcggcgtctacatggccaataactgccttgacctgaccagcgcccaggcggccatcgacgcccaaagggccgatctggtgtcgttcgggcgcgatttcatcgccaatcccgatctggtcgaacgcctgcgcggaggcgcccctctcaatgcccttgaccgcgccaccttgtatggcggcggggccaaggggtatgtggattatccggcgctggcgggatcgtga

SEQ ID NO: 29847 - protein, 365 aa, Magnetospirillum gryphiswaldense
MTASALHPLFQPLHLGPITLANRIVMAPLTRNRADAGNVAAAITADYYAQRAGAGLIVAEGSQVSPMGQGYLATPGIHSSEQVTGWRRVTDAVHAAGGRIFLQLWHVGRVSHVSLLPGQAAPLAPSAVTANTKTYLGEGFVPVSAPRALDLAEIPGIVDDFRRGAANAALAGFDGVEIHAANGYLIDQFMKDGANKRNDAYGGSIDNRTRLLAEVAAAVCAEIGRDRVGVRLSPAGPINDCADTAPQALFELAVDKLESIGPVYIHMIEGITGATRDTDPVVDFQALRRRFSGVYMANNCLDLTSAQAAIDAQRADLVSFGRDFIANPDLVERLRGGAPLNALDRATLYGGGAKGYVDYPALAGS

SEQ ID NO: 29848 - DNA, 1053 bp, Vitis vinifera
  CDS (1)..(1053)
  misc_feature (17)..(17): w is a or t
  misc_feature (24)..(24): w is a or t
  misc_feature (33)..(33): w is a or t
  misc_feature (111)..(111): y is t or c
  misc_feature (119)..(119): m is a or c
  misc_feature (130)..(130): y is t or c
  misc_feature (189)..(189): s is g or c
atggcgtctctgctgawacccccwtccctcttwtcactccatacaaattgggcaagttccagctctctcacagcaccattaaccaggcagagatcttggaacaatgttccycaaccacmtgctatcttayattactctcaaagaaccagcaaagggggtcttctcatagctgaagcaacgggagtttcsgacactgctcaagggtatccacatacaccgggcatatggacaaaagaacaagttgaagcatggaaacctattgtagatgatgtacatgctaaaggcggtatctttttttgtcagatttggcatgtggggagggtttcaaacacgggtatgtttccagccaaacgggcaagctccaatctcttttctcacctccccgggcggctaacaacagatgaaatccctcaagttgtaaaggattttagacttgctgcaaggaacgctattgaagctggttttgatggagttgagatccatggggctcatggctacctacttgaccagttcatgaaagaccaggtcaatgatcgaactgacaaatatggtggatccctagagaacagatgccggtttcctttggaagtagttgaagctgttgttgatgagataggggcagacaaagttggaataaggctttctccatttgctacttatgcagaagcaggtgactcgaatccaagagctctaggcctttacatggctgaatccttgaataaatatgggcttctctactgccacatggttgagccaaggatgaaaacactcggagaaaaaagtgaatgtgcccatagtcttttgcccatgagaaaagctttcaatggtacattccttgttgctggggggtatgacagagaagatgggaacaacgctgtggcagagaatcgcgcagatcttgttgtgtatgggcgttggttcttggccaacccagatcttccaaagagatttgcgctcaatgctcctctcaacaagtacaacagagaaacattctatacacccgatcctattgttggttataccgattatccatttcttgaagataccgagtag

SEQ ID NO: 29849 - protein, 350 aa, Vitis vinifera
  misc_feature (6)..(6): The Xaa at location 6 stands for Ile, or Lys.
  misc_feature (11)..(11): The Xaa at location 11 stands for Leu, or Phe.
  misc_feature (40)..(40): The Xaa at location 40 stands for His, or Pro.
  misc_feature (44)..(44): The Xaa at location 44 stands for His, or Tyr.
MASLLXPPSLXSLHTNWASSSSLTAPLTRQRSWNNVPQPXAILXYSQRTSKGGLLIAEATGVSDTAQGYPHTPGIWTKEQVEAWKPIVDDVHAKGGIFFCQIWHVGRVSNTGMFPAKRASSNLFSHLPGRLTTDEIPQVVKDFRLAARNAIEAGFDGVEIHGAHGYLLDQFMKDQVNDRTDKYGGSLENRCRFPLEVVEAVVDEIGADKVGIRLSPFATYAEAGDSNPRALGLYMAESLNKYGLLYCHMVEPRMKTLGEKSECAHSLLPMRKAFNGTFLVAGGYDREDGNNAVAENRADLVVYGRWFLANPDLPKRFALNAPLNKYNRETFYTPDPIVGYTDYPFLEDTE

SEQ ID NO: 29850 - DNA, 1086 bp, Vitis vinifera
  CDS (1)..(1086)
atggacgggaaagtacaaagaataaatggcgtctctgctgaaacccccatccctcttatcactccatacaagttgggcaagttccagctctctcacagggttgttctagcaccattaaccaggcagagatcttggaacaatgttcctcaaccacatgctatcttacattactctcaaagaaccagcaaaggggatacaccaggcatatggacaaaagaacaagttgaagcatggaaacctattgtagatgctgtacatgctaaaggcggtatctttttttgtcagatttggcatgtggggagggtttcaaacacggatttccagccaaacgggcaagctccaatctcttgtacagacaagccattgacaccccaaatccgaggcaatggcattggtgttgaccagttctcacctccccggcggctaacaacagatgaaatccctcaagttgtaaaggattttagacttgctgcaaggaacgctattgaagctggttttgatggagtcgagatccatggggctcatggctacctacttgaccagttcatgaaagaccaggtcaatgatcgaactgacaaatatggtggatccctagagaacagatgccggtttgctttggaagtagttgaagctgttgttgatgagataggcgcagacaaagttggaatcaagctttctccatatgatgcttttggagaagcaggagactcgaatccaaaagctctaggcctttacatggctgaatccttgaataaatacgggcttctctactgccacatggttgaaccaaggatggaaacactcggagaaaaatgtgaatgtgcccatagtcttttgcccatgagaaaagctttcaatggtacgttccttgttactggggggtatgacagagaagatgggaacaacgctgtggcagagaatcgcgcagatcttgttgtgtatgggcgttggttcttggccaacccagatcttccaaagagatttgcgctcaatgctcctctcaacaagtacaacagagaaacattctatacacccgatcctattgttggttataacgattatccatttcttgaagataccgagtag

SEQ ID NO: 29851 - protein, 361 aa, Vitis vinifera
MDGKVQRINGVSAETPIPLITPYKLGKFQLSHRVVLAPLTRQRSWNNVPQPHAILHYSQRTSKGDTPGIWTKEQVEAWKPIVDAVHAKGGIFFCQIWHVGRVSNTDFQPNGQAPISCTDKPLTPQIRGNGIGVDQFSPPRRLTTDEIPQVVKDFRLAARNAIEAGFDGVEIHGAHGYLLDQFMKDQVNDRTDKYGGSLENRCRFALEVVEAVVDEIGADKVGIKLSPYDAFGEAGDSNPKALGLYMAESLNKYGLLYCHMVEPRMETLGEKCECAHSLLPMRKAFNGTFLVTGGYDREDGNNAVAENRADLVVYGRWFLANPDLPKRFALNAPLNKYNRETFYTPDPIVGYNDYPFLEDTE

SEQ ID NO: 29852 - DNA, 1140 bp, Vitis vinifera
  CDS (1)..(1140)
  misc_feature (476)..(476): r is g or a
  misc_feature (944)..(944): r is g or a
atggacgggaaagtacaaggactaaatggcgtttctgctgaaaccctcatccctcttatcactccatacaagttgggcaagttccagctctctcacagggttgttctagcaccattaaccagacagagatcttggaacaatgttcctcaaccacatgctatcttatattactctcaaagaaccagcaaagggggtcttctcatagccgaagcaacaggagtttctgacactgctcaagggtatccccatacaccgggcatatggacaaaagaacaagttgaagcatggaaacctattgtcgatgctgtacatgctaaaggcggtatctttttttgtcagatttggcatgtggggagggtttcaaacacggatttccagccaaacgggcaagctccaatctcttgtacagacaagccattgacaccccaaatccgaagcaatggcattgatgttgcccagttctcaactccacggcrgctaacaacagatgaaatccctcaagttgtaaatgattttagacttgctgcaaggaatgctattgaagctggatttgatggagttgagatccatggggctcatggctacctacttgaccagttcatgaaagaccaggtcaacgatcgaactgataaatatggtggatccctagagaacagatgccggtttgctttggaagtagttgaagctgttgttgatgagataggggcagataaagttggaataaggctttctccatttgctgcttatgcagaagcaggagactcaaatccaaaagctctaggcctttacatggctgagtccttgaataaatacgggcttctctactgccacatggttgagccaaggatgaaaacagtcggagaaaaatgcgaatgcccccatagtcttttgcccatgagaaaagctttcaatggtacattccttgttgctggggggtatgacaragaagacgggaacaatgctctggctgagaatcgtgcagatcttgttgcgtatgggcgttggttcttggccaacccagatcttcctaagagatttgcgctcaatgctcctctcaacaagtacaacagagaaaccttctatacacctgatcctgttcttggttacactgattatccatttcttgaagacatcgagtag

SEQ ID NO: 29853 - protein, 379 aa, Vitis vinifera
  misc_feature (159)..(159): The Xaa at location 159 stands for Arg, or Gln.
  misc_feature (315)..(315): The Xaa at location 315 stands for Arg, or Lys.
MDGKVQGLNGVSAETLIPLITPYKLGKFQLSHRVVLAPLTRQRSWNNVPQPHAILYYSQRTSKGGLLIAEATGVSDTAQGYPHTPGIWTKEQVEAWKPIVDAVHAKGGIFFCQIWHVGRVSNTDFQPNGQAPISCTDKPLTPQIRSNGIDVAQFSTPRXLTTDEIPQVVNDFRLAARNAIEAGFDGVEIHGAHGYLLDQFMKDQVNDRTDKYGGSLENRCRFALEVVEAVVDEIGADKVGIRLSPFAAYAEAGDSNPKALGLYMAESLNKYGLLYCHMVEPRMKTVGEKCECPHSLLPMRKAFNGTFLVAGGYDXEDGNNALAENRADLVAYGRWFLANPDLPKRFALNAPLNKYNRETFYTPDPVLGYTDYPFLEDIE

SEQ ID NO: 29854 - DNA, 1119 bp, Vitis vinifera
  CDS (1)..(1119)
atggaaggaaaagtgcaaggaaagcagccccttctcacaccatataagatgggcaagtttcaactctctcatagggtggttctggctccactaactagacagagatcttggaacaatgttcctcagccccatgcaatcttgtattactcccagagagccactaaaggggggcttctcataactgaagcaactggagtttctgacactgctcaaggctatgcacataccccgggtatatggacaaaagagcaagttgaagcctggaagcccattgtagatgctgttcatgctaaaggcagtatctttatttgtcagctttggcatgtgggaagagtttcaaacacagaattccagccaaatgggcaagctccattatcttctacagacaaggcgttgatgccacaagtccgaagcaatggctttgatgttgctgagttcacagctcctaggcggctaacaacagatgaagttcctcgagttgtcaatgattttagacttgctgcaagaaatgctatggaagctggttttgatggagttgagatccatggggctcatggctatctacttgaccagttcatgaaagaccaggtcaatgatcgaacagacaagtatggtggatccctagagaaccgttgcaggttcccattggaagtagtagaagcggttgttaatgagataggagctgataaggttggaataaggctttctccatttggccatcatgccgaggcaggagactctaatccaacagctctgggcctttacatggttgaatccttaaacaaatatggtgtcctctattgccatatggttgagccaaggataagagcagccggagaaatgtgtgagtgtccccacagccttgtgcccttgaggaaggctttcaatggcacattcatagccgctgggggttatgtgaaagaagacggaaacaatgctgtggctgaggagcgtgcagatcttgttgcatttggacgttggttcttagccaacccagatcttccaaaaagatttgcgctcaatgctcctctcaacaagtataacagggagacattctacgcacccgaacccataatcggctacactgattatccatttcttgaggatattgttgagtag

SEQ ID NO: 29855 - protein, 372 aa, Vitis vinifera
MEGKVQGKQPLLTPYKMGKFQLSHRVVLAPLTRQRSWNNVPQPHAILYYSQRATKGGLLITEATGVSDTAQGYAHTPGIWTKEQVEAWKPIVDAVHAKGSIFICQLWHVGRVSNTEFQPNGQAPLSSTDKALMPQVRSNGFDVAEFTAPRRLTTDEVPRVVNDFRLAARNAMEAGFDGVEIHGAHGYLLDQFMKDQVNDRTDKYGGSLENRCRFPLEVVEAVVNEIGADKVGIRLSPFGHHAEAGDSNPTALGLYMVESLNKYGVLYCHMVEPRIRAAGEMCECPHSLVPLRKAFNGTFIAAGGYVKEDGNNAVAEERADLVAFGRWFLANPDLPKRFALNAPLNKYNRETFYAPEPIIGYTDYPFLEDIVE

SEQ ID NO: 29856 - DNA, 1098 bp, Vitis vinifera
  CDS (1)..(1098)
atggcggaatcgtcggccgaagggaccaccactctcttttctccctacaagatgggcagattccaactctctcatagggtggcgctggcgccgatgacgaggtgcagggcgatgaatggaattccgcagccggcgctggcggaatactactctcagaggtccaccaacggcggattcctaatcactgaaggcactctgatctcccccacagccgctgggtttccacatgttccgggtatttacactggagaacaagtggaggcgtggaagaaggttgtggaggctgttcatgctaaaggggccattattttctgtcaactatggcatgttggccgagcatcccatcaagtgtatcaacctggtgggactggtgcacccatatcatcaaccagcaagcccatagcagggaggtggagaatcctcatgccagatgggagccatggaaagtacccggctcctcgagcgttgaaaacctctgaaataccagaggtggtggagcactatcgccagtcagccttgaatgcgattgcagcaggttttgatggaattgagatccacggtgcccatggctacctcattgaccaattcttgaaggatgggatcaatgacagaacagatgaatatggcggatccatttcaaaccggtgcaaattcttagtgcaggtggttcaggcagtagctgcagctatcggtccagatcgagttggtgtcagagtttcaccagcaattgatcaccttgaagccacagactcaaaccccctcaacctaggcttagcagtgattgagaggcttaacaagttgcagctagactggggctcaaagctcacttatctccatgtgacacagccccgatacacagcttatggccagacagagtcaggtagacatggcagtgaagaagaggaagctcaattaatgaggacttggagaagagcttatcagggaaccttcatttgcatattaagactcaaggttaatgcccctttgaataggtatatcagggcttatttctatacccaagatcctgtcaaaggatacacagactacccttttctgaacaaaggcagtgagagccatgagccactgtcacgcctctga

SEQ ID NO: 29857 - protein, 365 aa, Vitis vinifera
MAESSAEGTTTLFSPYKMGRFQLSHRVALAPMTRCRAMNGIPQPALAEYYSQRSTNGGFLITEGTLISPTAAGFPHVPGIYTGEQVEAWKKVVEAVHAKGAIIFCQLWHVGRASHQVYQPGGTGAPISSTSKPIAGRWRILMPDGSHGKYPAPRALKTSEIPEVVEHYRQSALNAIAAGFDGIEIHGAHGYLIDQFLKDGINDRTDEYGGSISNRCKFLVQVVQAVAAAIGPDRVGVRVSPAIDHLEATDSNPLNLGLAVIERLNKLQLDWGSKLTYLHVTQPRYTAYGQTESGRHGSEEEEAQLMRTWRRAYQGTFICILRLKVNAPLNRYIRAYFYTQDPVKGYTDYPFLNKGSESHEPLSRL

SEQ ID NO: 29858 - DNA, 1116 bp, Vitis vinifera
  CDS (1)..(1116)
  misc_feature (261)..(261): y is t or c
  misc_feature (282)..(282): y is t or c
  misc_feature (308)..(308): w is a or t
  misc_feature (342)..(342): m is a or c
  misc_feature (344)..(344): s is g or c
  misc_feature (520)..(520): r is g or a
  misc_feature (855)..(855): y is t or c
atggaaggaaaagtgcaaggagagcagccccttctcacaccatacaagatgggcaagtttcagctatctcatagggtggttctggctccactaactagacagagatcttggaacaatgttcctcagccccatgcaatcttgtattactcccagagagccactaaaggggggcttctcataactgaagcaactggagtttccgacactgctcaaggctatgcacataccccgggtatatggacaaaagagcaagttgaagcytggaagcccattgtagatgcygttcatgctaaaggcagtatctttawttgtcagctttggcatgtgggaagagtttcaaamasagaattccagccaaatgggcaagctccattatcttctacagacaaggcattgacgccacaagtccgaagcaatggctttgatgttgctgagttcacagctcctaggcggctaacaacagatgaagttcctcgagttgtcaatgattttagacttgctgcaagaaatgctatggaarctggttttgatggagttgagatccatggagctcatggctatctacttgaccagttcatgaaagaccaggtcaatgatcgaacagacaagtatggtggatcacaagagaaccgttgcaggttcccattggaagtagtagaagcggttgttaatgagataggagctgataaggttggaataaggctttctccatttggccatcatgcccaggcaggagactccaatccaacagctctgggccgttacatggttgaatccttaaacaaatatggtgtcctctattgccacatggttgagccaaggataagagcagccggagaaatgtatgagggtccycacagcctcgtgcccttgagaaaggatttcaatggcacattcatagccgctgggggttatgtgaaagaagacagaaacaatgctgtggctgaggagcgtgcagatcttgttgcatttggacgttggttcttagccaacccagatcttccaaaaagatttgcgctcaatgctcctctcaacaagtatgagagggagacattctacgcacccgaacccataatcgactacactgattatccatttcttgaggattttgagtag

SEQ ID NO: 29859 - protein, 371 aa, Vitis vinifera
  misc_feature (103)..(103): The Xaa at location 103 stands for Asn, or Ile.
  misc_feature (114)..(114): The Xaa at location 114 stands for Asn, or Lys.
  misc_feature (115)..(115): The Xaa at location 115 stands for Arg, or Thr.
  misc_feature (174)..(174): The Xaa at location 174 stands for Ala, or Thr.
MEGKVQGEQPLLTPYKMGKFQLSHRVVLAPLTRQRSWNNVPQPHAILYYSQRATKGGLLITEATGVSDTAQGYAHTPGIWTKEQVEAWKPIVDAVHAKGSIFXCQLWHVGRVSXXEFQPNGQAPLSSTDKALTPQVRSNGFDVAEFTAPRRLTTDEVPRVVNDFRLAARNAMEXGFDGVEIHGAHGYLLDQFMKDQVNDRTDKYGGSQENRCRFPLEVVEAVVNEIGADKVGIRLSPFGHHAQAGDSNPTALGRYMVESLNKYGVLYCHMVEPRIRAAGEMYEGPHSLVPLRKDFNGTFIAAGGYVKEDRNNAVAEERADLVAFGRWFLANPDLPKRFALNAPLNKYERETFYAPEPIIDYTDYPFLEDFE

SEQ ID NO: 29860 - DNA, 1077 bp, Vitis vinifera
  CDS (1)..(1077)
  misc_feature (222)..(222): y is t or c
  misc_feature (481)..(481): r is g or a
atggctaatttttctttcactctaaccttttgcagggtggttctggctccactaactagacagagatcttggaacaatgttcctcagccccatgcaatcttgtattactcccagagagccactaaaggggggcttctcataactgaagcaactggagtttccgacactgctcaaggctatgcacataccccgggtatatggacaaaagagcaagttgaagcytggaagcccattgtagatgccgttcatgctaaaggcagtatctttatttgtcagctttggcatgtgggaagagtttcaaaaagagaattccagccaaatgggcaagctccattatcttctacagacaaggcattgacgccacaagtccgaagcaatggctttgatgttgctgagttcacagctcctaggcggctaacaacagatgaagttcctcgagttgtcaatgattttagacttgctgcaagaaatgctatggaarctggttttgatggagttgagatccatggagctcatggctatctacttgaccagttcatgaaagaccaggtcaatgatcgaacagacaagtatggtggatcacaagagaaccgttgcaggttcccattggaagtagtagaagcggttgttaatgagataggagctgataaggttggaataaggctttctccatttggccatcatgcccaggcaggagactccaatccaacagctctgggccgttacatggttgaatccttaaacaaatatggtgtcctctattgccacatggttgagccaaggataagagcagccggagaaatgtatgagggtccccacagcctcgtgcccttgagaaaggctttcaatggcacattcatagccgctgggggttatgtgaaagaagacggaaacaatgctgtggctgaggagcgtgcagatcttgttgcatttggacgttggttcttagccaacccagatcttccaaaaagatttgcgctcaatgctcctctcaacaagtatgacagggagacattctacgcacccgaacccataatcggctacactgattatccatttcttgaggattttgagtag

SEQ ID NO: 29861 - protein, 358 aa, Vitis vinifera
  misc_feature (161)..(161): The Xaa at location 161 stands for Ala, or Thr.
MANFSFTLTFCRVVLAPLTRQRSWNNVPQPHAILYYSQRATKGGLLITEATGVSDTAQGYAHTPGIWTKEQVEAWKPIVDAVHAKGSIFICQLWHVGRVSKREFQPNGQAPLSSTDKALTPQVRSNGFDVAEFTAPRRLTTDEVPRVVNDFRLAARNAMEXGFDGVEIHGAHGYLLDQFMKDQVNDRTDKYGGSQENRCRFPLEVVEAVVNEIGADKVGIRLSPFGHHAQAGDSNPTALGRYMVESLNKYGVLYCHMVEPRIRAAGEMYEGPHSLVPLRKAFNGTFIAAGGYVKEDGNNAVAEERADLVAFGRWFLANPDLPKRFALNAPLNKYDRETFYAPEPIIGYTDYPFLEDFE

SEQ ID NO: 29862 - DNA, 1104 bp, Vitis vinifera
  CDS (1)..(1104)
atggacgggaaagtacaaggaataaatggcgtctctgctgaaacccccatccctcttatcactccatacaaattgggcaagttccagctctctcacagggttgttctagcaccattaaccaggcagagatcttggaacaatgttcctcaaccacatgctatcttacattactctcaaagaaccagcaaagggggtcttctcatagctgaagcaacgggagtttcggacactgctcaagggtatccaaatacaccaggcatatggacaaaagaacaagttgaagcttggaaacctattgtagatgctgttcatgctaaaggcggtatctttttttgtcagatttggcatgtggggagggtttcaaacacgggtttccagccaaacgggcaagctccaatctcttgtacagacaagccattgacaccccaaatcggagccaatggcattgaatatgaaatccctcaagttgtaaaggattttagacttgctgcaaggaacgctattgaagctggttttgatggagttgagatccatggggctcatggctacctacttgaccagttcatgaaagaccaggtcaatgatcgaactgacaaatatggtggatccctagagaacagatgccggtttcctttggaagtagttgaagctgttgttgatgagataggggcagacaaagttggaataaggctttctccatttgctacttatgcagaagcaggtgactcgaatccaagagctctaggcctttacatggctgaatccttgaataaatatgggcttctctactgccacatggttgagccaaggatgaaaacactcggagaaaaaagtgaatgtgcccatagtcttttgcccatgagaaaagctttcaatggtacattccttgttgctggggggtatgacagagaagatgggaacaacgctgtggcagagaatcgcgcagatcttgttgtgtatgggcgttggttcttggccaacccagatcttccaaagagatttgcgctcaatgctcctctcaacaagtacaacagagaaacattctatacacccgatcctgttcttggttacactgattatccatttcttgaagacgcggagtag

SEQ ID NO: 29863 - protein, 367 aa, Vitis vinifera
MDGKVQGINGVSAETPIPLITPYKLGKFQLSHRVVLAPLTRQRSWNNVPQPHAILHYSQRTSKGGLLIAEATGVSDTAQGYPNTPGIWTKEQVEAWKPIVDAVHAKGGIFFCQIWHVGRVSNTGFQPNGQAPISCTDKPLTPQIGANGIEYEIPQVVKDFRLAARNAIEAGFDGVEIHGAHGYLLDQFMKDQVNDRTDKYGGSLENRCRFPLEVVEAVVDEIGADKVGIRLSPFATYAEAGDSNPRALGLYMAESLNKYGLLYCHMVEPRMKTLGEKSECAHSLLPMRKAFNGTFLVAGGYDREDGNNAVAENRADLVVYGRWFLANPDLPKRFALNAPLNKYNRETFYTPDPVLGYTDYPFLEDAE

SEQ ID NO: 29864 - DNA, 1065 bp, Agrobacterium tumefaciens
  CDS (1)..(1065): transl_table=11
atgacagatacagacctcttcagcgcctacgaccttggcggcctcaccctggccaaccgcgccgacgcggggctcgtgcccagccagtttgcggcggactattatgcccagcgcgcgagcgccgggctcatcatcaccgaggcaacgcaggtctcccggcaggcccagggctaccagaatacgcccggcctctacacgccggagcagattgcgggctggcgcaaggtaacagacgcggtccatgccaagggcggccgtatattcgtccagctttggcatgtcggtcgcgtcagccatgtcgaccttcacggtggtgaagctccggttgcgccgtcagcagtccgcgccgagaccaagacctttgtgaacaatggctttgccgatgtatccgagccgcgtgcgctggcgctcgacgaaatcccgacgatcgtcgaggatttccgcaaggccgctgccaacgcgatcgaagccgggttcgatggtgtcgaggtgcatggcgcgaatggctatctgcttgaccagttcctgcgggaaaccgcaaacgtcaggaccgatgcctacggtggttcgatcgaaaaccgtgcccggctgctgctcgaagtgacggctgcggttgcaggcgagatcggcacacagcgcacgggcgttcgcctctcgccggtgtcgccggccagcggcatcgtgccggcaagcgacgagcagccgcaattcaaccacgtcgtcgaagcgctggacggactgggcatcgcctatatccacgttgtggagggcgctaccggcggccctcgcgatgcgacgccgtttgatttcgacgcgctgcggcagcgcttcagcaaaacctacatcgccaacaacggttatgaccttgagctggcgaagtttcgcgtcagcgagggcaaggccgatctgatcgccttcggccatcacttcatcgccaatcccgatctggtcgagcgcctgcaaggcggcgatccgcttgcccagatgaatccagcgacaatttatggtggcggtgcggaaggctatacagactatcccaccgccatggcatccactgacgcctga

SEQ ID NO: 29865 - protein, 354 aa, Agrobacterium tumefaciens
MTDTDLFSAYDLGGLTLANRADAGLVPSQFAADYYAQRASAGLIITEATQVSRQAQGYQNTPGLYTPEQIAGWRKVTDAVHAKGGRIFVQLWHVGRVSHVDLHGGEAPVAPSAVRAETKTFVNNGFADVSEPRALALDEIPTIVEDFRKAAANAIEAGFDGVEVHGANGYLLDQFLRETANVRTDAYGGSIENRARLLLEVTAAVAGEIGTQRTGVRLSPVSPASGIVPASDEQPQFNHVVEALDGLGIAYIHVVEGATGGPRDATPFDFDALRQRFSKTYIANNGYDLELAKFRVSEGKADLIAFGHHFIANPDLVERLQGGDPLAQMNPATIYGGGAEGYTDYPTAMASTDA

SEQ ID NO: 29866 - DNA, 1140 bp, Catharanthus roseus
  CDS (1)..(1140)
  misc_feature (705)..(705): n is a, g, c or t
atggcaaagcaagtagataatggacaagaagagcagcagcagaatccccaaaatcctctgcttaccccttataaattgggaaaattccaactctctcatagaattgttttggcacctctgacaaggcaaagatcttatggaaatgttccacagccacatgctgtattatactactctcaaagaacctccaaaggaggtctactcataagtgaagccgctggagtttctaacacagctcaagggtacccaatgacacctggtatatggactaaagaacaagttgaggcctggaaacctattgtagatgcagttcatgccaaaggtggtgtcttcttttgccagatagggcatgttggaagagtttcaaattacagttatcagccaaatgggcaggcgccaatctcttcgacagacaagggattaacccctctatatcgagcaaatggtattggttatgtagagcatactcctcctagaagactaacaacagatgaattgcccggaattgtcaatgatttcagggctgctctgaatgccattgaagctggctttgatggagttgagattcatggagctcatggttatctaatagatcaatttttgaaggatcaagtcaatgacagcacagatgaatatggagggtctttggagaaccgttgcaggtttgctctggagatagttgaagctgtctccaatgcaattggngcagacagggttgggattagactttctccttttgctggctacatggaatcaggagactcaaatcctgaagcattaggcctttacatggctgaagccttgaacaagtatggaatcttgtattgtcacatggtgaacccaaggatgaaaactcttggagagaactgtgaggttcctcatagtttgctgccaatgagaaaggctttcagaggtactttcatggctgcaggtggttatgacagagaagatgggatcaaagccttggctgaaaacagagctgatcttgttgtctatggacgtctgttcttggcaaatccagatttgcccaagagatttgagttgaatgctcctctcaacaagtacaaccgagaaactttctacataccagatcctgttcttggatacactgattatccatttcttgaagccactgaatga

SEQ ID NO: 29867 - protein, 379 aa, Catharanthus roseus
MAKQVDNGQEEQQQNPQNPLLTPYKLGKFQLSHRIVLAPLTRQRSYGNVPQPHAVLYYSQRTSKGGLLISEAAGVSNTAQGYPMTPGIWTKEQVEAWKPIVDAVHAKGGVFFCQIGHVGRVSNYSYQPNGQAPISSTDKGLTPLYRANGIGYVEHTPPRRLTTDELPGIVNDFRAALNAIEAGFDGVEIHGAHGYLIDQFLKDQVNDSTDEYGGSLENRCRFALEIVEAVSNAIGADRVGIRLSPFAGYMESGDSNPEALGLYMAEALNKYGILYCHMVNPRMKTLGENCEVPHSLLPMRKAFRGTFMAAGGYDREDGIKALAENRADLVVYGRLFLANPDLPKRFELNAPLNKYNRETFYIPDPVLGYTDYPFLEATE

SEQ ID NO: 29868 - DNA, 1116 bp, Agrobacterium tumefaciens
  CDS (1)..(1116): transl_table=11
atgaccagtcttttcgaaccggcacaggccggcgatatcgcactcgccaaccgcatcgtcatggctcctctcacccgcaatcgctccccgggcgccattcccaacaatctcaacgccacctattacgagcagcgggcgacagccggcctgatcgtcactgaaggcacgcccatttcccagcagggccagggttacgccgatgttcccggtctttataagcgggaagcgattgaaggctggaaaaagatcactgacggcgttcattcggcgggcggcaagatcgttgcccaaatctggcacgtgggccgaatttcccacacctcgttgcagccgcatggtggccagccggtcgccccctcggccatcaccgccaaatcgaagacctatatcatcaatgatgacggcaccggtgcctttgccgaaacctccgagccccgtgccctcaccatcgacgatatcggcctcatcctcgaggattaccgcagtggcgcgcgcgcggcactggaggccggtttcgacggcgtcgaaatccatgccgccaatggttacctgatcgagcagttcctgaaatccagcaccaaccagcgcacggatgattacggtggctccatcgaaaaccgcgctcgcttcctgctggaagtcgtcgacgcggtggcggaagagatcggcgccggccgcaccggcatccgcctctcgccagttacccctgccaacgatattttcgaggctgatccgcaaccgctctataattacgtcgtcgagcagctgggcaagcgcaatctcgccttcatccatgtcgttgaaggtgcaacgggcggtccgcgcgatttcaagcagggcgacaagcctttcgattacgcgtccttcaaggcggcttatcgtaatgccggcggcaagggcctgtggatcgccaacaatggttacgacaggcagagcgccatcgaagccgtggaaagtggcaaggttgatgccgttgctttcgggaaggccttcatcgccaatcctgatctggtgcgccgcctgaaaaacgacgcgccgctgaacgcaccgaaccagccgaccttctatggcggcggcgccgaaggttacaccgactatccggccctcgcccaatag

SEQ ID NO: 29869 - protein, 371 aa, Agrobacterium tumefaciens
MTSLFEPAQAGDIALANRIVMAPLTRNRSPGAIPNNLNATYYEQRATAGLIVTEGTPISQQGQGYADVPGLYKREAIEGWKKITDGVHSAGGKIVAQIWHVGRISHTSLQPHGGQPVAPSAITAKSKTYIINDDGTGAFAETSEPRALTIDDIGLILEDYRSGARAALEAGFDGVEIHAANGYLIEQFLKSSTNQRTDDYGGSIENRARFLLEVVDAVAEEIGAGRTGIRLSPVTPANDIFEADPQPLYNYVVEQLGKRNLAFIHVVEGATGGPRDFKQGDKPFDYASFKAAYRNAGGKGLWIANNGYDRQSAIEAVESGKVDAVAFGKAFIANPDLVRRLKNDAPLNAPNQPTFYGGGAEGYTDYPALAQ

SEQ ID NO: 29870 - DNA, 1098 bp, Enterobacter cloacae
  CDS (1)..(1098): transl_table=11
atgtccgctgaaaagctgtttaccccactgaaagtgggtgccgttactgccccaaaccgcgtgtttatggccccacttacccgtctgcgcagcatcgagccgggcgatatcccaacgccattgatgggtgagtattaccgccagcgcgccagcgcgggcctgattatctccgaagccacgcagatttctgctcaggcaaaaggctacgccggtgcaccgggtctgcacagcccggaacagatcgccgcgtggaaaaaaatcaccgcaggcgtgcatgctgaagatggccgtattgcggttcagctgtggcacaccggtcgtatctcacacagcagcatccagcctggcggtcaggcgccggtttctgcctctgccctgaacgccaatacccgcacttccctgcgcgatgaaaacggtaatgcgatccgcgtcgacaccaccacgccacgcgcgctggagctggacgagatcccgggtatcgtgaatgatttccgtcaggccgtcgccaacgcccgggaagcgggcttcgacctggttgagcttcactctgcgcacggttacctgctgcatcagttcctgtccccgtcttccaaccagcgtaccgaccagtacggcggcagcgttgaaaaccgcgcgcgtctggtgcttgaagtggtggatgctgtctgtaatgagtggagcgcagaccgcattggtattcgtgtctccccgatcggtactttccagaacgtcgacaacggtccgaacgaagaagcagacgcgctgtatctgattgaagagctggcgaaacgcggtatcgcctatctgcacatgtccgagacggacttggcaggcggcaagccttacagtgaagccttccgtcagaaagtgcgcgagcgcttccacggcgtgattatcggggcgggtgcgtatacggcagaaaaagccgaggatttgatcggtaaaggcctgatcgacgccgtggcctttggccgtgactacattgctaacccggatctggttgcccgtttgcagaaaaaagccgaactgaacccgcagcgtcctgaaagcttctatggcggcggcgcggaaggttataccgactacccttcactgtaa

SEQ ID NO: 29871 - protein, 365 aa, Enterobacter cloacae
MSAEKLFTPLKVGAVTAPNRVFMAPLTRLRSIEPGDIPTPLMGEYYRQRASAGLIISEATQISAQAKGYAGAPGLHSPEQIAAWKKITAGVHAEDGRIAVQLWHTGRISHSSIQPGGQAPVSASALNANTRTSLRDENGNAIRVDTTTPRALELDEIPGIVNDFRQAVANAREAGFDLVELHSAHGYLLHQFLSPSSNQRTDQYGGSVENRARLVLEVVDAVCNEWSADRIGIRVSPIGTFQNVDNGPNEEADALYLIEELAKRGIAYLHMSETDLAGGKPYSEAFRQKVRERFHGVIIGAGAYTAEKAEDLIGKGLIDAVAFGRDYIANPDLVARLQKKAELNPQRPESFYGGGAEGYTDYPSL

SEQ ID NO: 29872 - DNA, 1155 bp, Vigna unguiculata
  CDS (1)..(1155)
atggtcaccgccaccgccaccgccgccgccaccgctccttctcaccaggcaattcctcttctcactccctacaagatgggcaaattcaatctctctcacagagttgtcttggcaccgctctccagagagaggtcctacaacaacgttccgcaaccccacgccgtcgtctattattctcagcgaacctccaacggtggccttctcatcgccgaagctaccggagtttccgacaccgctcaagggtaccccaacacgcctggcatatggacgaaagagcaggtggaagcatggaaacccatcgtcgatgccgttcatgccaaaggcggtatcttcttttgccagatttggcatgtaggaagggtttcagattcaagttatcagccgaatgggcaagcacccatttcttctaccgacaagccactgccaccaacgcctcgagctaacggccttggatatatcgaacacacgccaccacggcgcctaacgaccgaagaacttcctggtatcgtcaatgacttcagaattgctgcaaggaatgccatcgaagctggttttgatggggttgaggtccatggggcacatgggtacctacttgatcaatttttgaaagaccaggctaatgacagaacagatcaatacggtggatccctcgagaaccggtgcagacttcctctggaggttgttgaagctgttgtgaatgaggttggggctgatagagttggaattaggttatcaccttttgcagactttaacgattgtggtgactcaaatcccctgcaactggggctttacatggtcaatgcactcaataagtataacattctctactgtcacatggtggaacccagaatgggaagtgttggaggtccagatgaaaacctgacgccaatgagaaaggtcttcaatggcacttttatagttgccggaggttatgaccgggaagatgggatcaaagccattgctgaagacagggctgatcttgttgcctatggccgtttgttcttggccaatccagatttgccaaagagatttgctctcaatgctcctctcaaccagtataatcgcaagacattctaccacgaggatcctgatccgcttgttgggtacatcgattatccgtttcttgatgaagaatcgaacggtgtagcatcctag

SEQ ID NO: 29873 - protein, 384 aa, Vigna unguiculata
MVTATATAAATAPSHQAIPLLTPYKMGKFNLSHRVVLAPLSRERSYNNVPQPHAVVYYSQRTSNGGLLIAEATGVSDTAQGYPNTPGIWTKEQVEAWKPIVDAVHAKGGIFFCQIWHVGRVSDSSYQPNGQAPISSTDKPLPPTPRANGLGYIEHTPPRRLTTEELPGIVNDFRIAARNAIEAGFDGVEVHGAHGYLLDQFLKDQANDRTDQYGGSLENRCRLPLEVVEAVVNEVGADRVGIRLSPFADFNDCGDSNPLQLGLYMVNALNKYNILYCHMVEPRMGSVGGPDENLTPMRKVFNGTFIVAGGYDREDGIKAIAEDRADLVAYGRLFLANPDLPKRFALNAPLNQYNRKTFYHEDPDPLVGYIDYPFLDEESNGVAS

SEQ ID NO: 29874 - DNA, 1137 bp, Pseudomonas aeruginosa
  CDS (1)..(1137): transl_table=11
ttgtgcatgaaaactgtgagagataatcccatgactgaaaaacatccgttgaaaccactggttatcggcgaactgaaactacgtaatcgtgtgttcatggctcccatgactcgctcccgagcggtacggccgggtgatattcctgatgaacagacagcgttatattacgctcaacgtgccagcgccggattaatcatcagcgaaggcgcaccgatttctgcgacggccaagggctatcttttcacgccgggactctacagttccgagcaactggcaggctggcgtaaggtaacgtctgccgtgcatgccaagggtggacgtattgctgcgcaactgtggcatgtcggacgtatttcccatcattcagtgttgcctcctggttttcagccagtggcgccttcggccatccgtgccgacgccacggtgtttgccctgactgaaaccggcgagccaggacgtgttccggtggacgagcctcatgcattgaccgagcaagaaatccagaacgtgatacaagagtttgtcagagctgcggccaatgctattgaggccggttttgacatggttgagttgcatggtgctaacggttatctaattaaccagttcctgtcgccggacagcaacactcgcaatgaccgttacggtggttctatcgaaaagcgatcgctatttaccctggagatcttggatgccgttgctgcgaaaattggcgctgcgcgtattgggctgcgcctttcgccgtggtcaccacagttcatcaatgatattgacggcagtgtgctagccgaagaaaccaccctgtacttggctcatgcactcgagcagcggaggattggctatcttcacctagcggagtggggaccagatgtttaccccaagggctttcgcgagaagttacgcaagatctatgggggagtgattgtggtgtgcggtggctattctcaggaaagcgccaataccctgctcgcgagcggagtggccgacgcagtggccttcggtcaggcgtttattgccaacccggatttgcccgaacgctttgctctcgacgcgccactggcccaagcagatcaaagtgtttggttcggtggcgatgagcgtggctatacagacttcccgtctatggctgaaagtatttag

SEQ ID NO: 29875 - protein, 378 aa, Pseudomonas aeruginosa
MCMKTVRDNPMTEKHPLKPLVIGELKLRNRVFMAPMTRSRAVRPGDIPDEQTALYYAQRASAGLIISEGAPISATAKGYLFTPGLYSSEQLAGWRKVTSAVHAKGGRIAAQLWHVGRISHHSVLPPGFQPVAPSAIRADATVFALTETGEPGRVPVDEPHALTEQEIQNVIQEFVRAAANAIEAGFDMVELHGANGYLINQFLSPDSNTRNDRYGGSIEKRSLFTLEILDAVAAKIGAARIGLRLSPWSPQFINDIDGSVLAEETTLYLAHALEQRRIGYLHLAEWGPDVYPKGFREKLRKIYGGVIVVCGGYSQESANTLLASGVADAVAFGQAFIANPDLPERFALDAPLAQADQSVWFGGDERGYTDFPSMAESI

SEQ ID NO: 29876 - DNA, 1197 bp, Aspergillus oryzae
  CDS (1)..(1197)
atgggctctatcgatactgttggacctctgtttcagcccctacgcttgggcgctgtgtccctcagccaccgggttatccaagctccatgcactcggatgcgatcgacgaaggagtcggacggcgtgtttgttcccaatgaacttaacgttgaatactatgcgcagcgagcgtcacctggaggtcttatgctgacagaggcaactccgattagtcgacttgctgctgggtatccaggtgtccccggtatcttcacgccctcgcaaatcgccggctggaagaaggtcaccgatgcagtgcacgcgaaaggcgcctacatattttgccagttatggcatgttggtcgggcaacagtgccatctttcattgaaggaaagcaagcccttagtgccagtgatatccccattagcggaaaggcattggatggtagcgagtacagtgcgacacctccgcggcccatgacggtggaggagatccaggagactgtgcaggaatatgccgctgcctccaaaagagccatggaagcagggtttgacggggttgaaattcatggcgcaaacggatatctcctggaccagttcctgcacgacaatgtaaacaatcgtacagacgactatggtggttctatcgagaagcggtcccggattgtcctcgaagtactgaaggcagcctccgaggccatcggggcagaccgtgtaggcattcgtctatcaccatacaattacttccaggatactcgagactcgaacccgaatgttcactggctctcactttgctcgcaaatcgccaacctccccgccgaagtgcgacccgcatacgtacacatgattgaacctcgctttgacgaggtgctcgatgaagatgcgaaaatcgattcgctttccttggagagaccatctttggatgtgttccgacccacgctgaagaagggcggcatcgctttcctagccgcggggagcttcaaccctcagaatgctggaccaaagttgattgacgacggagcggacgcggtggtatttggccggtggttcatctcgaatcccgatctgcctcgacggttgaaggagggtctgcctttgaacccttatgatcggtcgaccttctatggagctgacccggcggagaaaggatacacggactaccctttttacagcaagatgcatgatagagggcatgggctgccatcttcaacccggtga

SEQ ID NO: 29877 - protein, 398 aa, Aspergillus oryzae
MGSIDTVGPLFQPLRLGAVSLSHRVIQAPCTRMRSTKESDGVFVPNELNVEYYAQRASPGGLMLTEATPISRLAAGYPGVPGIFTPSQIAGWKKVTDAVHAKGAYIFCQLWHVGRATVPSFIEGKQALSASDIPISGKALDGSEYSATPPRPMTVEEIQETVQEYAAASKRAMEAGFDGVEIHGANGYLLDQFLHDNVNNRTDDYGGSIEKRSRIVLEVLKAASEAIGADRVGIRLSPYNYFQDTRDSNPNVHWLSLCSQIANLPAEVRPAYVHMIEPRFDEVLDEDAKIDSLSLERPSLDVFRPTLKKGGIAFLAAGSFNPQNAGPKLIDDGADAVVFGRWFISNPDLPRRLKEGLPLNPYDRSTFYGADPAEKGYTDYPFYSKMHDRGHGLPSSTR

SEQ ID NO: 29878 - DNA, 1233 bp, Aspergillus oryzae
  CDS (1)..(1233)
atgccagtcaaggtttttcctcccctacttcgaagctccaagctcttccagccgctggacatcagcaatggcaaaatcaagcttagccatcgtgtagttcatgcgccaatgacccgcaatcgaggcgtcccagtgaacgccaccagtacccctgagaatcccaatcggacatggtatccgggggatctcatggttgagtactatcggcagcgggcgacccccggcgggctgatcatttcggaaggtattccgccttcactcgagagtaatggaatgcccggggttcctggtctgttcaccgaagagcagatcgctggctggaaacgagtggttgatgcagtccatgagcaagggggttacatcttcgctcaactgtggcatgcaggccgtgccaccatcccccaaatgactggatccccagccgtctccgcctcggctacggtctgggactcgccgacggagtgttactctcatccccccgtgggatcgacagagcctgtccgctatgcggaccacccgccgatcgaattaaccgtcccacacatcaaacagaccatccaggactattgtcaagccgccgaatcagctatgaagattgggttcgatggcgtcgaacttcacggtggaaatggataccttcctgagcaatttttgagctccaacattaacaagcgcacggatgagtacggtgggtcgccggaaaagcgatgcaaattcgtcctcgaattgatggacgagttggcaaagacggtgggcgaggagaacttggccattcgtctctcaccattcggattgttcaaccaagcgcgcggggagcagcgtgtggaaacctggaccttcctgtgccagacattgaagcaggcccaccccaagctgtcgtatgtcagcttcattgaacctcgctacgaacaaatcttcagctacgaagagaaagatgacttcctgcgcagctggggtctccttgatgtggacctcaccagcttccgcaagatcttcggcgacacccccttcttctcgggcggcgggtggaaccaaaccaactcctggggagtcttggaagaggagcgctatgatgccctgctgtatggccggtacttcaccagtaacccggatctggtgcagcggttaaagaagggtatccccttcaagccgtacgagcgtagccggttctacgggccgtttgaggataatgccgtgtgctatgtcgactatcctcctgcggaagctcagtaa

SEQ ID NO: 29879 - protein, 410 aa, Aspergillus oryzae
MPVKVFPPLLRSSKLFQPLDISNGKIKLSHRVVHAPMTRNRGVPVNATSTPENPNRTWYPGDLMVEYYRQRATPGGLIISEGIPPSLESNGMPGVPGLFTEEQIAGWKRVVDAVHEQGGYIFAQLWHAGRATIPQMTGSPAVSASATVWDSPTECYSHPPVGSTEPVRYADHPPIELTVPHIKQTIQDYCQAAESAMKIGFDGVELHGGNGYLPEQFLSSNINKRTDEYGGSPEKRCKFVLELMDELAKTVGEENLAIRLSPFGLFNQARGEQRVETWTFLCQTLKQAHPKLSYVSFIEPRYEQIFSYEEKDDFLRSWGLLDVDLTSFRKIFGDTPFFSGGGWNQTNSWGVLEEERYDALLYGRYFTSNPDLVQRLKKGIPFKPYERSRFYGPFEDNAVCYVDYPPAEAQ

SEQ ID NO: 29880 - DNA, 1113 bp, Aspergillus oryzae
  CDS (1)..(1113)
atggcctcgaaacttttctccccccttcaagtcgggcgcatgcagctcgcccatcgcatcacgatggccccgttaacacgcttccgaaacgatgacgaccatgtccccctccccatagtcaaggaacactacgaacagcgcggttccgtccccggaaccctcctcatcacggaagcgaccctcatttctcctcgcgccggcggctaccccaatgtccccgggatctggagtgaggcgcagatcgccgcatggcgcaccgtcaccgacgccgtgcacgccaagggctcctacatcttcatgcagctctgggcgctgggccgtgtcgctaacccggccaacctgcagaaggccggctacgacctcgtctctagtagcgctgtgcctgcgacccccgagggcgctgttccccgggcattgaccgaggatgagatccgcgactatatccgcgactacgcgcaggccgcgaagaacgccatcgcggctgggttcgacggagttgagatccacggcgcgaacgggtacctgattgatcagtttacgcaggataccgtcaaccagcggacggatagctggggcggtagcgttgagaaccgcgcccggttcgcgttggaggtcaccaaggctgtgacggaggccattggcgcggagaggacgggtattcgcttcagtcccttcagtaccttccagggtatgcgcatggcggaccccgtcccgcagttcaagtatctggcgcagaagacaaaggagttcaagctggcttatgtgcatctggtggagcctcgcattgcgggtaacacggaggttgatgagcccagtgcggactcgttggatttctttttccgtgcttatgagaaggctggtccgatcatggtggccggtgggtataaggctgagtcggccaaggaggctgtcgactctcagtacaaggattatgatacccttgttgctatgggacggccttttacttcgaacccggatttgcctttcaaggtcaaggccggtattcctttgagggcctatgagagggagaagttctacctggttaaggatcctaagggatacactgattacgaatttagcgaggagttcaagtctgcgcaggttgctgcttga

SEQ ID NO: 29881 - protein, 370 aa, Aspergillus oryzae
MASKLFSPLQVGRMQLAHRITMAPLTRFRNDDDHVPLPIVKEHYEQRGSVPGTLLITEATLISPRAGGYPNVPGIWSEAQIAAWRTVTDAVHAKGSYIFMQLWALGRVANPANLQKAGYDLVSSSAVPATPEGAVPRALTEDEIRDYIRDYAQAAKNAIAAGFDGVEIHGANGYLIDQFTQDTVNQRTDSWGGSVENRARFALEVTKAVTEAIGAERTGIRFSPFSTFQGMRMADPVPQFKYLAQKTKEFKLAYVHLVEPRIAGNTEVDEPSADSLDFFFRAYEKAGPIMVAGGYKAESAKEAVDSQYKDYDTLVAMGRPFTSNPDLPFKVKAGIPLRAYEREKFYLVKDPKGYTDYEFSEEFKSAQVAA

SEQ ID NO: 29882 - DNA, 1107 bp, Aspergillus oryzae
  CDS (1)..(1107)
atgtcgacgcgtcttttcgaacctctacgcatcggcaacatcaccctaagccaccgagtggtgatggcaccgctaacccgactccgcgccgacgaacaccatgtccccctcccaatgtccacaaactactatgaacagcgcgcctcagtccccgggaccctactcatagccgaagcaactctcatctccgcagcagcaggaggcgtcccccacgcgccgggtctgttcacggaatcgcagatccaggcatggaagaaaatcaccgacgccgtgcatgctaaagggagttatatcttctgccaattaattgctctaggccgtgcagcagacccatcaactcttaggaaggaaggcgggttcgaagtctctgcccctagttccattcccatggagaatgggggagcagttccccatgccctgaccgaggacgagatccatgggttcattcgggactttgcaaccgccgctaagaatgcaattgcggcgggattcgacggcgtcgaagtccacggtgctaatgggtatctggtggatcaattcctccaggatgtcagtaaccagcggacggaccagtggggcgggagtattgagagtcgggcccggttcggggtggaagttgccaaggcgctcgttgaggccgttggtgcggaacgcgtgggatttagaattagtccctggaatacgtggcaggggatgaagatggcggatccggtgcctcagttctcgtatctggttcggcggttgagggatcttggattggcgtatttgcatgttattgagtcgcgggtcatcaacaatgtggattgtgagaagaaggagggcattgagccgttccttgatatctggggtccgactactcccgtgctggttgctgggggctatacgcccgagaatgtgcgccaggccattgaggatgagtatagggattataatgttgctgttgtctttgggaggcattttttggctaatccggacttgccttttcggttgcagcgtggcatccccttgcagaagtatgatcgagatacgttttatacgccgatgcagtgtcatgggtatgcggattatccttttagttcggagtttcaggcacgtttgaagaattag

SEQ ID NO: 29883 - protein, 368 aa, Aspergillus oryzae
MSTRLFEPLRIGNITLSHRVVMAPLTRLRADEHHVPLPMSTNYYEQRASVPGTLLIAEATLISAAAGGVPHAPGLFTESQIQAWKKITDAVHAKGSYIFCQLIALGRAADPSTLRKEGGFEVSAPSSIPMENGGAVPHALTEDEIHGFIRDFATAAKNAIAAGFDGVEVHGANGYLVDQFLQDVSNQRTDQWGGSIESRARFGVEVAKALVEAVGAERVGFRISPWNTWQGMKMADPVPQFSYLVRRLRDLGLAYLHVIESRVINNVDCEKKEGIEPFLDIWGPTTPVLVAGGYTPENVRQAIEDEYRDYNVAVVFGRHFLANPDLPFRLQRGIPLQKYDRDTFYTPMQCHGYADYPFSSEFQARLKN

SEQ ID NO: 29884 - DNA, 1200 bp, Zea mays
  CDS (1)..(1200)
atggcctccacggatcgctccgcgccggcggaggaccagcaacagccgcagcgcccgtccctcttctcgccgtaccagatgccccacttccgcctcgcgcaccgggtggtgctggcgccgatgaccaggtgccgggcgcccgatgcgctcccgggccccgcgctcgcggagtactacgcgcagcggtccacggaaggcggcttgctcatctccgagggcaccatcatctcgcccgccggccctgggttccctcgtgtccctgggatatacaatcaagagcagactgatgcatggaaaaaggtggttgatgctgttcatgccaagggagccatctttttctgccaactatggcatgtaggtcgagcttctcaccaagtatatcagccgggtggttctgctccaatatcctctactgataaaccaatatcatcaagatggaggatactgatgcccgatggatcctatggcaagtatccaactccgaggcgcctagccacatccgagataccagaaattgtcgagcaataccgacaggctgccataaacgccatcaaagcaggtttcgatggcatcgagatccacggtgcccatggctacctaatcgaccagttcctcaaggacggtatcaacgacagggctgacgagtacggtggctcactctccaaccgctgccggttcctcctggaggtgacccgcgccgtggtctccgcgataggggcagaccgggtggcggtccgggtgtccccggccatcgaccacctcgacgcgtacgactccaacccgctgcagctcggcctggccgtagtggaccgcctcaacgctctccaggaggagaccgggcggctggcctacctgcacgtgacgcagccacggtacacggcgtacgggcagacggagtccggccagcacgggagcgccgaggaggagagccggctgatgcgcgccctgcggggcgcctaccgcggcacgttcatgtgcagcggtgggtacacgcgcgagctcggcgtggaggccgtcgagtcgtgggacgccgacctggtgtcctacgggcggctgttcatcgctaacccggacctggtggagcggttccggcgcgacgccccgctgaacagatacgtgcgcaagacgttctacaccccggatcccgtcgttggttacacggactacccgttcctcggccagcctaaggcgcgcatgtga

SEQ ID NO: 29885 - protein, 399 aa, Zea mays
MASTDRSAPAEDQQQPQRPSLFSPYQMPHFRLAHRVVLAPMTRCRAPDALPGPALAEYYAQRSTEGGLLISEGTIISPAGPGFPRVPGIYNQEQTDAWKKVVDAVHAKGAIFFCQLWHVGRASHQVYQPGGSAPISSTDKPISSRWRILMPDGSYGKYPTPRRLATSEIPEIVEQYRQAAINAIKAGFDGIEIHGAHGYLIDQFLKDGINDRADEYGGSLSNRCRFLLEVTRAVVSAIGADRVAVRVSPAIDHLDAYDSNPLQLGLAVVDRLNALQEETGRLAYLHVTQPRYTAYGQTESGQHGSAEEESRLMRALRGAYRGTFMCSGGYTRELGVEAVESWDADLVSYGRLFIANPDLVERFRRDAPLNRYVRKTFYTPDPVVGYTDYPFLGQPKARM

SEQ ID NO: 29886 - DNA, 1200 bp, Zea mays
  CDS (1)..(1200)
atggcctccacggatcgctccacgccggcggaggacgagcaacagcagaagcgcccgtctctcttctcgccgtaccagatgccccgcttccgcctcgcccaccgggtggtgctggcgccgatgaccaggtgcagggcgcccgacgcggtcccaggccccgcgctcgcggagtactacgcgcagcggtccacggacggcggcttgctcatctccgagggcaccatcatctcgccgtccggccctgggttccctcgtgtccctgggatatacaatcaagaacagactgatgcatggagaaaggtggttgatgctgttcatgccaagggagctatctttttctgccaactatggcatgtaggccgagcttctcaccaagtatatcagccgggtgctgctgctccgatatcctcaactgataagccaatatcatcaagatggaggatactgatgcccgatggatcctatggcaagtatccaactccgaggcgcctagccacatccgagataccagaaattgttgagcaataccgtcaagcagccgtaaacgccatcaaagcaggtttcgatggcatcgagatccatggcgcccatggctacctcatcgatcagttcctcaagggcggtatcaacgaccggactgacgagtacggtggctcactctccaaccgttgccggttcctcctggaggtgacccgagccgtggtctctgcgataggggcagaccgcgtcgcggtccgagtgtccccggccatcgaccatctcgacgcctacgactccaaccccctgcagctcggcctggccgtggtggagcgtctcaacgctctccagcaggaggccgggcggctggcctacctccacgtgacgcagccacggtacacggcgtacgggcagacagagtctggccagcacgggagtgccgaggaggagagccggctgatgcgtgccgtgcgaggtgcctaccgtggcacgttcatgtgcagcggtgggtacacgcgggagctcggggtcgaggccatcgagtccggggacgctgacctggtgtcctacgggcggctgttcatcgctaatcccgacctggtggagcggtttcggcgcgacgccccgctgaacaaatacgtgcgcaagacgttctacacgccggaccccgtcgtcggttacacggactacacattcctcggccagcctaaggcacgcatgtga

SEQ ID NO: 29887 - protein, 399 aa, Zea mays
MASTDRSTPAEDEQQQKRPSLFSPYQMPRFRLAHRVVLAPMTRCRAPDAVPGPALAEYYAQRSTDGGLLISEGTIISPSGPGFPRVPGIYNQEQTDAWRKVVDAVHAKGAIFFCQLWHVGRASHQVYQPGAAAPISSTDKPISSRWRILMPDGSYGKYPTPRRLATSEIPEIVEQYRQAAVNAIKAGFDGIEIHGAHGYLIDQFLKGGINDRTDEYGGSLSNRCRFLLEVTRAVVSAIGADRVAVRVSPAIDHLDAYDSNPLQLGLAVVERLNALQQEAGRLAYLHVTQPRYTAYGQTESGQHGSAEEESRLMRAVRGAYRGTFMCSGGYTRELGVEAIESGDADLVSYGRLFIANPDLVERFRRDAPLNKYVRKTFYTPDPVVGYTDYTFLGQPKARM

SEQ ID NO: 29888 - DNA, 1119 bp, Zea mays
  CDS (1)..(1119)
atggagatggagtcgactcctctcttgacaccatacaagatgggcgatttcaacctggcacacagggttgtgctggcgccgctgacgaggtgccgggcgttcgggaacgtgccgcagccggagcacatggctctctactaccgccagcgggcgacgcccggcggcttcctcatcgccgaggcctgcgccgtgtcggagagcgcgcgcgggtacccggacgttccggggctgtggacccaccaacaggtcgaggcctggaagccgatcgtcgacgccgtccacgccagcggtgccgtcttcttcgcccagctctggcacaccggccgggcctccccctcagaattccaaccaaatgggcaggcaccgatctctagcacggacaagcaaatcccagcacaggtgaaccattccggtgacgtcaacacgttcgcggtgcctcggagactagagacagaggagataccacacgtcgtcaatgacttccgggttgccgccagaaacgccatcaaagcaggctttgatggagtggagatccacgcggcaaacgggtacctgttcgatcagttcatgaaggacagcaccaatgaccgagacgactcctacgggggcagcttggagaaccggtgccgtttcacagccgaggtgatggcagccgtcgcggacgaggtcggtgccaaccgcctcggtgtgcgcctctctccgttcgcggattatatggactgccacgactccaacccagaggcgctcgcgcttcatgtcatcgacgagacgctgaacccgctcggcgtgctttactgccacatggtagagccaaggatgcgggtgaacccagacgacggtattatgactctcgagcacatgctgctaccgttcaggagggcgtttcgcgggacgttcattgctaatggaggctacgaccgtgaggaaggcaatgacgccattgcccgtggccgtggctatgcagatctcatcgcatacggccggatattccttgccaacccggaccttccgatgcgttttgccaagaatgccccgctgaacaagtatgataggagcaccttctatacctctgatccggtggttgggtacacagattatccatttctcgatcaactctag

SEQ ID NO: 29889 - protein, 372 aa, Zea mays
MEMESTPLLTPYKMGDFNLAHRVVLAPLTRCRAFGNVPQPEHMALYYRQRATPGGFLIAEACAVSESARGYPDVPGLWTHQQVEAWKPIVDAVHASGAVFFAQLWHTGRASPSEFQPNGQAPISSTDKQIPAQVNHSGDVNTFAVPRRLETEEIPHVVNDFRVAARNAIKAGFDGVEIHAANGYLFDQFMKDSTNDRDDSYGGSLENRCRFTAEVMAAVADEVGANRLGVRLSPFADYMDCHDSNPEALALHVIDETLNPLGVLYCHMVEPRMRVNPDDGIMTLEHMLLPFRRAFRGTFIANGGYDREEGNDAIARGRGYADLIAYGRIFLANPDLPMRFAKNAPLNKYDRSTFYTSDPVVGYTDYPFLDQL

SEQ ID NO: 29890 - DNA, 1116 bp, Zea mays
  CDS (1)..(1116)
atgggcagcggcggcgctaacactgcccccctcatcaccccctacaagatgggaaaattcgatgtttcccacagggtagtcctcgcaccactgacgagacagcggtcctacggcaacgttcctcagcctcatgccatactgtactatcagcagagggcgactaaaggaggtcttctgatagctgaggccacgggggtttcagacactgcccaagggtacaaggacactcctggcatttggacccatgagcaagtcgaagcatggaagccgatcgtagacggggttcaccagaaaggagggatatttttctgtcagatttggcacgtagggagagtctccaattccacttttcagcctaatgggcaggctccaatttcaagcaccgataagccactaaagcctcaagtgagagccaatggtatagacgtggctactttcgcagttcctagacgcttagagactgatgaaatccctttggtcgtcaatgatttcagggtagctgctcgaaatgcgattgaagctggatttgatggtgtcgaaatccatggagctcacggttacctgattgatcagtttctaaaggacggggtcaacgaccgcacagacaaatacggtggcagtctggagaaccgctgccggtttgcactggaagtaactcaagccgtggtcgacgaaattggagctgacaaggtcgggataaggctgtcaccattcgctagctactcggaggcgccggactcagacccggaagctctgggcctgtacatggcgaacgcgctgaacgagttcgggattctctactgccacatggtggagccgcggatggtgaaactcggtgaaaagttcgaaaccccctacagccttcgcccgataagggacgctttcaggggaacgttcatcgttgccggcggctacggcagggaggatggaaatcgcgcgatctccactgggtatgctgatttggtcgcgttcgggcgcttgttcttggctaatcctgacctgcctcggaggtttgaagtagacgctccccttaacaagtacaacagagacacgttttacatccctgatccggttgttggatacactgactacccatttctttcgtcagatgtataa

SEQ ID NO: 29891 - protein, 371 aa, Zea mays
MGSGGANTAPLITPYKMGKFDVSHRVVLAPLTRQRSYGNVPQPHAILYYQQRATKGGLLIAEATGVSDTAQGYKDTPGIWTHEQVEAWKPIVDGVHQKGGIFFCQIWHVGRVSNSTFQPNGQAPISSTDKPLKPQVRANGIDVATFAVPRRLETDEIPLVVNDFRVAARNAIEAGFDGVEIHGAHGYLIDQFLKDGVNDRTDKYGGSLENRCRFALEVTQAVVDEIGADKVGIRLSPFASYSEAPDSDPEALGLYMANALNEFGILYCHMVEPRMVKLGEKFETPYSLRPIRDAFRGTFIVAGGYGREDGNRAISTGYADLVAFGRLFLANPDLPRRFEVDAPLNKYNRDTFYIPDPVVGYTDYPFLSSDV

SEQ ID NO: 29892 - DNA, 1152 bp, Zea mays
  CDS (1)..(1152)
atggccatggagacgcagacgcccgagaccatcgtccctccgaccaccatccctcctcttctgaccccctacaagatgggcgcatttgagctggaacacagggtggtgctggcgccgctgacgcggcagcgctcctacggcaacgtcccgcagccgcacggcgccgtctactacgcgcagcgcgccacccggggcggcctcctcatcactgaggccacgggcgtctccgacacggcgcagggctacaccgacacgccgggagtgtggacgcccgaccaggtggcggcgtggcggcccatcgtagacgccgtccacgccaagggcgccgtcttcttctgccagctctggcacgtcggccgcgtctccaccaccgcgctccagccgggcggggccgcgcccatctccagcaccgaccgggccgtcgcgccgcagctcagcttcgacggccacctcgagaagttctccccgccgcgccgcctggaggcgcgcgagatccccgccatcgtcgacgacttccgccgcgcggcgcgcaacgcgctcctcgcgggcttcgacggcgtcgaggtccacggcgccaacggctacctcatcgagcagttcctcaaggacagcgccaacgaccgggacgacgagtacggcggctccctcgagaaccgctgccgcttcgcgctcgaggtcgtgcgcgccgtcgccggcgaggtcgggccgggccgcgtcggcgtccgcctctcccccttcactgactacatggactgccacgactccgacccggaggccctggcggggtacctcgtccgcagcctcagcgacgtcggtgtgctctactgccacatgatcgagccacggatggccatcgttgacggccgacgccagatcccgcaccgcctgcgcccgttcagggaggcattccggggcaccttcatcgccgccggagggtacgacagggcggagggggacaaggtggtggaggaaggctacacggacctcgtcgcctacggcaggctgttcctggccaacccggatctgccccggaggttccgcctccccgacgcgccgctcaacaagtacgaccgcaccaccttctacacctccgaccccgtcattggatacacagactacccctttctcgccgacgccgacgccgacaaataa

SEQ ID NO: 29893 - protein, 383 aa, Zea mays
MAMETQTPETIVPPTTIPPLLTPYKMGAFELEHRVVLAPLTRQRSYGNVPQPHGAVYYAQRATRGGLLITEATGVSDTAQGYTDTPGVWTPDQVAAWRPIVDAVHAKGAVFFCQLWHVGRVSTTALQPGGAAPISSTDRAVAPQLSFDGHLEKFSPPRRLEAREIPAIVDDFRRAARNALLAGFDGVEVHGANGYLIEQFLKDSANDRDDEYGGSLENRCRFALEVVRAVAGEVGPGRVGVRLSPFTDYMDCHDSDPEALAGYLVRSLSDVGVLYCHMIEPRMAIVDGRRQIPHRLRPFREAFRGTFIAAGGYDRAEGDKVVEEGYTDLVAYGRLFLANPDLPRRFRLPDAPLNKYDRTTFYTSDPVIGYTDYPFLADADADK

SEQ ID NO: 29894 - DNA, 1134 bp, Zea mays
  CDS (1)..(1134)
atggggcaccaagaacaagaacaggaagtgatcccgctgatgaccccgtacaagatggggcagctggagctctcccaccgcgtggtgctggcgccgatgacgcggtgccgcgccatcggggacgtgccgcagccgcacgccgccgtgtactactcgcagcgcgccagcaggggcggcgtgctcatcaccgagggcacgggggtgtccgccaccgcgcagggcttcccggggtcccccggcatctggacgcaggagcaggtggcggcgtggaagcccatcgtcgacgccgtccaccgcaagggtgcgctcttcttctgccagatcgcacacgtcggaagggcatccaccaacgatttccagccggacggccaggcgccggtctcgagcacggacgcgcagctcccacccgacgccgagtccggcacggtgttctccaggccacgccggctgcgcgccgacgaggtcccggggatcgtcgacgacttcaggcgcgccgcgcgcaacgcgatcgaggccgggttcgacggcgtggagatccacggagcgcacgggttcctcctggagcagttcatgaaggacggcgccaacgaccgcgccgacgagtacggcggcagcgtcgagaaccggtgccgcttcgtggtcgaggtcgtggacgctctcgtccgtgaaatcggcgcgagccgggttggcatcaggctctccccgttcgcggactacttgaactgtgcggattccaaccccttggcgctaggtcactacatggtggaacagctcaacaggcacgaggggtttctgtactgccacatggtggagccgcgaatggccatcgtcgacgaccgtaggcagattccgcatggactcctgccgttcaaggcggccttcaatggcaccttcatcgccgcgggcgggtacgacagggaaaaagggaacaaggtggtcgccgaaggctacgcggacctcgtcgcatacggaaggctgttcttggccaacccagacctgcctaaaaggttcgaggtagacgagatcctgaacaagtatgatcgttccaccttttatacacaagaccctgttgttggctatacagactaccctttccttagggacgacagcgaagacttagctgctcaagtttaa

SEQ ID NO: 29895 - protein, 377 aa, Zea mays
MGHQEQEQEVIPLMTPYKMGQLELSHRVVLAPMTRCRAIGDVPQPHAAVYYSQRASRGGVLITEGTGVSATAQGFPGSPGIWTQEQVAAWKPIVDAVHRKGALFFCQIAHVGRASTNDFQPDGQAPVSSTDAQLPPDAESGTVFSRPRRLRADEVPGIVDDFRRAARNAIEAGFDGVEIHGAHGFLLEQFMKDGANDRADEYGGSVENRCRFVVEVVDALVREIGASRVGIRLSPFADYLNCADSNPLALGHYMVEQLNRHEGFLYCHMVEPRMAIVDDRRQIPHGLLPFKAAFNGTFIAAGGYDREKGNKVVAEGYADLVAYGRLFLANPDLPKRFEVDEILNKYDRSTFYTQDPVVGYTDYPFLRDDSEDLAAQV

SEQ ID NO: 29896 - DNA, 1128 bp, Zea mays
  CDS (1)..(1128)
atggtgcagcaagccgcgaaggaggtgatcccgctgctgacgccttacaagatggggcagttcgagctctctcaccgggtggtgctggcgccgctgacgaggtgccgctcctacggcaacgtgccgcagccacacgccgccgtgtactactcgcagcgcgccaccaggggtggcctgctcatcgcggaggccacgggggtgtcggccaccgcgcaggggttcccggagtctcctggcatctggacgcaggagcaggtcgaggcgtggaagcccatcgtcgacgccgtccaccgcaagggcgccatcttcgtctgccagatctggcatgtgggcagggtctccaccaacgagctccagcccaacggcgacgcgcctatctcgagcacggacaagcagatctccccgaacgccgagtccggaacggcgtactcgaagccgcgccggctgcggaccgacgaggtccccgggatcgtcgacgacttcaggcgggccgcacggaacgcggtcgaggctggtttcgacgccgtcgagatccacggcgcgcacgggtacctcctggagcagttcatgaaggacagctgcaacgaccgcacggaccagtacggcggcagcctggagaaccggtgccgtctcgccgtggaggtcgtggacgccgtcgtccgcgaggtgggcgcgcgccgcgtcggcatcaggctgtcgcccttcgtcgacttcgtggactgcgtggactcggacccggtggcgctcggccactacatggtgcagcagctcaacaggcatagcggcttgctctactgccacatggtggagccccgcattaccgcccacgggcgcaggcagatccctcacgggctcttgccgttccgaaaggcgtttcatggaacgttcatcgccgccggtggcggtgggtacgatcgggaggaaggcaacaaggtggtggcagaagggtatgctgacctcgtcgcgtatgggaagctgttcttggctaacccggacctgcctaggaggttcgagctggatgtggcactcaacaaatacgaccgctccaccttctacacgcaagatcctattgttggctacacagattaccctttctttgaacaagaagatggcaagaatgaggagtga

SEQ ID NO: 29897 - protein, 375 aa, Zea mays
MVQQAAKEVIPLLTPYKMGQFELSHRVVLAPLTRCRSYGNVPQPHAAVYYSQRATRGGLLIAEATGVSATAQGFPESPGIWTQEQVEAWKPIVDAVHRKGAIFVCQIWHVGRVSTNELQPNGDAPISSTDKQISPNAESGTAYSKPRRLRTDEVPGIVDDFRRAARNAVEAGFDAVEIHGAHGYLLEQFMKDSCNDRTDQYGGSLENRCRLAVEVVDAVVREVGARRVGIRLSPFVDFVDCVDSDPVALGHYMVQQLNRHSGLLYCHMVEPRITAHGRRQIPHGLLPFRKAFHGTFIAAGGGGYDREEGNKVVAEGYADLVAYGKLFLANPDLPRRFELDVALNKYDRSTFYTQDPIVGYTDYPFFEQEDGKNEE

SEQ ID NO: 29898 - DNA, 1128 bp, Zea mays
  CDS (1)..(1128)
atggtgcagcaagccgcgaaggaggtgatcccgctgctgacgccttacaagatggggcagttcgagctctctcaccgggtggtgctggcgccgctgacgaggtgccgctcctacggcaacgtgccgcagccacacgccgccgtgtactactcccagcgcgccaccaggggtggcctgctcatcgcggaggccacgggggtgtcggccaccgcgcaggggtacccggagactcctggcatctggacgcaggagcaggtcgaggcgtggaagcccatcgtcgacgccgtccaccgcaagggcgccatcttcgtctgccagatctggcatgtgggcagggtctccaccaacgagctccagccgaacggcgatgcgcctatctcgagcacggacaagcagatctcccccgacgccgagtccggaacggcgtactcgaagccgcgccggctgcggaccgacgaggtccccgggatcgtcgacgacttcaggcgggccgcacggaacgcgatccaggctggcttcgacgccgtcgagatccacggcgcgcacgggtatctcctggagcagttcatgaaggacagctgcaacgaccgcacggaccagtacggcggcagcctggagaaccggtgccgtctcgccgtggaggtcgtggacgccgtcgtccgcgaggtgggcgcgcgccgcgtcggcatcaggctgtcgcccttcgtcgacttcgtggactgcgtcgactcggacccggtggcgctcggccactacatggtgcagcagctcaacaggcatagcggcttgctctactgccacatggtagagccccgcatggctaccgtcgacgggcgcaggcagatccctcacgggctcttgccgttccgaaaggcgttccatggaacgttcatcgccgccggtgggtacgatcgggaggatggcaacaaggtggtggcagaagggtatgctgacctcgtcgcgtatgggaggctgttcttggctaacccagacctacctaggaggttcgagctggatgtggcactcaacaaatacgaccgctccaccttctacacgcaagatcctattgttggctacacagattaccctttctttgaagaagatggcaagaatgaggagtcagtctga

SEQ ID NO: 29899 - protein, 375 aa, Zea mays
MVQQAAKEVIPLLTPYKMGQFELSHRVVLAPLTRCRSYGNVPQPHAAVYYSQRATRGGLLIAEATGVSATAQGYPETPGIWTQEQVEAWKPIVDAVHRKGAIFVCQIWHVGRVSTNELQPNGDAPISSTDKQISPDAESGTAYSKPRRLRTDEVPGIVDDFRRAARNAIQAGFDAVEIHGAHGYLLEQFMKDSCNDRTDQYGGSLENRCRLAVEVVDAVVREVGARRVGIRLSPFVDFVDCVDSDPVALGHYMVQQLNRHSGLLYCHMVEPRMATVDGRRQIPHGLLPFRKAFHGTFIAAGGYDREDGNKVVAEGYADLVAYGRLFLANPDLPRRFELDVALNKYDRSTFYTQDPIVGYTDYPFFEEDGKNEESV

SEQ ID NO: 29900 - DNA, 1200 bp, Hevea brasiliensis
  CDS (1)..(1200)
atggctgaaactggaacagaagggaccgggatcaccaccctattttctccttacaaaatgggcaagttcagcctctcccacagggtggtgctggctcccatgactagatgcagagcgttgaacgggataccaaacgcagcgctggtggattactacacgcagagatcaactcccggcggatttctcatcacggaaggcactctggtttcccctactgcccctgggtttcctcatgtccctggaatttatacagaagaacaagcggaggcatggaagagggtggtggatgcagttcatgccaaagggagcatcatattctgtcaattatggcatgttggccgcgcatctcatcaggtttatcaacctaatggagctgcaccaatatcatcgacgggcaaggccatctcaaacagatggagaattctcatgccagatggatcatatgggaaatacccaacacctaggcccttggaaacacctgaaatactagaggtagtgaagaattatcgccagtcagccttgaatgccattcgagcaggctttgatggaattgaggtccacggggctcatggttaccttattgatcaattcttaaaagacgggatcaatgaccgaacagatgagtatggtggatcaatcaacaatcgatgcagattcctaatgcaggtgattcaggcagtagttgcagctattggtgctgatcgagttggtttcagaatgtcaccggcaattgatcacctagatgccatagattctgatccgctcaacttgggtcttgctgtaatcgagagacttaacaaacttcagttgaaccttggatcaaaactcacttatctccatgtcactcagcctcgctacacagcttatggccaaacagaatcaggcagacatggtactgaagaagaggaagctagattaatgagaacttggagaagggcttataagggaactttcatctgtagcggtgggttcacgagggagctaggaatggaagctatagctcaagatgatgcagatttggtatcttatggccgactttttatttcaaacccagacttagtcttgagatttaagctcaatgcgcccttgaataagtatgtcaggaaaacattctacacccaagatcctgttgttgggtacacagactacccatttttcagaaaagtagacgggagccaggagccacgatcacgcctttga

SEQ ID NO: 29901 - protein, 399 aa, Hevea brasiliensis
MAETGTEGTGITTLFSPYKMGKFSLSHRVVLAPMTRCRALNGIPNAALVDYYTQRSTPGGFLITEGTLVSPTAPGFPHVPGIYTEEQAEAWKRVVDAVHAKGSIIFCQLWHVGRASHQVYQPNGAAPISSTGKAISNRWRILMPDGSYGKYPTPRPLETPEILEVVKNYRQSALNAIRAGFDGIEVHGAHGYLIDQFLKDGINDRTDEYGGSINNRCRFLMQVIQAVVAAIGADRVGFRMSPAIDHLDAIDSDPLNLGLAVIERLNKLQLNLGSKLTYLHVTQPRYTAYGQTESGRHGTEEEEARLMRTWRRAYKGTFICSGGFTRELGMEAIAQDDADLVSYGRLFISNPDLVLRFKLNAPLNKYVRKTFYTQDPVVGYTDYPFFRKVDGSQEPRSRL

SEQ ID NO: 29902 - DNA, 1134 bp, Pseudomonas putida
  CDS (1)..(1134): transl_table=11
atgccggatacatccttctccaaccccgggctcttcaccccgctgcagctgggcagcctcagcctgcccaaccgcgtgatcatggcgccgctgacccgctcgcgcacgccggacagcgttcccggcaggttgcagcagatctactatggccagcgcgccagcgccgggctgatcatcagcgaggccaccaatatctcgcccaccgcccgcggctacgtctacacgccggggatctggaccgacgcgcaggaagccggctggaagggcgtcgtcgaggcggtgcatgccaagggcgggcgcatcgccctgcagctgtggcacgtcggccgtgtctcccacgagctggtgcagcccgacggccagcagcccgtggcaccgagcgccctcaaggccgagggggcggaatgcttcgtcgagttcgaggacggcacggcggggctgcaccccaccagcacgccgcgggcgcttgagaccgacgagatccccggcatcgtcgaggactaccgccaggctgcgcagcgcgccaagcgtgccggcttcgacatggtcgaggtccacgccgccaacgcctgcctgcccaaccagttcctcgccaccggcaccaaccggcgcaccgaccagtacggcggctccatcgagaaccgggcgcgcttcccgctggaggtggtcgacgccgtggccgaggtgttcgggcccgagcgggtcggcatccgcctgacccccttcctcgagctcttcggcctcaccgacgacgagcccgaggcgatggccttctacctggccggcgagctcgaccgccgcggcctggcctacctccacttcaacgagcccgactggatcggtggcgatatcacctaccccgaaggcttccgggagcagatgcgccagcgcttcaagggtgggctgatctactgcggcaactacgatgccgggcgcgcccaggcccgcctggatgacaacaccgccgacgccgtggccttcggccgccccttcatcgccaaccccgatctgcccgagcgcttccgcctgggggccgccctcaacgagcccgaccccagcaccttctacggcggcgccgaggtcggctacaccgactaccccttcctcgacaacggccacgaccggctcggctga

SEQ ID NO: 29903 - protein, 377 aa, Pseudomonas putida
MPDTSFSNPGLFTPLQLGSLSLPNRVIMAPLTRSRTPDSVPGRLQQIYYGQRASAGLIISEATNISPTARGYVYTPGIWTDAQEAGWKGVVEAVHAKGGRIALQLWHVGRVSHELVQPDGQQPVAPSALKAEGAECFVEFEDGTAGLHPTSTPRALETDEIPGIVEDYRQAAQRAKRAGFDMVEVHAANACLPNQFLATGTNRRTDQYGGSIENRARFPLEVVDAVAEVFGPERVGIRLTPFLELFGLTDDEPEAMAFYLAGELDRRGLAYLHFNEPDWIGGDITYPEGFREQMRQRFKGGLIYCGNYDAGRAQARLDDNTADAVAFGRPFIANPDLPERFRLGAALNEPDPSTFYGGAEVGYTDYPFLDNGHDRLG

SEQ ID NO: 29904 - DNA, 1191 bp, Pleurotus djamor
  CDS (1)..(1191)
atgcctctcagagggaacgcacccgttcctggtgccaaagagttttatcctctcaatgatcccgaaattgggacagatgaaaaggtacctctgctgtttcaaccaataacgatcggggggacaactttcaagaacagaatattcgtgtcccccatgtgtcaatatagttcttccaacggtcatgctaccgattggcacctcgtccacatcggcggctttgcgacgcgaggagttggcgccatcatcatggaggctacgtccgtcgtcccagaaggtcgtatatccccagaggatgctggactctggacggatacccaaatcgaacctctgaaacggatagtccagttctgccatgcccaaggaacgaagattggcatccaacttgcacatgcaggtagaaaggcatctacactcgcgccttgggccagaggtggtgcctatattgccccggtggaacaaggtggttggcctgatgacgtttatggcccgagcacccttcctttccatgagaagttcccgaccccaaaggaaatggacgagccgcacctgacatacgttgaaaacgcattcgtcgaagcaatcgaacgctgtgaagaagttggctttgactttatcgagatccatagcgcgcatggatatctcttccacagttttctttcgaatctttccaacgatcgtaccgattcctatggaggccagccactcgagaatcgacttcgcttccctctacgtgtgatcaagagttgtcgcgaagcctggtcaaaaccattattcgtcaggatcagcgcgtccgactgggcagaccgaccagaacaaggcgatgacgggttatggaaacaatggggcatcgagcaaaccaaagtgctcgtaggagaactcctcaaaatcggtgtagactttgtcgattgcagtgcaggtggtaactgggctgagcagaaaatcccgttatcgcatggatatcaggtgccttttgcggagagcctcaagaaagcctacccaggcctcaatgtgggcaccgtcggcttgatctcggatcccgagaaagcggaagggtatttgcaagaaggcaaggctgacgttattctccttgctcgtgagctcttgaggaacccgcactggccattgactgcggcgaaggcgttgggtgtttacttgaaagtagcaaaccagtatgagagagccgttgtttag

SEQ ID NO: 29905 - protein, 396 aa, Pleurotus djamor
MPLRGNAPVPGAKEFYPLNDPEIGTDEKVPLLFQPITIGGTTFKNRIFVSPMCQYSSSNGHATDWHLVHIGGFATRGVGAIIMEATSVVPEGRISPEDAGLWTDTQIEPLKRIVQFCHAQGTKIGIQLAHAGRKASTLAPWARGGAYIAPVEQGGWPDDVYGPSTLPFHEKFPTPKEMDEPHLTYVENAFVEAIERCEEVGFDFIEIHSAHGYLFHSFLSNLSNDRTDSYGGQPLENRLRFPLRVIKSCREAWSKPLFVRISASDWADRPEQGDDGLWKQWGIEQTKVLVGELLKIGVDFVDCSAGGNWAEQKIPLSHGYQVPFAESLKKAYPGLNVGTVGLISDPEKAEGYLQEGKADVILLARELLRNPHWPLTAAKALGVYLKVANQYERAVV

SEQ ID NO: 29906 - DNA, 1188 bp, Pleurotus djamor
  CDS (1)..(1188)
atgcctctctcgagcaacgcacccgttcctggtgctaaagagttctatcctctcaatgaccccgaaattgggacggacgaaaagatacctctgctgttccaaccagtaactattgggggaactactttcaaaaaccggatattcgtgtccccgatgtgtcaatatagttcttccaacgggcatgctaccgactggcacctcgttcacatcggcggctttgcaactcggggagccgctgccatcatcatggaagccacagccgtcgtcccagaaggacgtatatctccggaggatgctggaatctggactgactcacagatcgaacctctgagacggatagtccagttctgtcatgcccaaggaacgaagatcggcatccaactcgcacacgcgggtagaaaggcctctaccctcgcgctttgggtgaaaaataattatgctgctgcctcagtggaacaaggtggttggcctgatgacgtttacggtcccagtacaattcctttcgctgataaattcgcaacgccaaaggaaatggatgaggcgcacctgacttacgttgagaatgccttcgttgaagcgatcgaacgctgtgaagaagttgggtttgactttatcgagatacatagcgcgcatggatatctcttccacagcttcctttcgaatctttcgaacgttcgtaccgactcgtacggaggccaaccactggagaatcgacttcgtttccctttgagggtgatcaaaagttgtcgtgaagcctggtcgaagccactattcgtcagaatcagcgcgtccgactgggcagaagggccggagaaagctgatgatggcacgtggaagcaatggggcatcgagcaaagcaaggtgctggcaggagagctcgtcaaaatcggtgtagaccttgtcgattgcagttcaggtggtaactgggctcagcagaagattccgttttcgcatgggtatcaggttccttttgctgagagcctgaagaaagcctaccccagcctcaacgtgggtgccgttggcttaatctcggatccagagaaagcggaagggtatttgcaagaaggtaaagccgatatcattctcctcgctcgtgagcttctgagaaacccgcactggccactcaccgcggcgaaggcgctgggggtttccatgaaagtggcgaaccagtatgagagagcggcatag

SEQ ID NO: 29907 - protein, 395 aa, Pleurotus djamor
MPLSSNAPVPGAKEFYPLNDPEIGTDEKIPLLFQPVTIGGTTFKNRIFVSPMCQYSSSNGHATDWHLVHIGGFATRGAAAIIMEATAVVPEGRISPEDAGIWTDSQIEPLRRIVQFCHAQGTKIGIQLAHAGRKASTLALWVKNNYAAASVEQGGWPDDVYGPSTIPFADKFATPKEMDEAHLTYVENAFVEAIERCEEVGFDFIEIHSAHGYLFHSFLSNLSNVRTDSYGGQPLENRLRFPLRVIKSCREAWSKPLFVRISASDWAEGPEKADDGTWKQWGIEQSKVLAGELVKIGVDLVDCSSGGNWAQQKIPFSHGYQVPFAESLKKAYPSLNVGAVGLISDPEKAEGYLQEGKADIILLARELLRNPHWPLTAAKALGVSMKVANQYERAA

SEQ ID NO: 29908 - DNA, 1149 bp, Oryza sativa subsp
  CDS (1)..(1149)
atggtgcaagcgcaagcagcggcgaaagaggcggcggcggcagcgatcccgcttatggcgccgtacaagatggggcggttcgagctctcccaccgcgtggtgctcgcgccgctgactcggtgccgctcctacgaccacgtgccacagccgcacgcggcgctgtactactcgcagcgcgccaccaatggcggcctcctcatctcggaggccaccggggtgtccgccaccggggagggctacccggagatccccggcgtctggacgcggcagcaggtcaaggcgtggaaacccatcgtcgacgccgtccaccgcaagggcgcgctcttcttctgccagctagcgcacgtcggcagggcctccaccaacgatcaacagccgaatgggcaggcgccgatctcaagcacagacaagcagatcacaccggacgattcacacacggtgtactccaagccccggcggctgcggacggatgagatccctcacgtcgtcgacgatttcagggtggctgcgcggaacgccatcgaggcggggttcgacggcgtggagatccacggcgcgcatggctacctcatcgatcagttcatgaaggacagcgccaacggccggaccgaccagtacggtggcagcctcgagaaccgttgccgcttcgccgtcgaggtgatcgacgccgtcgtcgccgaggtgggagctgaccgtgttgggatcagattgtcgccatatatagattttatggactgcttcgactcgaaccccgaagctctcggctcatacatggtgcggcaactcaacaagcacccagagctcctctactgccacatggtggagccgaggatggccaccgtcgaaggacggaggaagatcaaccatggcctcctgccatttcggaagcaattcaatggcactttcattgcctccggagggtatgaccgggaggaagggaacaaggtggtggatgatggctatgccgacctcgtcgcctatgggaggctcttcttggccaaccccgacttgccaaggaggttcgagcttaatgcaccgttaaacaagtatgatggatctacattttacacacatgatcccgtcgttggctacacggattaccctttccttgaggagaagaaagaggactcagctacagtaattgtttga

SEQ ID NO: 29909 - protein, 382 aa, Oryza sativa subsp
MVQAQAAAKEAAAAAIPLMAPYKMGRFELSHRVVLAPLTRCRSYDHVPQPHAALYYSQRATNGGLLISEATGVSATGEGYPEIPGVWTRQQVKAWKPIVDAVHRKGALFFCQLAHVGRASTNDQQPNGQAPISSTDKQITPDDSHTVYSKPRRLRTDEIPHVVDDFRVAARNAIEAGFDGVEIHGAHGYLIDQFMKDSANGRTDQYGGSLENRCRFAVEVIDAVVAEVGADRVGIRLSPYIDFMDCFDSNPEALGSYMVRQLNKHPELLYCHMVEPRMATVEGRRKINHGLLPFRKQFNGTFIASGGYDREEGNKVVDDGYADLVAYGRLFLANPDLPRRFELNAPLNKYDGSTFYTHDPVVGYTDYPFLEEKKEDSATVIV

SEQ ID NO: 29910 - DNA, 1203 bp, Saccharomyces cerevisiae
  CDS (1)..(1203)
atgccatttgtaaaaggttttgagccgatctccctaagagacacaaacctttttgaaccaattaagattggtaacactcagcttgcacatcgtgcggttatgcccccattgaccagaatgagggccactcaccccggaaatattccaaataaggagtgggctgctgtgtattatggtcagcgtgctcaaagacctggtaccatgatcatcacggaaggtacgtttatttcctctcaagccggcggctatgacaacgcccctgggatttggtctgatgagcaggtcgctgagtggaagaatatctttttagccatccatgattgtcagtcgttcgcgtgggtacaactttggtctttaggctgggcatccttcccagacgtattggcaagagacgggttacgctatgactgtgcatctgacagagtgtatatgaatgctacgttacaagaaaaggccaaagatgcgaataatctcgaacatagtttgactaaagacgacattaaacagtatatcaaggattacatccatgcggctaagaattctatcgcggctggcgccgatggtgtagaaattcatagcgccaatgggtacttgttgaatcagttcttggatccacattctaataagaggaccgacgaatacggcggaacgatcgaaaacagggcccgctttacactggaggttgtcgatgctcttatcgaaactatcggtcctgaacgggtgggtttgaggttgtcgccgtacggcacttttaacagtatgtctgggggtgctgaaccaggtattatcgctcaatattcgtatgttttgggtgaattagagaagagggcaaaggctggtaagcgtttggcctttgtgcacctcgttgaaccacgtgtcacggacccatcgttggtggagggcgaaggagaatattccgagggtactaacgattttgcctactctatatggaagggtccaatcatcagagctggtaattacgctcttcatccagaagtggttagagaacaagtaaaggatcccagaaccttgataggctatggtagattcttcatctctaacccagatttagtctaccgtttagaagagggcctgccattgaacaagtatgacagaagtaccttctacaccatgtccgcggaaggttataccgactacccaacatatgaagaggcagtagatttaggttggaacaagaactga

SEQ ID NO: 29911 - protein, 400 aa, Saccharomyces cerevisiae
MPFVKGFEPISLRDTNLFEPIKIGNTQLAHRAVMPPLTRMRATHPGNIPNKEWAAVYYGQRAQRPGTMIITEGTFISSQAGGYDNAPGIWSDEQVAEWKNIFLAIHDCQSFAWVQLWSLGWASFPDVLARDGLRYDCASDRVYMNATLQEKAKDANNLEHSLTKDDIKQYIKDYIHAAKNSIAAGADGVEIHSANGYLLNQFLDPHSNKRTDEYGGTIENRARFTLEVVDALIETIGPERVGLRLSPYGTFNSMSGGAEPGIIAQYSYVLGELEKRAKAGKRLAFVHLVEPRVTDPSLVEGEGEYSEGTNDFAYSIWKGPIIRAGNYALHPEVVREQVKDPRTLIGYGRFFISNPDLVYRLEEGLPLNKYDRSTFYTMSAEGYTDYPTYEEAVDLGWNKN

SEQ ID NO: 29912 - DNA, 1212 bp, Kluyveromyces marxianus
  CDS (1)..(1212)
atgtcgtacatgaactttgaccctaagccattgggagacaccaatatcttcaagccaatcaagatcggtaacaatgagctaaaacacagagtagtcatgccagcattgactagaatgagagccattgcaccaggaaacatcccaaacactgaatgggccgaggaatactacagacaacgttctcaataccctggtacccttattatcacggaaggtactttcccttctgcgcaatcaggtggttacccaaatgtgccaggtatctggtccaaagagcaattggctgaatggaaaaagatcttcaatgcaatccatgagaacaaatcgttcgtgtgggtgcaattgtgggttctaggtagacaagcatggccagaagtgttgaagaaggaaggtttgcgttacgatagtgctaccgatgacttgtacatgggtgaagaagaaaaagagcgtgccttaaaggctaacaacccacagcacggtatcaccaaggaagaaatcaagcagtacatcaaggagtacgtggatgctgccaagaaagccatcgatgcaggtgcagacggtgtgcaaatccattctgccaacggttacttgttgaaccagtttttggaccctatttctaacaacagaaccgacgagtacggtggatcgatcgagaaccgtgcgagattcactttggaagtggtcgatgccgttgtcgatgcagttggtgccgaaagaacctccatcagattctctccatacggtacttttggtaccatgtccggtggtgagaaccctggcatcgttgctcaatatgcatacgtcattggtgagttggaaaagagagctagagctggcaagagattggcgttcatcgatttggtcgagcctcgtgtgaccgacccattcctaccagaattcgagaagtggttcaaggaaggtaccaacgaattcatctactctatctggaagggtccagttctcagagttggtaactatgctttggacccagatcaagccactctcgactctaagaagcctaacactttgatcggttacggtagatccttcatcgccaacccagacttggtgtaccgtttggaaaagggtttgccattgaacaagtatgatagaaacaccttttacacattcactaaggaaggttacaccgattacccaagctacgaagaatccgtcgcaaagggttacaagaaagaggaaaagaagtactaa

SEQ ID NO: 29913 - protein, 403 aa, Kluyveromyces marxianus
MSYMNFDPKPLGDTNIFKPIKIGNNELKHRVVMPALTRMRAIAPGNIPNTEWAEEYYRQRSQYPGTLIITEGTFPSAQSGGYPNVPGIWSKEQLAEWKKIFNAIHENKSFVWVQLWVLGRQAWPEVLKKEGLRYDSATDDLYMGEEEKERALKANNPQHGITKEEIKQYIKEYVDAAKKAIDAGADGVQIHSANGYLLNQFLDPISNNRTDEYGGSIENRARFTLEVVDAVVDAVGAERTSIRFSPYGTFGTMSGGENPGIVAQYAYVIGELEKRARAGKRLAFIDLVEPRVTDPFLPEFEKWFKEGTNEFIYSIWKGPVLRVGNYALDPDQATLDSKKPNTLIGYGRSFIANPDLVYRLEKGLPLNKYDRNTFYTFTKEGYTDYPSYEESVAKGYKKEEKKY

SEQ ID NO: 29914 - DNA, 1203 bp, Saccharomyces cerevisiae
  CDS (1)..(1203)
atgccatttgttaaggactttaagccacaagctttgggtgacaccaacttattcaaaccaatcaaaattggtaacaatgaacttctacaccgtgctgtcattcctccattgactagaatgagagcccaacatccaggtaatattccaaacagagactgggccgttgaatactacgctcaacgtgctcaaagaccaggaaccttgattatcactgaaggtacctttccctctccacaatctgggggttacgacaatgctccaggtatccggtccgaagaacaaattaaagaatggaccaagattttcaaggctattcatgagaataaatcgttcgcatgggtccaattatgggttctaggttgggctgctttcccagacacccttgctagggatggtttgcgttacgactccgcttctgacaacgtgtatatgaatgcagaacaagaagaaaaggctaagaaggctaacaacccacaacacagtataacaaaggatgaaattaagcaatacgtcaaagaatacgtccaagctgccaaaaactccattgctgctggtgccgatggtgttgaaatccacagcgctaacggttacttgttgaaccagttcttggacccacactccaataacagaaccgatgagtatggtggatccatcgaaaacagagcccgtttcaccttggaagtggttgatgcagttgtcgatgctattggccctgaaaaagtcggtttgagattgtctccatatggtgtcttcaacagtatgtctggtggtgctgaaaccggtattgttgctcaatatgcttatgtcttaggtgaactagaaagaagagctaaagctggcaagcgtttggctttcgtccatctagttgaacctcgtgtcaccaacccatttttaactgaaggtgaaggtgaatacaatggaggtagcaacaaatttgcttattctatctggaagggcccaattattagagctggtaactttgctctgcacccagaagttgtcagagaagaggtgaaggatcctagaacattgatcggttacggtagattttttatctctaatccagatttggttgatcgtttggaaaaagggttaccattaaacaaatatgacagagacactttctacaaaatgtcagctgagggatacattgactaccctacgtacgaagaagctctaaaactcggttgggacaaaaattaa

SEQ ID NO: 29915 - protein, 400 aa, Saccharomyces cerevisiae
MPFVKDFKPQALGDTNLFKPIKIGNNELLHRAVIPPLTRMRAQHPGNIPNRDWAVEYYAQRAQRPGTLIITEGTFPSPQSGGYDNAPGIRSEEQIKEWTKIFKAIHENKSFAWVQLWVLGWAAFPDTLARDGLRYDSASDNVYMNAEQEEKAKKANNPQHSITKDEIKQYVKEYVQAAKNSIAAGADGVEIHSANGYLLNQFLDPHSNNRTDEYGGSIENRARFTLEVVDAVVDAIGPEKVGLRLSPYGVFNSMSGGAETGIVAQYAYVLGELERRAKAGKRLAFVHLVEPRVTNPFLTEGEGEYNGGSNKFAYSIWKGPIIRAGNFALHPEVVREEVKDPRTLIGYGRFFISNPDLVDRLEKGLPLNKYDRDTFYKMSAEGYIDYPTYEEALKLGWDKN

SEQ ID NO: 29916 - DNA, 1062 bp, Oryza sativa subsp
  CDS (1)..(1062)
atggggagattccacctcgcccacagggttgtccatgcgccgctgaccagatcgaggtgctacaataatcttcctcaagaacatgttcagctgtactactcgcagagggccacaaatggcggccttctgatcgctgaagccaccggggtctcggagactgctcaagggtatccaaacacaccgggtatatggacaaaggagcaggtggaagcttggaggacggttgtggatgcagtgcatcagaagggtggtgttttcttctgccaaatctggcatgtagggagggcatctaccaatgattatcagcccaatggacaaacaccaattccttgtacagacaagaaaatcactcctacagttctcaaagatggaactgtcgaggaattctctgccccaaggaggctaagagaagatgagatcccccaaattgttgatgatttccgaattgctgctaggaattgcattgaagcaggctttgacggagttgaaatccactgcgcatttgggtacctaattgaacagttcatgaaagatggtgtcaacgacagaactgacaagtacggaggaagcatcgcaaaccgttgccgctttgctctagaggtaatccaagcagccatcgatgagatcggatcggacagagtaggtgtccgtctctcgccatactcaaactgcctggactgttgggactcagacccagatgcacttggcctctacatgatccaagccatgagcaagctgggcgttctctactgcagcatggttgagcctgaggtggtcaaagtagacggcaaggtgcagattccttacaagctatggcacttcaggaaagtgtttgctggcactttcatcgtcgctggaggatacaacagagaagaaggcaatagagcagtgtctcagggttacacagacctggtagcatatggtaaatggttcttggcaaacccggatctgcctaggcggtttgagctgaatgcgcctctgaacaagtatgacagatcgacgttctacacttctgatccagttatcgggtacaccgattacccttttctcagtcctctgtga

SEQ ID NO: 29917 - protein, 353 aa, Oryza sativa subsp
MGRFHLAHRVVHAPLTRSRCYNNLPQEHVQLYYSQRATNGGLLIAEATGVSETAQGYPNTPGIWTKEQVEAWRTVVDAVHQKGGVFFCQIWHVGRASTNDYQPNGQTPIPCTDKKITPTVLKDGTVEEFSAPRRLREDEIPQIVDDFRIAARNCIEAGFDGVEIHCAFGYLIEQFMKDGVNDRTDKYGGSIANRCRFALEVIQAAIDEIGSDRVGVRLSPYSNCLDCWDSDPDALGLYMIQAMSKLGVLYCSMVEPEVVKVDGKVQIPYKLWHFRKVFAGTFIVAGGYNREEGNRAVSQGYTDLVAYGKWFLANPDLPRRFELNAPLNKYDRSTFYTSDPVIGYTDYPFLSPL

SEQ ID NO: 29918 - DNA, 1110 bp, Claviceps purpurea
  CDS (1)..(1110)
atgtccacatcgaaccttttcagcacggtaccattcggtaaaaatgttctcaaccacaaaattgtgctctctcctatgacacgttttcgtgcggatgacaatggggtgccactctcatatatgaagacattctacgcccagcgagcatctgtccgtgggacgctgctagtgaccgacgcggttgctatttgcccacggaccaaaggatttcccaacgtcccgggcatctggcacaaggatcaaatagccgcatggaaagaagttgttgatgaagtgcactctaaaggctctttcatttggcttcagctttgggcgactggtcgagcggctgaccttgaagcgcttaccagccaagggttgaaactcgaatcaagcagcgaagtaccggtcgcaccgggggagcctacgccacgagcgctggacgaggacgagattcagcagtacatactcgattatgtccaaggagcaaagaatgcagtacacggggctggatttgacggagtcgagatccacggagcgaacggtttcctcattgaccagttcctccaatcttcctgcaatcgccgcacagatcaatggggagggagcatcgagaaccgttccagattcggccttgaaatcactcggggcgtcgtcgatgcggtaggccatgatcgcgtgggcatgaagctctcaccgtggagcacgttccaaggaatgggcactatggacgacctagtgcctcagtttgaacatttcatcacgtgtctccgcgaaatggacatcgcctacctccacctggcgaattcccgttgggtagaagaagaagaccccagcatcaggacgcacccggacttccataaccaaactttcgtgcaaatgtgggggaaaaagagaccaatcttgctagccgggggatatgacccagattcggctcggcgtctcgttgaccagacgtactcagatcggaataatgtcttggtggtatttggaagacattacatctccaatccggatcttccgttcaggttgagaatgggcattgcctgcagaagtacaatcgagacacattctatattccctgctcgggagagggctatgtggactatcccttctgtaaagaatatctag

SEQ ID NO: 29919 - protein, 369 aa, Claviceps purpurea
MSTSNLFSTVPFGKNVLNHKIVLSPMTRFRADDNGVPLSYMKTFYAQRASVRGTLLVTDAVAICPRTKGFPNVPGIWHKDQIAAWKEVVDEVHSKGSFIWLQLWATGRAADLEALTSQGLKLESSSEVPVAPGEPTPRALDEDEIQQYILDYVQGAKNAVHGAGFDGVEIHGANGFLIDQFLQSSCNRRTDQWGGSIENRSRFGLEITRGVVDAVGHDRVGMKLSPWSTFQGMGTMDDLVPQFEHFITCLREMDIAYLHLANSRWVEEEDPSIRTHPDFHNQTFVQMWGKKRPILLAGGYDPDSARRLVDQTYSDRNNVLVVFGRHYISNPDLPFRLRMGIACRSTIETHSIFPARERAMWTIPSVKNI

SEQ ID NO: 29920 - DNA, 1128 bp, Lithospermum erythrorhizon
  CDS (1)..(1128)
atgggaaacacagagaagcatgaagagacccccaaaatgccacttttatccccttacaaaatggccaagtttcagctctctcatagaattgttctggcacccttaacaaggcagagatctttcggtaatgttccccagaaacatgctattttgtattactctcagagaaccaccagaggaggtctcctcatagcagaagccacaggggtttctgacactgcacaagggtatccgaacaccccaggaatatggacaaaggaacaagtagaagcttggaaaccaattgtagaagcagttcatgccaaaggtggcattttcttttgtcaaatatggcatgttgggagggtttcgcatcaaaattctcagcccaacggccaggctccgttctcttccacagataagccattgacttcccaaattcgttctaatggtattgatgttgcggaatttacacctcctcgacggctgagaacagatgaaattcctgagataatcaatgattttaggctggctgctcggaatgctattgaagctggttttgatggggttgagatccatggagctcatggttatctggttgaccagtttctgaaagaccagattaatgatcgaacagatcaatatggaggttcattagagaaccgttgcagatttgctctagaattagttgaagcagttgctactgaaattggagctgacagagttggaatcaggctttcaccatatgcaaattacatggaatcaggcgattcaaatccaactgcattaggtctttatatggccggagcattgaacaaatatggaatcctttactgccacatggttgaaccgaggatgaaaactgttggtgagaagacagaaagtccctacagtctcatgccaatgagaaaagcatttaagggtacattccttgttgctggtggatatggaaaggatgatggtaaccaagctataacagaaggccgagcagatcttgttgtttatggccgtatatttcttgccaatcctgatctccctaaaagatttgagcttgatgcgcccctcaacaaatacaatagggaaacattttacatacctgatcctgttgttggctacactgactatccatttcttgaagacacggcctaa

SEQ ID NO: 29921 - protein, 375 aa, Lithospermum erythrorhizon
MGNTEKHEETPKMPLLSPYKMAKFQLSHRIVLAPLTRQRSFGNVPQKHAILYYSQRTTRGGLLIAEATGVSDTAQGYPNTPGIWTKEQVEAWKPIVEAVHAKGGIFFCQIWHVGRVSHQNSQPNGQAPFSSTDKPLTSQIRSNGIDVAEFTPPRRLRTDEIPEIINDFRLAARNAIEAGFDGVEIHGAHGYLVDQFLKDQINDRTDQYGGSLENRCRFALELVEAVATEIGADRVGIRLSPYANYMESGDSNPTALGLYMAGALNKYGILYCHMVEPRMKTVGEKTESPYSLMPMRKAFKGTFLVAGGYGKDDGNQAITEGRADLVVYGRIFLANPDLPKRFELDAPLNKYNRETFYIPDPVVGYTDYPFLEDTA

SEQ ID NO: 29922 - DNA, 1089 bp, Pisum sativum
  CDS (1)..(1089)
atgggtgctaccactactgattccgttcctcttgttacaccttacaatatgggaaaattcaagctctctcacagagttgttatggcaccactgactagaacaagatcatacaacaatgttccacagcctcatgctattctctattactctcaaagagcatctcaaggtggtcttctcattgcagaagctactggtgtttctgacacggctcaaggctatccagacacaccgggtatttggacaaaacaacaagtggaggcatggaaacctattgtagatgctgttcatgccaaaggttctatattcttctgtcaaatttggcatgttggaagagtttcaaattcaatttatcagcccaatggacaagctccgatatcttctacagataagtcaatcacaagtaatgatcaacaacaattcacggcaccgagacgactaaggacagatgagattcctgatattgtcaatcacttcaaacttgctgcaagaaatgctattgaagctggttttgatggggttgaaatccatggagcccatggctatctactggatcaattcatgaaagacaaagtgaatgatagaacagatgaatatggtggatcacttgaaaatcgctgtcggtttacattagaagttgttgaagctgttgtaaatgagataggagcagaaagagttggaataagattatcaccatttgctgaatttgcagaaagtggagactccaatcccaatgcgttgggactttatatggttaatgccttgaacaaatataatattctgtactgccacatggtggaaccaagactaatacagacctttgatccagttgaaacccctcacagtttggagccaatgagaaaggctttcaatggaactttcatggttgcaggaggttataacagacaagatgggatcaatgctatagatgaaaatagagcagatcttgttgtttatggtcgtttgttcatatctaatccagatttgccaaagagatttgcactcaatgctcctctaaacaagtataatagggagacattctactcttcagatccagttcttggttatactgactatccttttcttgaatga

SEQ ID NO: 29923 - protein, 362 aa, Pisum sativum
MGATTTDSVPLVTPYNMGKFKLSHRVVMAPLTRTRSYNNVPQPHAILYYSQRASQGGLLIAEATGVSDTAQGYPDTPGIWTKQQVEAWKPIVDAVHAKGSIFFCQIWHVGRVSNSIYQPNGQAPISSTDKSITSNDQQQFTAPRRLRTDEIPDIVNHFKLAARNAIEAGFDGVEIHGAHGYLLDQFMKDKVNDRTDEYGGSLENRCRFTLEVVEAVVNEIGAERVGIRLSPFAEFAESGDSNPNALGLYMVNALNKYNILYCHMVEPRLIQTFDPVETPHSLEPMRKAFNGTFMVAGGYNRQDGINAIDENRADLVVYGRLFISNPDLPKRFALNAPLNKYNRETFYSSDPVLGYTDYPFLE

SEQ ID NO: 29924 - DNA, 1089 bp, Pisum sativum
  CDS (1)..(1089)
atgggtgctaccactactgattccgttcctcttcttacaccttacaatatgggaaaattcaagctctctcacagagttgttatggcaccactgactagaacaagatcatacaacaatgttccacagcctcatgctattctatattactctcaaagagcatctcaaggtggtcttctcattgcagaagctactggtgtttctgacacggctcaaggcttaccagacacaccgggtatttggacaaaacaacaagtcgaggcatggaaacctattgtagatgctgttcatgccaaaggtgctatcttcttctgtcaaatttggcatgttggaagggtttcaaattcaagttatcagccgaacggacaagctccgatatcttctacagataaggcaatcacaagtaatgatcaacaacaattcacggcaccaagacgactaaggacagatgagattcctaatattgtcaatgatttcaaacttgctgcaagaaatgctattgaagctggttttgatggggttgaaatccatggagctcatggctatctactcgatcaattcatgaaagataaagtgaatgacagaaccgatgaatatggtggatcacttgaaaatcgctgtcggtttccattagaagttgttgaagctgttgtaaatgagataggagcagaaagagttggaataagattatcaccatttgctgaatttgcagaaagtggagactccaatcccaatgctttgggactctatatggctaatgctctcaataagtataacattctgtactgtcacatggtggaaccaagaataatagatacctttgatccagttgaaacccctcacagtttggagccaatgagaaaggctttcaatggaactttcatggttgcaggaggttataacagacaagatgggataaaagctatagctgaaaacagggcggatcttgttgtttatggtcgttggttcatatctaatccagatttgccaaagagatttgcactcaatgctcctctaaacaagtataatagggagacattctactcctcagagccagttattggttatactgactatccttttcttgaatga

SEQ ID NO: 29925 - protein, 362 aa, Pisum sativum
MGATTTDSVPLLTPYNMGKFKLSHRVVMAPLTRTRSYNNVPQPHAILYYSQRASQGGLLIAEATGVSDTAQGLPDTPGIWTKQQVEAWKPIVDAVHAKGAIFFCQIWHVGRVSNSSYQPNGQAPISSTDKAITSNDQQQFTAPRRLRTDEIPNIVNDFKLAARNAIEAGFDGVEIHGAHGYLLDQFMKDKVNDRTDEYGGSLENRCRFPLEVVEAVVNEIGAERVGIRLSPFAEFAESGDSNPNALGLYMANALNKYNILYCHMVEPRIIDTFDPVETPHSLEPMRKAFNGTFMVAGGYNRQDGIKAIAENRADLVVYGRWFISNPDLPKRFALNAPLNKYNRETFYSSEPVIGYTDYPFLE

SEQ ID NO: 29926 - DNA, 1107 bp, Pisum sativum
  CDS (1)..(1107)
atgggtatcaaaaaagttgaaatgtcagctgctgatcctattcctcttgttacaccatacaagatgggaaacttcaatctctcccacagagttgttttggcaccactcactagaacaagatcatacaacaatgttcctcaacctcatgctatcctctattactctcagagagcatctcaaggtggtcttctcataacagaagctaccggtgtctctgatactgcccaaggctatccaaacacaccaggtatttggactaaagaacaagtggaagcatggaaaccaattgtagatgctgttcatgctaaaggcggtgtcatcatctgtcagatttggcatgttggaagggtttcaaattcatgctatcagccgaatgggcaaacaccgatatcttcttcggacaagtcactcacaagcagtcatgcacaacaattcacgccacccagaaggctaagcaccgacgaaattcctgatattgtcaatgacttcagacttgctgcaagaaatgctatcgaagctggttttgatgggattgaaatacatggggctcatggctacttaattgaacaattcatgaaggatgaagtgaatgatagaacagatgaatatggtggatccattgagaaccgttgtcgatttgctttggaagttgttgaagctgctgtgaatgaaataggggcagataaagttggaataagattatcaccttttgcagaacattcagaatgtggagactctagtcctaaagaattgggactttatatggtgaatgctctcaataaatataatcttctttactgtcacatggtggaaccaagaataaaatctgcttttgaagtggttgataatagtcctcacagtttggtgccaatgagaaaggctttcaatggcactttcatagttgcaggaggttatgacagacaagatggaatcaacgctgtagcagaaaacaagacagatcttgttgtttatggtcgattgttcttagctaatccagatttgccaaagagatttgcacttgatgctcctctcaacaagtataatagggagacattctacacttctgatccagttcttggttatactgactacccatttctcgactga

SEQ ID NO: 29927 - protein, 368 aa, Pisum sativum
MGIKKVEMSAADPIPLVTPYKMGNFNLSHRVVLAPLTRTRSYNNVPQPHAILYYSQRASQGGLLITEATGVSDTAQGYPNTPGIWTKEQVEAWKPIVDAVHAKGGVIICQIWHVGRVSNSCYQPNGQTPISSSDKSLTSSHAQQFTPPRRLSTDEIPDIVNDFRLAARNAIEAGFDGIEIHGAHGYLIEQFMKDEVNDRTDEYGGSIENRCRFALEVVEAAVNEIGADKVGIRLSPFAEHSECGDSSPKELGLYMVNALNKYNLLYCHMVEPRIKSAFEVVDNSPHSLVPMRKAFNGTFIVAGGYDRQDGINAVAENKTDLVVYGRLFLANPDLPKRFALDAPLNKYNRETFYTSDPVLGYTDYPFLD

SEQ ID NO: 29928 - DNA, 1107 bp, Pisum sativum
  CDS (1)..(1107)
atgaatctcaatacggatgcggctcttaccacttccgatccaattcctcttcttacgccttacaaaatgggcaatttcaatctctctcacagagttgttttggcaccacttactagaatgagatcctacaacaatgttcctcaacccattgctatcaactattatgctcagagagcttctcaagggggttttctcatagcagaagctactggtgtttctgacactgctcaaggatatccaaacacaccaggtgtttggacaaaagaccaagtggaagcatggaaacccattgtagatgctgttcatgctaaaggcagtgtctttttctgtcaaatttggcatgctggaagggtttcaaattcaatttatcagcccaatggacaagcgccaatatcttctacggacaagtcactcactagcaatgaagaacaacaattcacagcacccagacgactaaggacagatgaaattcctgatattgtcaatgacttcaaaattgctgcaagaaatgctattgaagctggatttgatggggttgaaatccatggggctcatggctatctagtggatcaattcatgaaagataaagtgaatgataggactgatgaatatggtggatcacttgaaaaccgctgtcggtttgcattacaagttgttgaagctgttgcgaatgagataggagcagataaacttggaataagattatcaccatttgctgaatatgcagaaagtggagactccaatcccaatgcgttgggactttatatggttaatgccttgaacaaatataatattctgtactgccacatggtggaaccaagactaatacatacctttgatccagttgaaacccctcacagtttggagccaatgagaaaggctttcaatggaactttcatggttgcaggaggttataacagacaagacgggatcaatgctatagctgaaaatagagcagatcttgttgtttatggtcgtttgttcttagctaatccagatttaccaaagagatttgcacttgatgctcctctcaacaagtatcatagggagactttctactcttcagatccagttcttggttatactgactatccttttcttgaatga

SEQ ID NO: 29929 - protein, 368 aa, Pisum sativum
MNLNTDAALTTSDPIPLLTPYKMGNFNLSHRVVLAPLTRMRSYNNVPQPIAINYYAQRASQGGFLIAEATGVSDTAQGYPNTPGVWTKDQVEAWKPIVDAVHAKGSVFFCQIWHAGRVSNSIYQPNGQAPISSTDKSLTSNEEQQFTAPRRLRTDEIPDIVNDFKIAARNAIEAGFDGVEIHGAHGYLVDQFMKDKVNDRTDEYGGSLENRCRFALQVVEAVANEIGADKLGIRLSPFAEYAESGDSNPNALGLYMVNALNKYNILYCHMVEPRLIHTFDPVETPHSLEPMRKAFNGTFMVAGGYNRQDGINAIAENRADLVVYGRLFLANPDLPKRFALDAPLNKYHRETFYSSDPVLGYTDYPFLE

SEQ ID NO: 29930 - DNA, 1089 bp, Pisum sativum
  CDS (1)..(1089)
atgggtgctaccactactgatccaattcctcttcttacaccttacaatatgggaaaattcaagctctctcacagagttgttatggcaccactcactagaacaagatcatacaacaatgttccacagcctcatgctattctatattactctcaaagagcatctcaaggtggtcttctcattgcagaagctactggtgtttctgacacggctcaaggcttaccagacacaccgggtatttggacaaaacaacaagtggaggcatggaaacctattgtagatgccgttcatgccaaaggtgctatcttcttctgtcaaatttggcatgttggaagggtttcaaattcaagttatcagccgaacggacaagctccgatatcttctacagataaggcaatcacaagtaatgatcaacaacaattcacggcaccaagacgactaaggacagatgagattcctaatattgtcaatgatttcaaacttgctgcaagaaatgctattgaagctggttttgatggggttgaaatccatggagctcatggctatctactcgatcaattcatgaaagataaagtgaatgacagaaccgatgaatatggtggatcacttgaaaatcgctgtcggtttccattagaagttgttgaagctgttgtaaatgagataggagcagaaagagttggaataagattatcaccatttgctgaatttgcagaaagtggagactccaatcccaatgctttgggactttatatggttaacgccttgaacaaatataatattctgtactgccacatggtggaaccaagaataatagttacctttgatccagttgaaacccctcactgtttggagccaatgagaaaggctttcaatggaactttcatggttgcaggaggttataacagacaagatgggataaaagctatagctgaaaacagggcagatcttgttgtttatggtcgttggttcatatctaatccagatttaccaaagagatttgcactcaatgctcctctaaacaagtataatagggagacattctactcttcagatccagttattggttatactgactatccttttcttgaatga

SEQ ID NO: 29931 - protein, 362 aa, Pisum sativum
MGATTTDPIPLLTPYNMGKFKLSHRVVMAPLTRTRSYNNVPQPHAILYYSQRASQGGLLIAEATGVSDTAQGLPDTPGIWTKQQVEAWKPIVDAVHAKGAIFFCQIWHVGRVSNSSYQPNGQAPISSTDKAITSNDQQQFTAPRRLRTDEIPNIVNDFKLAARNAIEAGFDGVEIHGAHGYLLDQFMKDKVNDRTDEYGGSLENRCRFPLEVVEAVVNEIGAERVGIRLSPFAEFAESGDSNPNALGLYMVNALNKYNILYCHMVEPRIIVTFDPVETPHCLEPMRKAFNGTFMVAGGYNRQDGIKAIAENRADLVVYGRWFISNPDLPKRFALNAPLNKYNRETFYSSDPVIGYTDYPFLE

SEQ ID NO: 29932 - DNA, 1119 bp, Comamonas sp
  CDS (1)..(1119): transl_table=11
atgaaaaaggtgttcgatctcttcgacctgaaggggctgaaactcaggaaccgagtcgttatggcgcctatgtcgcgggcacgcatcttggactcaacacctgattccagtacagccttgtactacggccagcgggcgggcgcgggtctcatcattgcggaaggtgcgaacgtgtcgccccaggcctgcggaaccatgggaacagcaggcatttatctgcctgagcatgtcgcgggctggcgcttgaccacacaagccgtgcacacggccggtggacgcatctttctccagctcgctcatgccggccgggtatcgcaccgctcactccagcccgaaggggctgcgccggtcagcagcacgtccaagcacgcactgaacacgaccgttttcgggatcaacgctgcaggacacacagccccgctgcaaacatcgatgccgcaatgcctgaccgaacaagagctggcgggcatacgctcggactttgtgcgcgccgccagactggccatgcaggcaggctttgacggagtcgaaatccacgcaggcaacggctttctattcgagcagttcatcaacggtgcactcaatgaccggcagggcctttatggtggcgccccggcagcgcatcgcctgcgctttctgctcgaaacactggacgccgtggcctctgccatcgggcctgatcacgtgggcgtcaaggtcactccgttcagtcgcctggccgatatgccctcctatgagggagagacgcagacttggctggcgtttgcgaacgagcccttgttgggcagcctcgcctatgtgcacgcggcttttggtgacgtagatgcctcttttgccctgcaattcagacaggccttgcgcggaaccttgatgcggccctgcagcccggatgcagccgccgccaatgccatgttggagcaaggcctggccgatctcgtcgtgatgggccgcccctttatttccaaccccgacctggtcgagcgcatgcgccacggctggcccttaagccttgcatccgacaccaccgtgtatggcggcggctcggccggctacaccgactacccgttctacaagcccgcccaagaggcagacaactccagcgcagacgctctggtctga

SEQ ID NO: 29933 - protein, 372 aa, Comamonas sp
MKKVFDLFDLKGLKLRNRVVMAPMSRARILDSTPDSSTALYYGQRAGAGLIIAEGANVSPQACGTMGTAGIYLPEHVAGWRLTTQAVHTAGGRIFLQLAHAGRVSHRSLQPEGAAPVSSTSKHALNTTVFGINAAGHTAPLQTSMPQCLTEQELAGIRSDFVRAARLAMQAGFDGVEIHAGNGFLFEQFINGALNDRQGLYGGAPAAHRLRFLLETLDAVASAIGPDHVGVKVTPFSRLADMPSYEGETQTWLAFANEPLLGSLAYVHAAFGDVDASFALQFRQALRGTLMRPCSPDAAAANAMLEQGLADLVVMGRPFISNPDLVERMRHGWPLSLASDTTVYGGGSAGYTDYPFYKPAQEADNSSADALV

SEQ ID NO: 29934 - DNA, 1209 bp, Pichia angusta
  CDS (1)..(1209)
atgtccaagacaccaacgctagcaaacacgaatctgttcaagcctattaaagtcggcaaagtcgagctgaaaaacagacttgttttcgctccaaccaccagatacagagcctcgaaggactttgttcctaccgactccatgctcaagtactacgaacagagagcagagaacaacggcggtctcctggtgaccgaggctacttatccggactatagctttggtctgtaccccgacaccccgatgatcaagacgccggctcaggttgctggctggaaaaaggtgattgaggccgtccacaacaagggctccttcgtctctatccagctgtggcacctgggaagaactgccagcgccgagttcaacaagtccaagggtcttcccctggtcggtgcttcgccgatctacatggacgaggactccgagaaggcggccaaggaggctggcaacgagctcagagcgctcacgattcctgaaatagagaacattgttaccgaatatgctgctgccgccaagcgtgcgatccacgaggccaaggccgacttcatcgagctgcacggcgcccacggctatcttctcgatcagttcaaccagcctggctccaataagagaaccgacaagtatggtggatccatcgagaaccgcgccagactgatcctggaggctgttgacgcctgcatcgaggctgttggcgctgagcacgttgccatcagactgtctccgtatgcggccgttcagggtatcaaaggtgttgacagcgagatccaccccatctcctactttggctacgtgctgagcgagctcgagcgcagagcccaggagggaaagagactggcctacatctctgttgtcgagccaagagtcaacggcatctacgactccaaggacaagagagaattcaacacctcgtggatcagcgaaatctggaagggtgttcttctgagatctggtgcctacctgaacgagaactacaagttcttgcagcatgacgtggacgagaacgacagaaccctgattggagtttccagatactacacgtccaacccagaccttgctgaccggctcaagaacggccacgagctgacaccatatgatagatctaaattctacaaacactcctccaacgacggatacctgacctggaccagatacggagagaaagagcctcagtacaaggatctggtggatgttgctccagagccactggcctga

SEQ ID NO: 29935 - protein, 402 aa, Pichia angusta
MSKTPTLANTNLFKPIKVGKVELKNRLVFAPTTRYRASKDFVPTDSMLKYYEQRAENNGGLLVTEATYPDYSFGLYPDTPMIKTPAQVAGWKKVIEAVHNKGSFVSIQLWHLGRTASAEFNKSKGLPLVGASPIYMDEDSEKAAKEAGNELRALTIPEIENIVTEYAAAAKRAIHEAKADFIELHGAHGYLLDQFNQPGSNKRTDKYGGSIENRARLILEAVDACIEAVGAEHVAIRLSPYAAVQGIKGVDSEIHPISYFGYVLSELERRAQEGKRLAYISVVEPRVNGIYDSKDKREFNTSWISEIWKGVLLRSGAYLNENYKFLQHDVDENDRTLIGVSRYYTSNPDLADRLKNGHELTPYDRSKFYKHSSNDGYLTWTRYGEKEPQYKDLVDVAPEPLA

SEQ ID NO: 29936 - DNA, 1209 bp, Pichia angusta
  CDS (1)..(1209)
atgaccccaagcacttctcttgcttccagcaatctgttcaagcctatcaaggtcggcaaagtcgagctgaaaaacagacttgttttcgctccaaccaccagatacagagcctcgaaggattttgttcctaccgactccatgctcaagtactacgagcaaagagcggaaaataacggaggcttgctgactgctgaggcaacctacgtcgacttcaattttggcctctatccgttcacgccgatgatcaagacgcctgcgcaggttgcggcctgggccaagatcatcgaggctgtacacaagcagggatcatatttctccatccagctgtggcatctcggcagggctgccgaccccaagttcaacaaggagaagggcgtgccgttcgtggctccgtcggctatatacttggaccaggactctgagaaggcagcccgggaggccggcaacgagcttagagaactgacgatcccggagattgaggcgattgtcaaagagtttgctgcagccgcgaaaagagccatccacgaggccaaggccgacttcatcgagctgcacagcgcccacggctatctgctggaccagtttatccagccaaacatcaacaagagaaccgacaagtacggtggttcgattgagaatcgcgcccggttggttctagaggttgtcgacgcgtgcattgaggcggtcggcgcagaacacgtgggtataagactgtcgccgtacgccaagttccaaggcagcgagggtgttgacagcgaaatcaacccgatcgcgtccttcggctacattttgagcgagctcgagaaaagagccagagacggaaacaggctggcgtatgtttccgtagtcgagccaagagttagcggaaacgtagacagcaacgaccagcggaagtttgacacttcctggatcagagaaatctggaagggtattctatttagggccggcggatacctcaaagaaaacgagcagtcgctggagcacgatgtcaaccaggacgacagaacgcttattggcgtctcgagatattacacttcgaatccagatctcgtggagagattgaaaaagggtctgtcgctgacgccctacgatagatcccgcttctacaaccactcctccaacgacggctacctcacatggcctaagtatggcgaggacgaggagaagtacaaagctgtgctggatgtcgagccaaaggcccttgcgtag

SEQ ID NO: 29937 - protein, 402 aa, Pichia angusta
MTPSTSLASSNLFKPIKVGKVELKNRLVFAPTTRYRASKDFVPTDSMLKYYEQRAENNGGLLTAEATYVDFNFGLYPFTPMIKTPAQVAAWAKIIEAVHKQGSYFSIQLWHLGRAADPKFNKEKGVPFVAPSAIYLDQDSEKAAREAGNELRELTIPEIEAIVKEFAAAAKRAIHEAKADFIELHSAHGYLLDQFIQPNINKRTDKYGGSIENRARLVLEVVDACIEAVGAEHVGIRLSPYAKFQGSEGVDSEINPIASFGYILSELEKRARDGNRLAYVSVVEPRVSGNVDSNDQRKFDTSWIREIWKGILFRAGGYLKENEQSLEHDVNQDDRTLIGVSRYYTSNPDLVERLKKGLSLTPYDRSRFYNHSSNDGYLTWPKYGEDEEKYKAVLDVEPKALA

SEQ ID NO: 29938 - DNA, 1206 bp, Pichia angusta
  CDS (1)..(1206)
atgtctcagccatcattaacagacacaaacctattcaaaccaatcaaggtcggtaatgtggagctcaagcacggattcttctcggctccaaccacgagattcagagcatctgatgatttcgtgcctaccgactccatgctcagctactatgagcagcgcgcggagaacaacggtggacttatcgttgccgaagccactttccccgactacagctttggcctgtatccaaacgctcctatgatcaagacgccggagcaggttgctgcctggaagaaaatcgtggatgctgtccataagcagggatctttcttctcgattcagctgtggcacttgggaagagttgccgtcccgcagctgaacaagaagtacaacgttccccttgttggtccttccaaactctacgtcgacgagagcagcgagaaggcagcaaaagaggcaggaaacgagctacacgagctgactatccctgaaatcgaggccatcgtgaaggagtttgccgccggcgccaagcgggtggttgacgaagccaaagcagactttgtggaaattcttgctggaggaggctacttgctggaccagttcaaccactcaaacatcaacaagagaaccgataagtacggtggctcgatcgaaaaccgtgccagactgattttggaggttgtcgacgcatgcatcgaggcggtcggcgcagagcatgtcggcatcaagctgtcgccatacgcagcggtcaatggtctccagggtgtcgatacggagatccaccctatttccagatatggatacatcttgagcgagttggagagaagaggaaaggagggaaagagaatcgcgtacatcacaatgatcgagcctcgtgtcaacggcacggaggacagcaaggacacgcgggcgttcgactcctcgtgggtgggcgagatctggaagagcactctgttgagggcgggcgcctatctcaaccagttctcgaattacctgatccaggacgtcaacaaggacgacagaacgctaattggagccgctagatactttacctccaacccggaccttatcgagagactgagaaagggacaggagctgactccgtacgacagatcgaagttctacaccccggccaccaatgacggctacatcacgtggaccaagtatggcgaggatcccgaaaagtacaagggccttgttgccgtgaagccacagccgctgtcctga

SEQ ID NO: 29939 - protein, 401 aa, Pichia angusta
MSQPSLTDTNLFKPIKVGNVELKHGFFSAPTTRFRASDDFVPTDSMLSYYEQRAENNGGLIVAEATFPDYSFGLYPNAPMIKTPEQVAAWKKIVDAVHKQGSFFSIQLWHLGRVAVPQLNKKYNVPLVGPSKLYVDESSEKAAKEAGNELHELTIPEIEAIVKEFAAGAKRVVDEAKADFVEILAGGGYLLDQFNHSNINKRTDKYGGSIENRARLILEVVDACIEAVGAEHVGIKLSPYAAVNGLQGVDTEIHPISRYGYILSELERRGKEGKRIAYITMIEPRVNGTEDSKDTRAFDSSWVGEIWKSTLLRAGAYLNQFSNYLIQDVNKDDRTLIGAARYFTSNPDLIERLRKGQELTPYDRSKFYTPATNDGYITWTKYGEDPEKYKGLVAVKPQPLS

SEQ ID NO: 29940 - DNA, 1074 bp, Brevibacterium sp
  CDS (1)..(1074): transl_table=11
atgtctcatctgctgttcgaaccgctcacactgcgcggcctgaccttccgcaatcggatctgggttccgcccatgtgccagtactccgtcgagactctagacggggtccccgctccttggcacaccgtccactacggtgcgatggcccgcggcggagccggcgccgtcatcgtcgaagccaccggagtcgctccggaggcgcgcatctcggccaaggatctgggctggaacgacgaacagcgcgacgccttcgtccccatcgtcgacttcctccacacccagggcgcggccgccggcatccagctcgcccacgccggccgcaaggcctcgacctatccggagtggggaaccgaccgcgacggcagcctgcccgtcgacgaaggcggttggcagaccgtggctccgtccgcactggccttcgacggcctcgccgaaccgcgagcactgaccgaaacagagatcgccgaggtggtcgcggccttccggtcctcggcccgccgggcgatcgaggccgggttcgacttcgtcgagatccacgccgcacacggatacctcctccatgagttcctgtcgcccctgagcaacaaccgcaccgactcctacggcggatccttggagaaccgggcccgactgctgctcgacatcgtcgatgccacccgcaccgaggtgggcgaggacgttcccgtgttcgtgcgcctctccgcgacggactggacagaaggcgggctcacgctcgacgacacagtggaggtcgccggatggctcaaggaacacggtgtcgacctcatcgacgtctcctccggcggcaatgtgatggcgtcgattcccgtcggtcccggctaccagacgaccctggccgccggcgtgcggcagggatcggggctgccgaccgcggccgtcggcctcatcagcgaaccgttccagggcgagcacattctggccaccggccaggccgatgtgatcctcgtgggccgtgagtacctccgcgatccgaacttcgcgctgcgcgccgccgacgccctgcgcttcgacatcgactaccgcccggctcagtaccaccgcgcgtataagtga

SEQ ID NO: 29941 - protein, 357 aa, Brevibacterium sp
MSHLLFEPLTLRGLTFRNRIWVPPMCQYSVETLDGVPAPWHTVHYGAMARGGAGAVIVEATGVAPEARISAKDLGWNDEQRDAFVPIVDFLHTQGAAAGIQLAHAGRKASTYPEWGTDRDGSLPVDEGGWQTVAPSALAFDGLAEPRALTETEIAEVVAAFRSSARRAIEAGFDFVEIHAAHGYLLHEFLSPLSNNRTDSYGGSLENRARLLLDIVDATRTEVGEDVPVFVRLSATDWTEGGLTLDDTVEVAGWLKEHGVDLIDVSSGGNVMASIPVGPGYQTTLAAGVRQGSGLPTAAVGLISEPFQGEHILATGQADVILVGREYLRDPNFALRAADALRFDIDYRPAQYHRAYK

SEQ ID NO: 29942 - DNA, 1116 bp, Pisum sativum
  CDS (1)..(1116)
atgggtgctccaattgccaatgccattcctcttattacaccatacaagatgggcaatttcaatctctctcacagagttgttatggcaccactcactaggatgagatcctacaacaatgttccacagcctcatgctattctctattacgctcagagagcttctcaaggaggacttctcatagcggaagctactggtgtttctgacactgctcaaggatatccaaacacaccaggtatatggacaaaagagcaagtggaagcatggaaacctattgtagaggctgttcatgctaaagacagtgtctttttcttgcagatttggcatgttggaagggtttcaaattcaatttatcagccgaacggacaagctccgatatcttctacagataaggcaatcacaagtaatgatcaacaacaattcacggcaccaagacgactaaggacaaatgagattcctaatattgtcaatgatttcaaacttgctgcaagaaatgctattgaagctggttttgatggggttgaaatccatggagctcatggctatctactggatcaattcatgaaagataaagtgaatgatagaaccgatgaatatggtggatcacttgaaaatcgctgtcggtttacattcgaagttgttgaagctgttgcaaatgagataggagcagataaagttggaataagattatcaccatttgctgaatatgcagaaagtggagactccaatcccaatgctttgggactctatatggctaatgctctcaataagtataacattctgtactgtcacatggtggaaccaagactgatacagacctttgatccagttgaaacccctcacagtttggagccaatgagaaaggcattcaatggaactttcatggttgcaggaggttataacagacaagacgggataaaagctatagctgaaaacagggcggatcttgttgtttatggtcgttggttcatatctaatccagatttaccaaagagatttgcactcgatgctcctctcaacaagtataatagggagacattctactcttcagatccagttattggttatactgactatcctttcttgaacgatgaaacaccggttgaatccaaggcttga

SEQ ID NO: 29943 - protein, 371 aa, Pisum sativum
MGAPIANAIPLITPYKMGNFNLSHRVVMAPLTRMRSYNNVPQPHAILYYAQRASQGGLLIAEATGVSDTAQGYPNTPGIWTKEQVEAWKPIVEAVHAKDSVFFLQIWHVGRVSNSIYQPNGQAPISSTDKAITSNDQQQFTAPRRLRTNEIPNIVNDFKLAARNAIEAGFDGVEIHGAHGYLLDQFMKDKVNDRTDEYGGSLENRCRFTFEVVEAVANEIGADKVGIRLSPFAEYAESGDSNPNALGLYMANALNKYNILYCHMVEPRLIQTFDPVETPHSLEPMRKAFNGTFMVAGGYNRQDGIKAIAENRADLVVYGRWFISNPDLPKRFALDAPLNKYNRETFYSSDPVIGYTDYPFLNDETPVESKA

SEQ ID NO: 29944 - DNA, 1092 bp, Pseudomonas putida
  CDS (1)..(1092): transl_table=11
atgtccgcactgttcgaaccctacaccctcaaagacgtcaccctgcgcaaccgcatcgccattccgcccatgtgccagtacatggccgaggatggcctgatcaacgactggcaccaggtgcattacgccagcatggcccgtggcggtgccggcctgctggtggtcgaagccacggcggtggcaccggaagggcgcatcacccctggttgcgccggaatctggagcgatgcccacgcccaggctttcgtgccggtggtgcaggccatcaaggcggccggttcggtgccgggcatccagattgcgcacgccggccgcaaggccagcgccaaccgcccgtgggagggtgacgaccacattggtgctgatgacgcgcgtggctgggagaccatcgccccgtccgccattgcctttggcgcgcacctgccaaacgtgccgcgcgcaatgaccctggacgacatcgcccgggtcaagcaggacttcgtcgatgccgcccgccgtgcgcgtgatgccggcttcgagtggatcgaactgcacttcgcccatggctacctgggccagagctttttctccgagcactccaacaagcgtaccgacgcctacggtggcagcttcgacaaccgcagtcgtttcctgctggaaaccctggcagcggtacgtgaggtgtggccagaaaacctgccgctgaccgcacgctttggtgtgctggaatacgacggccgcgacgagcagaccctggaagagtcgatcgagctggcgcgccgcttcaaggcgggtggcctggacctgctgagcgtgagtgtcggtttcaccattcccgagaccaacatcccgtggggcccggcgttcatggggccgatcgccgaacgcgtgcgccgtgaggcgaagctgccggtgacctcggcgtggggctttggtacgccgcaactggctgaagccgcgttgcaggccaaccagttggacctggtgtcggtagggcgcgcgcatttggctgatccgcactgggcgtactttgcggccaaggagctgggcgtggaaaaagcctcctggaccttgccggcgccttatgcgcactggcttgagcgctatcgctga

SEQ ID NO: 29945 - protein, 363 aa, Pseudomonas putida
MSALFEPYTLKDVTLRNRIAIPPMCQYMAEDGLINDWHQVHYASMARGGAGLLVVEATAVAPEGRITPGCAGIWSDAHAQAFVPVVQAIKAAGSVPGIQIAHAGRKASANRPWEGDDHIGADDARGWETIAPSAIAFGAHLPNVPRAMTLDDIARVKQDFVDAARRARDAGFEWIELHFAHGYLGQSFFSEHSNKRTDAYGGSFDNRSRFLLETLAAVREVWPENLPLTARFGVLEYDGRDEQTLEESIELARRFKAGGLDLLSVSVGFTIPETNIPWGPAFMGPIAERVRREAKLPVTSAWGFGTPQLAEAALQANQLDLVSVGRAHLADPHWAYFAAKELGVEKASWTLPAPYAHWLERYR

SEQ ID NO: 29946 - DNA, 1050 bp, Pseudomonas fluorescens
  CDS (1)..(1050): transl_table=11
atggcaactattttcgatccgatcaaactgggcgacctcgagctgtccaaccgcatcatcatggccccgctgactcgctgccgcgccgacgaaggccgcgtacccaacgcactgatggccgagtactacgtgcaacgtgcctccgccggcctgattctcagcgaagccacttcggtgacgccgatgggcgtcggctatccggacaccccgggcatctggtccaacgatcaggtacgcggctggaccaacatcaccaaagccgtacacgctgccggcggcaagatcgtcctgcaactttggcacgtcggccgcatctcgcacccgttgtacctgaacggcgaagcaccggtcgcgccgagcgccatccagcctaaaggccacgtcagcctggtgcgtccactggccgattacccgactccacgcgccctggaaaccgctgaaatcgccgagatcgtcgaggcctaccgcaccggtgccgagaacgccaaggccgccggtttcgacggcgtggaaatccacggcgccaacggctacctgctcgaccagttcttgcaaagcagcaccaaccagcgcaccgacaattacggcggctccctggaaaaccgtgcgcgtctgttgctggaagtgactgatgccgcgatcgacgtctggggcgccggccgtgtcggtgtgcacctggcaccgcgcgccgactcccacgacatgggcgacgacaacctcgccgagaccttcacctatgttgctcgcgagctgggcaagcgtggcatcgccttcatctgctcccgcgagaaagaaggcgccgacagcctcggcccacaactgaaagaagcctttggcggcgcgtacatcgccaacgagcgtttcaccaaggacagcgccaatgcgtggctggctgaaggcaaggctgacgctgtagcgttcggcgtgccattcattgccaacccggacctgccggcacgcctgaaagccgatgccccgctgaacgagccgcgtcctgagctgttctatggcaaaggcccggtcggctacatcgactacccgacgctgtaa

SEQ ID NO: 29947 - protein, 349 aa, Pseudomonas fluorescens
MATIFDPIKLGDLELSNRIIMAPLTRCRADEGRVPNALMAEYYVQRASAGLILSEATSVTPMGVGYPDTPGIWSNDQVRGWTNITKAVHAAGGKIVLQLWHVGRISHPLYLNGEAPVAPSAIQPKGHVSLVRPLADYPTPRALETAEIAEIVEAYRTGAENAKAAGFDGVEIHGANGYLLDQFLQSSTNQRTDNYGGSLENRARLLLEVTDAAIDVWGAGRVGVHLAPRADSHDMGDDNLAETFTYVARELGKRGIAFICSREKEGADSLGPQLKEAFGGAYIANERFTKDSANAWLAEGKADAVAFGVPFIANPDLPARLKADAPLNEPRPELFYGKGPVGYIDYPTL

SEQ ID NO: 29948 - DNA, 1101 bp, Lithospermum erythrorhizon
  CDS (1)..(1101)
atggcaagcaaaaagttactatttactccttaccaattgggcaagcatttgctctcacataggattgtgatgtcacctatgacaagaaacagatcttttgatgcaatgccccaaaaacatgctattttgtattactctcagagggcatctaaagggggcttcatcctaactgaagctactggagtttctgacactgcccaaggatacccccacacccctggtatttggacaaaggaacaacccgaggcatggaaaccaattgtggatgcagtccatgctaaaggcgccgtcttcttttgtcaactgtggcacgttgggagagtttcgaataaaggttttcagcccaatggacaggatccgatctcctcgacaactaagggatttactcctgctgttcgtgctagttatgttcaagaagattggttttcacctccacgagccctggaaacagatgaaattcctaagattattgatgattttagaatagccgcacgcaatgctattgatgctggctttgatggggtggagttacatggtgctcatggttatttgctagagcagtttctgaaggacaatgtcaatgacagaaccgataaatatggtggttcactggagaaccgttgtagatttgttctggaattagttgaagctgttgtcaatgaagttggagctgacaaagttggaattaagcttgcaccattttccgatttcatggaagccggtgactcagatccagctactttaggtacttatttggccgaagctttaaataaatttggaattctttacatgcacgtgcttgaaccaaggatgaaaacaaccggggaaacaaataacgagagtattgatccaatgagaaaggcgtttaagggcacatttgtggttggtggtggctacgacaaggaattgggtgagaaggccctagaagaaggtcgtgctgatctcgttgtttatggccgtccttttgtttctaatcctgatttgccaaagagatttgagattgatgctcctctcaacgagtacgataggaacacattcttcacacatgatcctgttgttggctatactgactatccatttcttgaagaagctacggcgtaa

SEQ ID NO: 29949 - protein, 366 aa, Lithospermum erythrorhizon
MASKKLLFTPYQLGKHLLSHRIVMSPMTRNRSFDAMPQKHAILYYSQRASKGGFILTEATGVSDTAQGYPHTPGIWTKEQPEAWKPIVDAVHAKGAVFFCQLWHVGRVSNKGFQPNGQDPISSTTKGFTPAVRASYVQEDWFSPPRALETDEIPKIIDDFRIAARNAIDAGFDGVELHGAHGYLLEQFLKDNVNDRTDKYGGSLENRCRFVLELVEAVVNEVGADKVGIKLAPFSDFMEAGDSDPATLGTYLAEALNKFGILYMHVLEPRMKTTGETNNESIDPMRKAFKGTFVVGGGYDKELGEKALEEGRADLVVYGRPFVSNPDLPKRFEIDAPLNEYDRNTFFTHDPVVGYTDYPFLEEATA

SEQ ID NO: 29950 - DNA, 1158 bp, Lithospermum erythrorhizon
  CDS (1)..(1158)
atgtcaatcccaagctcaaagttactctttaccccttaccaattgggcaagcatttgctttctcataggattgttatgtcaccaatgacaagaaatagatcttttgatgcaatgccccaaaaacatgctattttgtattactctcagaggacctcaccaggaggcttcatcgtaaccgaagccactggagtttccgacactgcccaaggatacccacacacccctggtatttggacaaaggaacaaaccgaggcatggaaaccaattgtggatgcagtccatgctaaaggtggcgtcttcttttgtcaattgtggcatgtggggagagtttcaaacaaaggtttccagcccaacgggcaggaccccatctcgtcaacaactaaggggtttactcctgcagttcgtgctagctatgttcaagaagattggttttcacctccccgagctctggaaacagatgaaattcctaagatcattgaggattttgtagtttctgctcgcaatgctattgatgctggatttgatgggattgagttacacggtgctcatggttatctgctagagcagtttctgaaagacaatgtcaatgacagaaccgataaatatggtggttccctggagaaccgttgtagattcgttctggaattagtcgaagctgttgtcaaggaagttggagctgacaaagttggaattaagcttgcacccttttcagatttcatggaagctggtgactcagatccagctgctttgggtacttatttggttgaagctttgaacaaatatggacttctttacttgcacgtgctcgaaccaaggatgaaaacaaccggagaaacgaacaaccagagtattgacccaatgagaaaggcttttaagggcacattcatggttggtggtggctacgacaaggacttgggcgagaaggccctggaagaaggccgtgctgatcttgttgtttatggccgtccatttgttgctaatcctgatttgccaaagagattcgaggttgatgcgcctctcaacgaacctgataggaacacgttcttctcacacgaccccgttgtcggctacaccgactacccatttcttgaagaagctacctgcttagttccagtatttgacactcactgcattttctctatttttcttttcaattaa

SEQ ID NO: 29951 - protein, 385 aa, Lithospermum erythrorhizon
MSIPSSKLLFTPYQLGKHLLSHRIVMSPMTRNRSFDAMPQKHAILYYSQRTSPGGFIVTEATGVSDTAQGYPHTPGIWTKEQTEAWKPIVDAVHAKGGVFFCQLWHVGRVSNKGFQPNGQDPISSTTKGFTPAVRASYVQEDWFSPPRALETDEIPKIIEDFVVSARNAIDAGFDGIELHGAHGYLLEQFLKDNVNDRTDKYGGSLENRCRFVLELVEAVVKEVGADKVGIKLAPFSDFMEAGDSDPAALGTYLVEALNKYGLLYLHVLEPRMKTTGETNNQSIDPMRKAFKGTFMVGGGYDKDLGEKALEEGRADLVVYGRPFVANPDLPKRFEVDAPLNEPDRNTFFSHDPVVGYTDYPFLEEATCLVPVFDTHCIFSIFLFN

SEQ ID NO: 29952 - DNA, 1083 bp, Pseudomonas syringae pv
  CDS (1)..(1083): transl_table=11
atgccgactcttttcgaccccttgactttgggcgacctgcaatctccaaaccgtgttctgatggcaccgctaacgcgtggccgcgcgacccgcgagcacgtgcctaccgagctgatgatcgagtattacacccagcgtgccagcgcgggcctgatcatcaccgaagccaccggcatcacccaagaaggcctaggctggccctatgcgcccggcatttggagcgatgaacaggtcgaggcctggaagccggtgacccaggccgtgcatgaggcaggcggacggatcattcttcagttgtggcatatgggccgtaccgttcattccagctttctcggcggagccaagccagtatcgtcctcggccacccgtgcgccgggacaggcgcacacctacgaaggcaagcaagactacgacgaggcgcggcctttgtcggcggatgaaatcccgcggctattgaacgattacgaacacgcagcgaaaaacgccatggccgcaggcttcgacggcgtgcagatccatgctgccaatggttacctaatcgaccagttcctgcgcgacaacagcaacgttcgcggggacgcctacgggggttcaatcgagaaccgcatccgtctattggtcgaagtcacccggcgcgtggcggagaccgtaggtgccgaaaaaacgggcgtgcggctgtcacccaacggtgattcccaaggcgtcaacgacagcaatccggagccgctgttcagcgccgcggccaaggccttggatgagatcggcatcgctcatctggagttgcgcgaaccagggtatgaaggcaccttcggcaaggccgaccggccgcccgtgcacccggtcatccgccaggcgttcagccgtacgctgattctcaactctgactacactttggaaacggctcaggctgcactagccaccggagaagcggacgcgatcaccttcggccgcccgttcctggccaaccctgacctgcctcacaggtttgccgagagactgccgctgaacaaggacgtgatggagacttggtatagccaggggcccgaaggttatgtggactaccccaccgctgaccaaaagtag

SEQ ID NO: 29953 - protein, 360 aa, Pseudomonas syringae pv
MPTLFDPLTLGDLQSPNRVLMAPLTRGRATREHVPTELMIEYYTQRASAGLIITEATGITQEGLGWPYAPGIWSDEQVEAWKPVTQAVHEAGGRIILQLWHMGRTVHSSFLGGAKPVSSSATRAPGQAHTYEGKQDYDEARPLSADEIPRLLNDYEHAAKNAMAAGFDGVQIHAANGYLIDQFLRDNSNVRGDAYGGSIENRIRLLVEVTRRVAETVGAEKTGVRLSPNGDSQGVNDSNPEPLFSAAAKALDEIGIAHLELREPGYEGTFGKADRPPVHPVIRQAFSRTLILNSDYTLETAQAALATGEADAITFGRPFLANPDLPHRFAERLPLNKDVMETWYSQGPEGYVDYPTADQK

SEQ ID NO: 29954 - DNA, 1224 bp, Candida albicans
  CDS (1)..(1224): transl_table=12
atgactattgaatcaactaattcatttgttgtcccatcagatactaaattaattgatgttactccattaggttcaacaaaattatttcaaccaattaaagtcggtaacaatgttttacctcaacgtattgcttatgtcccaaccaccagatttagagcttctaaagatcatattccaagtgatttacaattaaattattataatgctcgttctcaatatccaggtacattgattattactgaagcaacatttgcatctgaaagaggtggtattgatttacatgttccaggtatttataatgacgctcaagctaaaagttggaagaaaatcaatgaagcaattcatggcaatggaagtttcagttcagttcaattatggtatttaggtagagttgctaatgctaaagatttgaaagattctggattacctcttattgcgccatcagcagtttattgggatgagaatagtgaaaaattggccaaagaagctggaaatgaattgagagcattaactgaagaagaaattgatcatattgttgaagttgaatatcctaatgctgctaaacatgcacttgaagcaggatttgattatgttgaaatccatggtgctcatggttacttgttggatcagtttttaaatcttgcctctaataaaagaaccgataaatatggttgtggtagtattgaaaatcgtgcacgattattattaagagtggttgataaattaattgaagttgttggtgctaatagattggcattacgtttatcaccatgggctagtttccaaggtatggaaattgaaggtgaagaaatccattcatatattttacaacaattacaacaacgtgctgataatggtcaacaattggcttatatttctcttgttgaacctcgtgttactggtatttatgatgtttctttaaaagatcaacaaggtcgtagtaatgaatttgcttataagatttggaaaggaaattttattcgtgctggtaattatacttatgatgctccagaatttaaaactttgattaatgatttaaagaatgatcgtagtattattggattttctagatttttcacttcaaatcctgatttagtggaaaaattgaaattgggtaaaccattgaattattataatcgtgaagaattttataagtactacaactatggttataattcttatgatgaatcagaaaagcaagtcattggtaaaccattggcatag

SEQ ID NO: 29955 - protein, 407 aa, Candida albicans
MTIESTNSFVVPSDTKLIDVTPLGSTKLFQPIKVGNNVLPQRIAYVPTTRFRASKDHIPSDLQLNYYNARSQYPGTLIITEATFASERGGIDLHVPGIYNDAQAKSWKKINEAIHGNGSFSSVQLWYLGRVANAKDLKDSGLPLIAPSAVYWDENSEKLAKEAGNELRALTEEEIDHIVEVEYPNAAKHALEAGFDYVEIHGAHGYLLDQFLNLASNKRTDKYGCGSIENRARLLLRVVDKLIEVVGANRLALRLSPWASFQGMEIEGEEIHSYILQQLQQRADNGQQLAYISLVEPRVTGIYDVSLKDQQGRSNEFAYKIWKGNFIRAGNYTYDAPEFKTLINDLKNDRSIIGFSRFFTSNPDLVEKLKLGKPLNYYNREEFYKYYNYGYNSYDESEKQVIGKPLA

SEQ ID NO: 29956 - DNA, 1197 bp, Kluyveromyces lactis
  CDS (1)..(1197)
atgtcgtttatgaactttgaaccaaagccattggctgatactgatatcttcaaaccaatcaagattggtaacactgaattgaagcacagggttgtcatgcctgcattgacaagaatgagagcgttgcatccaggcaacgttccaaaccctgactgggctgttgaatattacagacaacgttcccaatatccaggtactatgattatcactgaaggtgctttcccatcagctcagtcaggtggttacgataacgcaccaggtgtttggagcgaagaacaactggctcaatggagaaagatcttcaaggcaattcacgacaacaagtcttttgtttgggtacaattgtgggttctaggtagacaagcttttgctgataacttggcaagagatggattgcgttatgatagtgcttccgatgaagtgtacatgggtgaagatgaaaaggaacgtgccatcagatctaacaaccctcagcatggtatcaccaaggatgaaattaagcagtatatcagggactatgttgatgctgctaagaagtgtatcgatgctggtgcagatggtgttgaaatccattccgctaacggttatttgttgaatcaattcctagacccaatctccaacaaaagaactgatgaatacggtggatccattgagaaccgtgctagattcgtcttggaagtcgtcgatgccgttgtcgatgccgttggtgccgaaagaaccagtatcagattctcaccatacggtgtatttggtaccatgtcaggtggttcagaccctgtcttggtggctcaattcgcctatgtacttgctgaattggaaaagagggcaaaggctggtaagagattagcatacgtcgatttagtcgaacctcgtgtcacatcgccattccaaccggaatttgaaggctggtataaaggtggtaccaatgaattcgtatactctgtttggaagggtaacgtgctaagagttggtaactacgctttggacccagatgctgccattacggactcaaagaatccaaacactttgatcggttacggtagagccttcattgccaacccagatcttgttgaacgtctcgaaaagggtttgccattgaatcaatacgatagaccctctttctacaaaatgtctgcggaagggtatatcgactacccaacatacgaggaagctgttgccaagggttacaagaaatag

SEQ ID NO: 29957 - protein, 398 aa, Kluyveromyces lactis
MSFMNFEPKPLADTDIFKPIKIGNTELKHRVVMPALTRMRALHPGNVPNPDWAVEYYRQRSQYPGTMIITEGAFPSAQSGGYDNAPGVWSEEQLAQWRKIFKAIHDNKSFVWVQLWVLGRQAFADNLARDGLRYDSASDEVYMGEDEKERAIRSNNPQHGITKDEIKQYIRDYVDAAKKCIDAGADGVEIHSANGYLLNQFLDPISNKRTDEYGGSIENRARFVLEVVDAVVDAVGAERTSIRFSPYGVFGTMSGGSDPVLVAQFAYVLAELEKRAKAGKRLAYVDLVEPRVTSPFQPEFEGWYKGGTNEFVYSVWKGNVLRVGNYALDPDAAITDSKNPNTLIGYGRAFIANPDLVERLEKGLPLNQYDRPSFYKMSAEGYIDYPTYEEAVAKGYKK

SEQ ID NO: 29958 - DNA, 1038 bp, Bacillus anthracis
  CDS (1)..(1038): transl_table=11
atgaattccgaacttttttcaccttatacaattaaggacgttacattaaaaaaccgaattgttatgtcacctatgtgcatgtattcatcggaaaacgaggatggccaagtaacgaatttccatctcattcattatggaacgagagcggctggtcaagttggtttagttatgattgaagcaacagccgtattacctgaagggcgaatttctaataaagacttaggtatttgggatgacagtctaattgaaggcttacataaaacgacaacttttatacatgataacggtgcaaaagctgccattcaactcgctcacgctggaagaaaagctgaattagaaacggatgctctcgctccatccgcagttccgtttaatgaaactatgaaaataccagtagaaatgagtatacatcaaataaaaaataccatattagcgtttcagcaggctgcaatacgatcaaaacaagctggatttgacgtgattgaaatacatggcgcccacggttatctcattaatgaatttctttctccgctttccaataagcggactgatgaatatggcggttcacctgaaaaccgctatcgtttcttacgcgaaatcattgactcgataaatgaagtttggaacggaccgttatttgttcgtatttcagcaaatgattatcaccctgacgggttaacggttcaagattacgttcagtatacaaaatggatgaaagaacaaggagtagatttaatcgattgtagttctggggctgttgtacctgcacgcatcgatgtttatcctggatatcaagtacaatacgctaaacatattaaagaacatgctaacattgcaactggtgctgttggattgattacgaccggggcacaagcagagcaaattttaaacaataacgaagcagatttaatttttatcggacgtgagttacttcgcaatccttacttcccaagaatagccgccaatgaacttggctttgagttagaagaaccgcatcaatacgagcgagcgcctgggaaaattagtacaaataaataa

SEQ ID NO: 29959 - protein, 345 aa, Bacillus anthracis
MNSELFSPYTIKDVTLKNRIVMSPMCMYSSENEDGQVTNFHLIHYGTRAAGQVGLVMIEATAVLPEGRISNKDLGIWDDSLIEGLHKTTTFIHDNGAKAAIQLAHAGRKAELETDALAPSAVPFNETMKIPVEMSIHQIKNTILAFQQAAIRSKQAGFDVIEIHGAHGYLINEFLSPLSNKRTDEYGGSPENRYRFLREIIDSINEVWNGPLFVRISANDYHPDGLTVQDYVQYTKWMKEQGVDLIDCSSGAVVPARIDVYPGYQVQYAKHIKEHANIATGAVGLITTGAQAEQILNNNEADLIFIGRELLRNPYFPRIAANELGFELEEPHQYERAPGKISTNK

SEQ ID NO: 29960 - DNA, 1038 bp, Bacillus thuringiensis subsp
  CDS (1)..(1038): transl_table=11
atgaattccgaacttttttcaccttatacaattaaggacgttacattaaaaaaccgaattgttatgtcacctatgtgcatgtattcatcggaaaacgaggatggccaagtaacgaatttccatctcattcattatggaacaagagctgctggtcaagttggtttagttatgattgaagcaacagccgtattacctgaagggcgaatttctaataaagacttaggtatttgggatgacagtctaattgaaggcttacataaaacgacaacttttatacatgataacggtgcaaaagctgccattcaactcgctcacgctggaagaaaagcagaattagaaacggatgctctcgctccatccgcaattccgtttaatgaaactatgaaaataccagtagaaatgagtatacagcaaataaaaaataccatattagcgtttcaacaagctgcagtacgatctaaacaagctggatttgacgtgattgaaatacacggtgctcacggttatctgattaatgaatttctttctccgctttccaataagcggactgatgaatatggtggttcacctgaaaagcgctatcgtttcttacgcgaaatcattgactcgataaatgaagtttggaacggaccgttatttgttcgtatttcagcaaatgattatcaccctgacgggttaacggttcaagattacattcaatatacgaaatggatgaaagaacaaggagtagatttaatcgattgtagctctggggctgttgtacctgcacgcatcgatgtttatcctgggtatcaagtacaatacgctaaacatattaaagaacatgctaacattgcaactggtgccgttggattgattacgaccggggcacaagcagagcaaattttaactaataacgaagcagatttaatttttatcggacgtgagttacttcgcaatccttacttcccaagaatagcggccaatgaacttggctttgagttagaagaaccgtatcaatacgagcgagcacctgggaaaatcagtacaaataaataa

SEQ ID NO: 29961 - protein, 345 aa, Bacillus thuringiensis subsp
MNSELFSPYTIKDVTLKNRIVMSPMCMYSSENEDGQVTNFHLIHYGTRAAGQVGLVMIEATAVLPEGRISNKDLGIWDDSLIEGLHKTTTFIHDNGAKAAIQLAHAGRKAELETDALAPSAIPFNETMKIPVEMSIQQIKNTILAFQQAAVRSKQAGFDVIEIHGAHGYLINEFLSPLSNKRTDEYGGSPEKRYRFLREIIDSINEVWNGPLFVRISANDYHPDGLTVQDYIQYTKWMKEQGVDLIDCSSGAVVPARIDVYPGYQVQYAKHIKEHANIATGAVGLITTGAQAEQILTNNEADLIFIGRELLRNPYFPRIAANELGFELEEPYQYERAPGKISTNK

SEQ ID NO: 29962 - DNA, 1098 bp, Escherichia coli
  CDS (1)..(1098): transl_table=11
atgtcatctgaaaaactgtattccccactgaaagtgggcgcgatcacggcggcaaaccgtatttttatggcaccgctgacgcgtctgcgcagtattgaaccgggtgacattcctaccccgttgatggcggaatactatcgccaacgtgccagtgccggtttgattattagtgaagccacgcaaatttctgcccaggcaaaaggatatgcaggtgcgcctggcatccatagtccggagcaaattgccgcatggaaaaaaatcaccgctggcgttcatgctgaaaatggtcatatggccgtgcagctgtggcacaccggacgcatttctcacgccagcctgcaacctggcggtcaggcaccggtagcgccttcagcacttagcgcgggaacacgtacttctctgcgcgatgaaaatggtcaggcgatccgtgttgaaacatccatgccgcgtgcgcttgaactggaagagattccaggtatcgtcaatgatttccgtcaggccattgctaacgcgcgtgaagccggttttgatctggtagagctccactctgctcacggttatttgctgcatcagttcctttctccttcttcaaaccatcgtaccgatcagtacggcggcagcgtggaaaatcgcgcacgtttggtactggaagtggtcgatgccgggattgaagaatggggtgccgatcgcattggcattcgcgtttcaccaatcggtactttccagaacacagataacggcccgaatgaagaagccgatgcactgtatctgattgaacaactgggtaaacgcggcattgcttatctgcatatgtcagaaccagattgggcggggggtgaaccgtatactgatgcgttccgcgaaaaagtacgcgcccgtttccacggtccgattatcggcgcaggtgcatacacagtagaaaaagctgaaacgctgatcggcaaagggttaattgatgcggtggcatttggtcgtgactggattgcgaacccggatctggtcgcccgcttgcagcgcaaagctgagcttaacccacagcgtgccgaaagtttctacggtggcggcgcggaaggctataccgattacccgacgttgtaa

SEQ ID NO: 29963 - protein, 365 aa, Escherichia coli
MSSEKLYSPLKVGAITAANRIFMAPLTRLRSIEPGDIPTPLMAEYYRQRASAGLIISEATQISAQAKGYAGAPGIHSPEQIAAWKKITAGVHAENGHMAVQLWHTGRISHASLQPGGQAPVAPSALSAGTRTSLRDENGQAIRVETSMPRALELEEIPGIVNDFRQAIANAREAGFDLVELHSAHGYLLHQFLSPSSNHRTDQYGGSVENRARLVLEVVDAGIEEWGADRIGIRVSPIGTFQNTDNGPNEEADALYLIEQLGKRGIAYLHMSEPDWAGGEPYTDAFREKVRARFHGPIIGAGAYTVEKAETLIGKGLIDAVAFGRDWIANPDLVARLQRKAELNPQRAESFYGGGAEGYTDYPTL

SEQ ID NO: 29964 - DNA, 1131 bp, Solanum lycopersicum
  CDS (1)..(1131)
atggaaaataaagtcgttgaagagaaacaagtagacaagatccctctaatgagcccttgtaaaatgggaaagtttgagttatgtcatagagttgtattggcaccattaacaaggcaaagatcttatggttatattcctcaaccacatgctatacttcattactcacaaagaagtacaaatggtggccttctaataggagaggccacagtaatatctgagactggcatagggtacaaagatgtacctggtatatggacaaaagagcaagtggaggcttggaaaccaattgtagatgcagttcatgctaaaggaggaatcttcttttgccaaatttggcatgttggtagagtttccaacaaagattttcagcccaatggagaggatcctatctcctgcacagacagaggactaacacctcaaattcgttccaatggcatagatattgcacactttacacgacctagacggttgacaacagatgaaattcctcaaattgttaacgaatttcgagttgctgctagaaacgcaattgaagctggatttgatggggttgagatccacggagctcatggctatctaattgatcagtttatgaaagatcaagttaacgatcgaagtgataaatatggagggtctttagagaatcgttgtagatttgcacttgaaatagtggaagcagttgcaaatgagattggatctgaccgagttggtataaggatatccccatttgcgcattataatgaagcaggggacacgaacccgactgctttgggactttacatggtggaatcgttgaacaagtatgatctcgcgtattgccatgtggttgagcctaggatgaaaacagcttgggaaaaaattgaatgtactgaaagccttgtaccgatgaggaaggcatataaaggtacttttatagtagctggtggttacgatagagaagatggaaacagagctttgattgaagatcgagctgatcttgttgcgtatggacgtttattcatatctaatccagatttaccaaagcgatttgagctaaatgctcctcttaacaagtataacagagacacattttatacttctgatccaattgttggctatactgattatccatttctagaaaccatgacatga

SEQ ID NO: 29965 - protein, 376 aa, Solanum lycopersicum
MENKVVEEKQVDKIPLMSPCKMGKFELCHRVVLAPLTRQRSYGYIPQPHAILHYSQRSTNGGLLIGEATVISETGIGYKDVPGIWTKEQVEAWKPIVDAVHAKGGIFFCQIWHVGRVSNKDFQPNGEDPISCTDRGLTPQIRSNGIDIAHFTRPRRLTTDEIPQIVNEFRVAARNAIEAGFDGVEIHGAHGYLIDQFMKDQVNDRSDKYGGSLENRCRFALEIVEAVANEIGSDRVGIRISPFAHYNEAGDTNPTALGLYMVESLNKYDLAYCHVVEPRMKTAWEKIECTESLVPMRKAYKGTFIVAGGYDREDGNRALIEDRADLVAYGRLFISNPDLPKRFELNAPLNKYNRDTFYTSDPIVGYTDYPFLETMT

SEQ ID NO: 29966 - DNA, 1125 bp, Arabidopsis thaliana
  CDS (1)..(1125)
atggaaatggtaaacgcagaagcaaaacagagtgtccctcttctcaccccttataagatgggaagattcaatctttctcatagggttgttctagcaccattgacgagacagaaatcgtacggaagcgttcctcagcctcacgctatcttgtattactctcagagaacgtcaccgggaggttttctcatcgctgaagccaccggggtttcagatacagctcaagggtatccagatacacctgggatatggactaaagagcatgtggaggcatggaagccaatcgttgatgctgtacatgccaaaggtggtatcttcttctgtcagatctggcatgttggccgcgtttctaatcgcggttttcagccaaggaggcaagctcctatctcttgtacggggaagccaattatgcctcaaatgcgtgctaatggcattgatgaagctcgctttacccctccaagacgtctaagtatcgaagaaatccccggcattgtcaatgattttaggcttgctgcaagaaatgctatggaagctggttttgatggagttgagattcatggagctcatggctatctgattgatcagttcatgaaggacaaagtgaatgacagaactgatgaatatggtggatcattgcaaaaccgttgcaaatttgctctggaagtagtcgatgcagtggctaaggagatcgggccagaccgtgttggaatcaggctctctccgtttgcagactatatggaatccggagacactaatccagaagcattagggctgtacatggtggaatctctgaacaaatatggaatcctctactgtcatatgattgaacccagaatgaaaacagtgggagaaatagcagcgtgttctcacacactaatgccaatgagggaagcctttaaggggactttcatctctgcaggaggtttcacgagggaagatgggaatgaggccgtggcaaagggacgaactgatcttgtggcttatggtcgatggtttctagccaacccagacctgccaaagcggttccaactggatgcaccgctgaataaatacaataggtcaacgttttacacttctgatcctgtcgtgggttacaccgattacccttcccttgaatcaacagcttaa

SEQ ID NO: 29967 - protein, 374 aa, Arabidopsis thaliana
MEMVNAEAKQSVPLLTPYKMGRFNLSHRVVLAPLTRQKSYGSVPQPHAILYYSQRTSPGGFLIAEATGVSDTAQGYPDTPGIWTKEHVEAWKPIVDAVHAKGGIFFCQIWHVGRVSNRGFQPRRQAPISCTGKPIMPQMRANGIDEARFTPPRRLSIEEIPGIVNDFRLAARNAMEAGFDGVEIHGAHGYLIDQFMKDKVNDRTDEYGGSLQNRCKFALEVVDAVAKEIGPDRVGIRLSPFADYMESGDTNPEALGLYMVESLNKYGILYCHMIEPRMKTVGEIAACSHTLMPMREAFKGTFISAGGFTREDGNEAVAKGRTDLVAYGRWFLANPDLPKRFQLDAPLNKYNRSTFYTSDPVVGYTDYPSLESTA

SEQ ID NO: 29968 - DNA, 1176 bp, Arabidopsis thaliana
  CDS (1)..(1176)
atgacggcggcacaagggaactctaacgagactctgttttcttcttacaagatgggaagattcgatctctctcatcgagtggttctggcgccgatgacgcggtgcagggcgttgaacggagtaccaaacgcggcgttggcagagtattatgctcaacggaccactcccggcggttttctcatctccgaaggcaccatggtctctcccggatccgcagggttcccacatgtgcctggaatctattcagatgaacaagtagaagcatggaagcaagttgtggaagcagttcacgctaagggaggtttcatcttttgtcaattatggcatgttggacgtgcttctcatgcagtgtatcaacctaatggaggatcaccaatatcgtcaacgaacaaaccaatctcggaaaacaggtggcgagttttgttgcccgatggttcccacgtgaagtacccgaaacctcgggctttagaagcttccgagatacctcgggtggtggaggattattgcctttctgctttgaatgcgattcgagctggtttcgatgggattgagatccacggggcgcatggttaccttattgatcagtttttgaaagatgggatcaatgaccgtactgaccaatacggaggatccattgcaaaccgttgtagattcttgaaacaagtagtggaaggtgtagtttcagccataggagctagtaaagttggtgtgagggtatctccggctatagatcacttggacgcaactgattctgacccactatcactcgggctagccgtggttggcatgctcaataagttacaaggtgttaatggctcaaagctcgcttaccttcacgttacacaacctcgctaccacgcctacgggcaaacagagtctggaaggcaagggagtgatgaggaagaagctaagctaatgaagagcttgaggatggcttataatggaacctttatgtctagtggaggattcaataaggaactaggtatgcaagctgttcaacaaggtgatgctgatttggtttcatatggcagactgtttatcgcaaacccggatttggtttcgcggttcaagattgatggagagttgaataaatataatcggaagacgttttacactcaagatccagttgttggctacacggattatcctttcttggctcctttttcccgcctctga

SEQ ID NO: 29969 - protein, 391 aa, Arabidopsis thaliana
MTAAQGNSNETLFSSYKMGRFDLSHRVVLAPMTRCRALNGVPNAALAEYYAQRTTPGGFLISEGTMVSPGSAGFPHVPGIYSDEQVEAWKQVVEAVHAKGGFIFCQLWHVGRASHAVYQPNGGSPISSTNKPISENRWRVLLPDGSHVKYPKPRALEASEIPRVVEDYCLSALNAIRAGFDGIEIHGAHGYLIDQFLKDGINDRTDQYGGSIANRCRFLKQVVEGVVSAIGASKVGVRVSPAIDHLDATDSDPLSLGLAVVGMLNKLQGVNGSKLAYLHVTQPRYHAYGQTESGRQGSDEEEAKLMKSLRMAYNGTFMSSGGFNKELGMQAVQQGDADLVSYGRLFIANPDLVSRFKIDGELNKYNRKTFYTQDPVVGYTDYPFLAPFSRL

SEQ ID NO: 29970 - DNA, 1191 bp, Solanum lycopersicum
  CDS (1)..(1191)
atggcgtcttcagctcaagatggaaacaatccccttttctctccttacaagatgggcaagttcaatctatcccacagggtagtattggctccgatgacaaggtgcagagcactgaataatattccacaggcggcgctaggggagtattacgagcagagagcgacggccggtggatttctgatcactgaaggcactatgatttctccgacttcagctgggtttcctcatgtgccagggattttcacaaaggaacaagtaagggaatggaagaaaatagttgatgtagtgcatgcaaagggtgctgtcatattttgtcagctgtggcatgttggtcgtgcatctcatgaagtgtatcaacctgctggagctgcaccaatatcatccactgagaagcctatatcaaataggtggagaattctaatgcctgatggaactcatgggatttatccaaaaccaagagcaattggaacctatgagatctcacaagttgttgaagattatcgcaggtcggccttgaatgctattgaagcaggtttcgatggtattgaaatccatggagctcacggttacttgattgatcaattcttgaaagatgggatcaatgaccggacagatgagtatggtggatcactagccaaccggtgcaaattcatcacacaggtggttcaagcagtagtctcagcaataggagctgatcgcgtaggcgttagagtttcaccagcaatagatcatcttgatgccatggactctaatccactcagccttggcttagcagttgttgaaagactaaacaaaatccaactccattctggttccaagcttgcctatcttcatgtaacacagccacgatacgtagcatatgggcaaactgaagcaggcagacttggcagtgaagaggaagaggctcgtttaatgaggactttgaggaacgcgtatcaggggacattcatttgcagtggtggatacactagggaactaggaattgaggctgtggcacaaggtgatgctgatctcgtgtcatatggtcgtcttttcatctctaatcctgatttggttatgagaatcaagctaaatgcacctctaaataagtataacaggaagacattctatactcaagatccagttgtgggatacacagattaccctttccttcaaggaaatggaagcaatggaccgttatcgcgtctgtga

SEQ ID NO: 29971 - protein, 396 aa, Solanum lycopersicum
MASSAQDGNNPLFSPYKMGKFNLSHRVVLAPMTRCRALNNIPQAALGEYYEQRATAGGFLITEGTMISPTSAGFPHVPGIFTKEQVREWKKIVDVVHAKGAVIFCQLWHVGRASHEVYQPAGAAPISSTEKPISNRWRILMPDGTHGIYPKPRAIGTYEISQVVEDYRRSALNAIEAGFDGIEIHGAHGYLIDQFLKDGINDRTDEYGGSLANRCKFITQVVQAVVSAIGADRVGVRVSPAIDHLDAMDSNPLSLGLAVVERLNKIQLHSGSKLAYLHVTQPRYVAYGQTEAGRLGSEEEEARLMRTLRNAYQGTFICSGGYTRELGIEAVAQGDADLVSYGRLFISNPDLVMRIKLNAPLNKYNRKTFYTQDPVVGYTDYPFLQGNGSNGPLSRL

SEQ ID NO: 29972 - DNA, 1068 bp, Solanum lycopersicum
  CDS (1)..(1068)
atggaagcaaactctaactctgctgtgcccctctgtactccttacaaactggggagattcaaactcactcatagaatagtttttccagcacttacgaggaacagatcacaaaataatactccacagtcacatttaactgaatactattctcaaagagctactaatggagggcttatcatttctgaagcagctgctgcatctgatatttctaaggagtgccctaacttgcctggaatatggaatgaggagcaagtggaagcatggaaaccagtagtgaatggtgttcatgagaaaggaggcgtcttcttttgtcaaatttggcattcaggccgcttatctgtcccgactgttagtgcattatttttctcgatcggcattggctggtccacaagacctgatgataaagtgtatgcgaaaccaacacctcttcctctggagtctgataaaattccttgcattgtaaatgatttcaggattgcagcccgtaacgcgattaaagctggatttgatggaattgagatcaacgcttcaagtggcggctacctgattgatgaattcatgaatgatcaagtccatggttggactgatgaatatgatgaaagtattaaggaccgttgtcgtcttgccctggaaattgtagaagcagtggcaaatgaaattggagctgataaaattggtataaaattatctccttttgatggcaaaaaggactcaaattcagaagcactagcaacttacatggcaaatgaactaagcaagcttggcgttctctatcttcatgtgatggagcccagagaaacagttaatagaagtcttcttcccattaggaaggcttttaaggggacacttattgcttctggtggttatggtaaatctgatggagagaaagccatcgacgagaattatgcagatttgatctcatttggacgtatgttcttggctaatccagatttaccaaagcgttttgaggttaatgctccacttaacaagtataataggagcactttctacaccaatgatccaattattggctacactgattatccatttcttgaagttgcttcctaa

SEQ ID NO: 29973 - protein, 355 aa, Solanum lycopersicum
MEANSNSAVPLCTPYKLGRFKLTHRIVFPALTRNRSQNNTPQSHLTEYYSQRATNGGLIISEAAAASDISKECPNLPGIWNEEQVEAWKPVVNGVHEKGGVFFCQIWHSGRLSVPTVSALFFSIGIGWSTRPDDKVYAKPTPLPLESDKIPCIVNDFRIAARNAIKAGFDGIEINASSGGYLIDEFMNDQVHGWTDEYDESIKDRCRLALEIVEAVANEIGADKIGIKLSPFDGKKDSNSEALATYMANELSKLGVLYLHVMEPRETVNRSLLPIRKAFKGTLIASGGYGKSDGEKAIDENYADLISFGRMFLANPDLPKRFEVNAPLNKYNRSTFYTNDPIIGYTDYPFLEVAS

SEQ ID NO: 29974 - DNA, 1203 bp, Saccharomyces pastorianus
  CDS (1)..(1203)
atgtcatttgtaaaagattttaagccacaagctttaggtgacaccaacctattcaaaccaatcaagatcgggaacaatgaacttttgcaccgtgctgtcattcctccattgaccagaatgagagctcttcaccctggtaatatcccaaacagggactgggcagtcgaatactacacccaacgtgctcaaagacctggtaccatgattatcactgaaggtgccttcatatccccacaagccggcggttacgataacgctccaggtgtttggtcggaagaacaaatggtggaatggaccaaaatcttcaacgctattcatgaaaagaaatcgttcgtttgggttcagttatgggttttgggttgggctgctttcccagacaatcttgccagagatggtttgcgttacgattcagcttctgacaacgttttcatggatgccgagcaagaagctaaggccaagaaggccaacaacccacaacacagcctaaccaaggacgaaatcaagcaatacattaaggaatacgtccaggctgccaagaactctattgctgctggtgccgatggtgttgaaattcacagtgctaacggttacttgttaaaccagttcttggaccctcattccaatactagaaccgatgaatatggtggatctattgaaaacagagctcgtttcaccttggaagttgttgatgctcttgtcgaagccattggtcatgaaaaagttggtttgagattgtccccatacggtgttttcaacagtatgtctggtggtgccgagaccggcattgttgcccaatatgcttacgttgctggtgaattagaaaagagagctaaagccggaaaacgtttagcttttgttcatttggttgaacctcgtgtaactaacccattcttgactgaaggggagggtgaatacgaaggaggtagcaacgattttgtttactccatctggaagggcccagtcattagagctggtaattttgctctccacccagaagtcgttagagaagaagttaaggacaagagaaccttgatcggttacggtagattcttcatttctaacccggatttggttgatcgtttggaaaaaggtctacctctgaacaaatatgacagagatactttctaccagatgtctgctcatggttatattgactaccccacctatgaagaagctctcaaattaggctgggacaaaaagtaa

SEQ ID NO: 29975 - protein, 400 aa, Saccharomyces pastorianus
MSFVKDFKPQALGDTNLFKPIKIGNNELLHRAVIPPLTRMRALHPGNIPNRDWAVEYYTQRAQRPGTMIITEGAFISPQAGGYDNAPGVWSEEQMVEWTKIFNAIHEKKSFVWVQLWVLGWAAFPDNLARDGLRYDSASDNVFMDAEQEAKAKKANNPQHSLTKDEIKQYIKEYVQAAKNSIAAGADGVEIHSANGYLLNQFLDPHSNTRTDEYGGSIENRARFTLEVVDALVEAIGHEKVGLRLSPYGVFNSMSGGAETGIVAQYAYVAGELEKRAKAGKRLAFVHLVEPRVTNPFLTEGEGEYEGGSNDFVYSIWKGPVIRAGNFALHPEVVREEVKDKRTLIGYGRFFISNPDLVDRLEKGLPLNKYDRDTFYQMSAHGYIDYPTYEEALKLGWDKK

SEQ ID NO: 29976 - DNA, 1203 bp, Saccharomyces cerevisiae
  CDS (1)..(1203)
atgccatttgttaaggactttaagccacaagctttgggtgacaccaacttattcaaaccaatcaaaattggtaacaatgaacttctacaccgtgctgtcattcctccattgactagaatgagagcccaacatccaggtaatattccaaacagagactgggccgttgaatactacgctcaacgtgctcaaagaccaggaaccttgattatcactgaaggtacctttccctctccacaatctgggggttacgacaatgctccaggtatctggtccgaagaacaaattaaagaatggaccaagattttcaaggctattcatgagaataaatcgttcgcatgggtccaattatgggttctaggttgggctgctttcccagacacccttgctagggatggtttgcgttacgactccgcttctgacaacgtgtatatgaatgcagaacaagaagaaaaggctaagaaggctaacaacccacaacacagtataacaaaggatgaaattaagcaatacgtcaaagaatacgtccaagctgccaaaaactccattgctgctggtgccgatggtgttgaaatccacagcgctaacggttacttgttgaaccagttcttggacccacactccaataacagaaccgatgagtatggtggatccatcgaaaacagagcccgtttcaccttggaagtggttgatgcagttgtcgatgctattggccctgaaaaagtcggtttgagattgtctccatatggtgtcttcaacagtatgtctggtggtgctgaaaccggtattgttgctcaatatgcttatgtcttaggtgaactagaaagaagagctaaagctggcaagcgtttggctttcgtccatctagttgaacctcgtgtcaccaacccatttttaactgaaggtgaaggtgaatacaatggaggtagcaacaaatttgcttattctatctggaagggcccaattattagagctggtaactttgctctgcacccagaagttgtcagagaagaggtgaaggatcctagaacattgatcggttacggtagattttttatctctaatccagatttggttgatcgtttggaaaaagggttaccattaaacaaatatgacagagacactttctacaaaatgtcagctgagggatacattgactaccctacgtacgaagaagctctaaaactcggttgggacaaaaattaa

SEQ ID NO: 29977 - protein, 400 aa, Saccharomyces cerevisiae
MPFVKDFKPQALGDTNLFKPIKIGNNELLHRAVIPPLTRMRAQHPGNIPNRDWAVEYYAQRAQRPGTLIITEGTFPSPQSGGYDNAPGIWSEEQIKEWTKIFKAIHENKSFAWVQLWVLGWAAFPDTLARDGLRYDSASDNVYMNAEQEEKAKKANNPQHSITKDEIKQYVKEYVQAAKNSIAAGADGVEIHSANGYLLNQFLDPHSNNRTDEYGGSIENRARFTLEVVDAVVDAIGPEKVGLRLSPYGVFNSMSGGAETGIVAQYAYVLGELERRAKAGKRLAFVHLVEPRVTNPFLTEGEGEYNGGSNKFAYSIWKGPIIRAGNFALHPEVVREEVKDPRTLIGYGRFFISNPDLVDRLEKGLPLNKYDRDTFYKMSAEGYIDYPTYEEALKLGWDKN

SEQ ID NO: 29978 - DNA, 1203 bp, Saccharomyces cerevisiae
  CDS (1)..(1203)
atgccatttgtaaaaggttttgagccgatctccctaagagacacaaacctttttgaaccaattaagattggtaacactcagcttgcacatcgtgcggttatgcccccattgaccagaatgagggccactcaccccggaaatattccaaataaggagtgggctgctgtgtattatggtcagcgtgctcaaagacctggtaccatgatcatcacggaaggtacgtttatttcccctcaagccggcggctatgacaacgcccctgggatttggtctgatgagcaggtcgctgagtggaagaatatctttttagccatccatgattgtcagtcgttcgcgtgggtacaactttggtctttaggctgggcatccttcccagacgtattggcaagagacgggttacgctatgactgtgcatctgacagagtgtatatgaatgctacgttacaagaaaaggccaaagatgcgaataatctcgaacatagtttgactaaagacgacattaaacagtatatcaaggattacatccatgcggctaagaattctatcgcggctggcgccgatggtgtagaaattcatagcgccaatgggtacttgttgaatcagttcttggatccacattctaataagaggaccgacgaatacggcggaacgatcgaaaacagggcccgctttacactggaggttgtcgatgctcttatcgaaactatcggtcctgaacgggtgggtttgaggttgtcgccgtacggcacttttaacagtatgtctgggggtgctgaaccaggtattatcgctcaatattcgtatgttttgggtgaattagagaagagggcaaaggctggtaagcgtttggcctttgtgcacctcgttgaaccacgtgtcacggacccatcgttggtggagggcgaaggagaatattccgagggtactaacgattttgcctactctatatggaagggtccaatcatcagagctggtaattacgctcttcatccagaagtggttagagaacaagtaaaggatcccagaaccttgataggctatggtagattcttcatctctaacccagatttagtctaccgtttagaagagggcctgccattgaacaagtatgacagaagtaccttctacaccatgtccgcggaaggttataccgactacccaacatatgaagaggcagtagatttaggttggaacaagaactga

SEQ ID NO: 29979 - protein, 400 aa, Saccharomyces cerevisiae
MPFVKGFEPISLRDTNLFEPIKIGNTQLAHRAVMPPLTRMRATHPGNIPNKEWAAVYYGQRAQRPGTMIITEGTFISPQAGGYDNAPGIWSDEQVAEWKNIFLAIHDCQSFAWVQLWSLGWASFPDVLARDGLRYDCASDRVYMNATLQEKAKDANNLEHSLTKDDIKQYIKDYIHAAKNSIAAGADGVEIHSANGYLLNQFLDPHSNKRTDEYGGTIENRARFTLEVVDALIETIGPERVGLRLSPYGTFNSMSGGAEPGIIAQYSYVLGELEKRAKAGKRLAFVHLVEPRVTDPSLVEGEGEYSEGTNDFAYSIWKGPIIRAGNYALHPEVVREQVKDPRTLIGYGRFFISNPDLVYRLEEGLPLNKYDRSTFYTMSAEGYTDYPTYEEAVDLGWNKN

SEQ ID NO: 29980 - DNA, 1149 bp, Schizosaccharomyces pombe
  CDS (1)..(1149)
atgaatgaccgaggtgaattgtttaaacccatcaaagtgggaaacatgcttttgcaacatcggattgtgcatgctcctatgacgagattgagagctactgactatggaaagatcaccggcctaatggtagaatactattcccaaagatctatgataccaggaacattgcttattgctgatgccacatttgtcggtgaaaaatccgggggatttcctaataaccctcggtgctttaccaaagagcaagcagaatcttggataccacttgttgaggctgttcataaaaataaatcctttttgtttattcaattttggcccctcccaggtgaccttaaagatgaatacagaaatgatttggaaaaaatgcaaaaaataacatattcggattgtccacaagaccctggtggcttaccagcggggatccactcatttgatgctgttcaaggcgtggaggtatataagaaaaagtatatgtctaaaagagatatccaagagcacatacaggactttgttaatgctgcggatctggccgttaacatcgctaaagcagacggcgtagaaattcaccaggtgaatgggtttcttcttgacagatttgtgttaggtggttttggtgatcaatgtgatcctgaatatcgtggttcaattgaaaaccgatgtcgatttcctttagaggttttagaagcagtaacaagaaagattggacaggagcgggttggctatcgtatatctccattttccggttggatgcaaaaaattgatttcatggaagtcaatatttatcttatgagtgagatcgctaaaaggtttcctaaactagcatatattcatgccatcgagccccgaaaatattggtcgggtcataagttagtctcttcagaacaaaacaccagctttttgcaaaagtattggaagggaccgtttataacggcgggaggatacgatccagaaacagctgtgcaagctgccaatgaacgtggcgtacttgtcgcgttcggacgaaatttcattgcgaatcccgatttagtttttcgaattaagcatcatattcctcttaacaagtgggatcggtctagcttttatttgccaaaaacagagaaaggatatacagattatccttttagcaaagagttccttcaatcaaagtga

SEQ ID NO: 29981 - protein, 382 aa, Schizosaccharomyces pombe
MNDRGELFKPIKVGNMLLQHRIVHAPMTRLRATDYGKITGLMVEYYSQRSMIPGTLLIADATFVGEKSGGFPNNPRCFTKEQAESWIPLVEAVHKNKSFLFIQFWPLPGDLKDEYRNDLEKMQKITYSDCPQDPGGLPAGIHSFDAVQGVEVYKKKYMSKRDIQEHIQDFVNAADLAVNIAKADGVEIHQVNGFLLDRFVLGGFGDQCDPEYRGSIENRCRFPLEVLEAVTRKIGQERVGYRISPFSGWMQKIDFMEVNIYLMSEIAKRFPKLAYIHAIEPRKYWSGHKLVSSEQNTSFLQKYWKGPFITAGGYDPETAVQAANERGVLVAFGRNFIANPDLVFRIKHHIPLNKWDRSSFYLPKTEKGYTDYPFSKEFLQSK

SEQ ID NO: 29982 - DNA, 1179 bp, Schizosaccharomyces pombe
  CDS (1)..(1179)
atggctgttcaaaagttatatgaatcgcagagtaaattgtttcagcccattaaggttggtaacatgcaacttcaacatcgaatggttcacgcaccggctacccgtctacgatgcttagataatggccttgtaatgacagatcttgtgaaggaatactacaagcaacgcagttcgattcctggcacattactcattacagaatcattattttcaggcgcaaagtcgggaggctttagtaatatcccttgcttgtacaacgatgaacatgtagaagcttggaaaccaattgtacaggcgatccatgacaatgattgctttgtgtttatacagttttggaaccttcctggagagctaaaggtcgattatcttgaagatcaggaaaggttggaaaaagttacacaaggggaatgcccaatggatcctaccggattgcctgctgctctaggcagtgcctactctatttgtggagaggagctgtatgtcgataaatttatgacaaaacaagatatacaggaacacatcacaacgtatactgaagcagcgaaacgagctgttttcggttgtggtgcagatggtgttgaagttcatcaagtgaatggatttcttttggacaaatttgtactaaacggctatggtgacaaatgtgatccggaatattgtgggtctttagaaaatcgtgctagattttgccttgaacttctagagtctgtcgtgaatgccataggtcaagagcgcgttggatataggatttctccgttttcagatatttggaaagacaaggattcttttgaggcacacgtgtttatgataaaaaaaataaaggagaggtttcctaatttggcctatttacatgctatcgaacctaggcaatactggaatgggcatgtgcatataacgcaagaaaagaatacattgatctacaaaaacctttggggggatccatttatcactgcaggtggacatgaccgagactcggccatacaaatggctgaacaagaaaacactttagtagcgttcgggaggtattttctatcaaatccagatctcccattccgactcaagtataaccttcccttaaacaaatgggaccgcgcaactttttatacaaagatgagtcctaagggttatatagactacccattttcgaaagaatttttggataccaagaaggttgagtga

SEQ ID NO: 29983 - protein, 392 aa, Schizosaccharomyces pombe
MAVQKLYESQSKLFQPIKVGNMQLQHRMVHAPATRLRCLDNGLVMTDLVKEYYKQRSSIPGTLLITESLFSGAKSGGFSNIPCLYNDEHVEAWKPIVQAIHDNDCFVFIQFWNLPGELKVDYLEDQERLEKVTQGECPMDPTGLPAALGSAYSICGEELYVDKFMTKQDIQEHITTYTEAAKRAVFGCGADGVEVHQVNGFLLDKFVLNGYGDKCDPEYCGSLENRARFCLELLESVVNAIGQERVGYRISPFSDIWKDKDSFEAHVFMIKKIKERFPNLAYLHAIEPRQYWNGHVHITQEKNTLIYKNLWGDPFITAGGHDRDSAIQMAEQENTLVAFGRYFLSNPDLPFRLKYNLPLNKWDRATFYTKMSPKGYIDYPFSKEFLDTKKVE

SEQ ID NO: 29984 - DNA, 1221 bp, Oryza sativa
  CDS (1)..(1221)
atgattcgcaaaaaagcctccccacactgcctacatgacgtcagcggttcttgccctcacctctcgattcttctccactcgagcagaagaccggaatcagctcccgtaccctgtttgttacccatggaagcgaaaattcccctccttactcctcacaccatggggagattccacctcgcccacagggttgtccatgcgccgctgaccagatcgaggtgctacaataatcttcctcaagaacatgttcagctgtactactcgcagagggccacaaatggcggccttctgatcgctgaagccaccggggtctcggagactgctcaagggtatccaaacacaccgggtatatggacaaaggagcaggtggaagcttggaggacggttgtggatgcagtgcatcagaagggtggtgttttcttctgccaaatctggcatgtagggagggcatctaccaatgattatcagcccaatggacaaacaccaattccttgtacagacaagaaaatcactcctacagttctcaaagatggaactgtcgaggaattctctgccccaaggaggctaagagaagatgagatcccccaaattgttgatgatttccgaattgctgctaggaattgcattgaagcaggctttgacggagttgaaatccactgcgcatttgggtacctaattgaacagttcatgaaagatggtgtcaacgacagaactgacaagtacggaggaagcatcgcaaaccgttgccgctttgctctagaggtaatccaagcagccatcgatgagatcggatcggacagagtaggtgtccgtctctcgccatactcaaactgcctggactgttgggactcagacccagatgcacttggcctctacatgatccaagccatgagcaagctgggcgttctctactgcagcatggttgagcctgaggtggtcaaagtagacggcaaggtgcagattccttacaagctatggcacttcaggaaagtgtttgctggcactttcatcgtcgctggaggatacaacagagaagaaggcaatagagcagtgtctcagggttacacagacctggtagcatatggtaaatggttcttggcaaacccggatctgcctaggcggtttgagctgaatgcgcctctgaacaagtatgacagatcgacgttctacacttctgatccagttatcgggtacaccgattacccttttctcagtcctctgtga

SEQ ID NO: 29985 - protein, 406 aa, Oryza sativa
MIRKKASPHCLHDVSGSCPHLSILLHSSRRPESAPVPCLLPMEAKIPLLTPHTMGRFHLAHRVVHAPLTRSRCYNNLPQEHVQLYYSQRATNGGLLIAEATGVSETAQGYPNTPGIWTKEQVEAWRTVVDAVHQKGGVFFCQIWHVGRASTNDYQPNGQTPIPCTDKKITPTVLKDGTVEEFSAPRRLREDEIPQIVDDFRIAARNCIEAGFDGVEIHCAFGYLIEQFMKDGVNDRTDKYGGSIANRCRFALEVIQAAIDEIGSDRVGVRLSPYSNCLDCWDSDPDALGLYMIQAMSKLGVLYCSMVEPEVVKVDGKVQIPYKLWHFRKVFAGTFIVAGGYNREEGNRAVSQGYTDLVAYGKWFLANPDLPRRFELNAPLNKYDRSTFYTSDPVIGYTDYPFLSPL

SEQ ID NO: 29986 - DNA, 1176 bp, Oryza sativa
  CDS (1)..(1176)
atggtgcagcatcatcaagcggcggcgaacgacgatcatcaggctatcccgctgctgacaccgtacaagcaggctgggcgcccggggtcgaagcttgacctctcccaccgtgtgctgctcgcgccgatgacgcggtgccgatcctacggcaacgtgccgcagccgcacgcggcgctgtactacacgcagcgcgccacccgcggcggcctcctcatcacggaggccaccggcgtctccgccaccgcgcagggctacccggagacacccggcgtccggacgcgggagcacgtcgaggcgtggaagcccatcgtcgacgccgtccaccgcaagggcgccctcttcatctgccagctctggcacgtcggaagagtctccaacaacggtttccagcctgacggattggctcccatctcaagcaccgacaaggcgatcacaccggacggctatgggatggtgtactccaagccgcgacggcttcggacagacgagatcccgcaaatcgtcgacgatttcaggctcgctgccaggaacgcagtcgaggccgggttcgacggtgttgagatccacggcgcgaacggctacctcctcgagcaattcatgaaggacagctccaacgaccgcaccgacgagtacggcggcagcctcgagaaccggtgccgcttcgccgtcgaggtgatcgacgccgtcgtcggcgagatcggcgcccacagcgtcggcatcaggctgtcgccgttcctggactacatggactgcgtcgactccgacccggaggcactcggctcgtacatggtggagcagctgaacaagcacgaggatttcctctactgccacatggtggagcctcgcatggccatcgtcgacggccgccggcaaattcagcacggcctcttgcccttcaggaagcagttcaatggcacgttcatcgccgccggagggtacgaccgggaagaagggaacaaggcggttgccgatggctatgccgacctcgtcgcctatgggaggctcttcttggcgaatcctgatctgcccaagaggttcgagctcgatgcgcccatgaataactacgatcgcaacaccttctacacgcaggatcctgtggttgggtacaccgactatcctttccttgacgagcatcaccatgacgacgacgatgactctaatgctccttctgcttaa

SEQ ID NO: 29987 - protein, 391 aa, Oryza sativa
MVQHHQAAANDDHQAIPLLTPYKQAGRPGSKLDLSHRVLLAPMTRCRSYGNVPQPHAALYYTQRATRGGLLITEATGVSATAQGYPETPGVRTREHVEAWKPIVDAVHRKGALFICQLWHVGRVSNNGFQPDGLAPISSTDKAITPDGYGMVYSKPRRLRTDEIPQIVDDFRLAARNAVEAGFDGVEIHGANGYLLEQFMKDSSNDRTDEYGGSLENRCRFAVEVIDAVVGEIGAHSVGIRLSPFLDYMDCVDSDPEALGSYMVEQLNKHEDFLYCHMVEPRMAIVDGRRQIQHGLLPFRKQFNGTFIAAGGYDREEGNKAVADGYADLVAYGRLFLANPDLPKRFELDAPMNNYDRNTFYTQDPVVGYTDYPFLDEHHHDDDDDSNAPSA

SEQ ID NO: 29988 - DNA, 1125 bp, Oryza sativa
  CDS (1)..(1125)
atggtcaaccaagccgcgatgccgctgctgacaccgtacaagcaggctggcggcaagatcgatctctcccaccgtgtgctgctctcgccgatgacgcggtgccgatcctacggcaacgtgccgcagccgcacgcggcgctgtactacacgcagcgcgccaccagcggcggcctcctcatcacggaggccaccggcgtctccgacaccgcgcagggctacccggagacacccggcgtctggacgcgggagcacgtcgaggcgtggaagcccatcgtcgacgccgtccaccgcaagggcgccctcttcatctgccagctctggcacgtcgggagagtctccaccaacgactaccagccaaatgggcaggcaccgatctcaagctccgacatacagatcacaccggacggttcagggatcgtgtactccaagcctcgccggctgcgggtcgacgagatccctcagatcgtcgacgacttcaggctcgccgcgcggaacgccatcgaggccgggttcgacggcgtggagatccacggcgccaacggctacctcctcgagcagttcatgaaggacagctccaacgaccgcaccgacgagtacggcggcagcctcgagaaccggtgccgcttcgccgtcgaggtgatcgacgccgtcgtcggcgagatcggcgcccaccgcgtcggcatcaggctgtcgccgttcctggacttcatggactgcgtcgactccgacccggaggctctcggctcgtacatggtggagcagctcaacaagcacgagggtttcctctactgccacatggtggagcctcgcatggccatcgtcgacggccgccggcagattcagcacggcctgctgccattcaggaaagctttcaagggcacgttcatcgccgccggtgggtatgaccgggaggaaggcaacaaggtgatcgaaaatggctacactgatcttgtctcctttggaaggcttttcttggcgaaccctgacttgcctaagaggttcgagcttgatgcgccattgaacaagtatgatcgcaacaccttctacactcaagacccaattgttggatacacggactaccctttcctcgatgaggatcagaacaactcggttgctgatgcttag

SEQ ID NO: 29989 - protein, 374 aa, Oryza sativa
MVNQAAMPLLTPYKQAGGKIDLSHRVLLSPMTRCRSYGNVPQPHAALYYTQRATSGGLLITEATGVSDTAQGYPETPGVWTREHVEAWKPIVDAVHRKGALFICQLWHVGRVSTNDYQPNGQAPISSSDIQITPDGSGIVYSKPRRLRVDEIPQIVDDFRLAARNAIEAGFDGVEIHGANGYLLEQFMKDSSNDRTDEYGGSLENRCRFAVEVIDAVVGEIGAHRVGIRLSPFLDFMDCVDSDPEALGSYMVEQLNKHEGFLYCHMVEPRMAIVDGRRQIQHGLLPFRKAFKGTFIAAGGYDREEGNKVIENGYTDLVSFGRLFLANPDLPKRFELDAPLNKYDRNTFYTQDPIVGYTDYPFLDEDQNNSVADA

SEQ ID NO: 29990 - DNA, 1143 bp, Oryza sativa
  CDS (1)..(1143)
atggcgcgcgaggcggagaaggacgcggcggcggcggcggagatcccgctgctgacgccgtacaagatggggcggttcgagctctcccaccgtgtggtgctcgcgccgctcacgcggaaccgctcctacggcaacgtgccgcggccgcacgcggtgctgtactacacgcagcgcgccaccagcggcggcctcctcgtcacggaggccaccggcgtctccgacaccgcgcagggctacccggacacccccggcatctggacgcagcagcaggtcgaggcgtggaagcccatcgtcgacgccgtccaccgcaagggcgccctcttcatctgccagctctggcacgtcggcagggtctccaccaacgaataccaacctgacgggcaggcgcccatctcaagcacagacaggcagatcacaccggacgattcaggcatcgtctactcgaaaccccgacggctgaggacggaggagatccctcagatcatcgacgacttcaggcgagccgcgcggaacgccatcgaggccgggttcgacggcgtggagatccacggcgcgcacggctacctcctggagcagttcatgaaggacagcgccaacgaccgcagcgacgagtacggtggcagcctcgagaaccggtgccgcttcgttgtcgaggtgatcgacgccatcgtcgccgaggttggagcgcaccgtgtggggatcaggctgtcaccgttcatcgactatatggactgcgtcgactccgacccggtggctctcggctcgtacatggtgcagcagctcaacaagcacccggggtttctctactgccacatggtggagccaagaatggccatcgtggaaggacgcaggaagatcacccatggcctcctgccattccggaagctgttcaatggcactttcatcgctgccggaggatacgatcgggaggaaggaaacaaggtgatagccgatggatatgctgacctcgtcgcctacgggaggcacttcttggccaatccggacttgcccaagaggttcgcgatcaacgcaccattgaacaagtataataggtccaccttttacatacaggatcctgttgttggctacacggactatcctttccttgatgagaaagacgagggcgctgctacttatgcttaa

SEQ ID NO: 29991 - protein, 380 aa, Oryza sativa
MAREAEKDAAAAAEIPLLTPYKMGRFELSHRVVLAPLTRNRSYGNVPRPHAVLYYTQRATSGGLLVTEATGVSDTAQGYPDTPGIWTQQQVEAWKPIVDAVHRKGALFICQLWHVGRVSTNEYQPDGQAPISSTDRQITPDDSGIVYSKPRRLRTEEIPQIIDDFRRAARNAIEAGFDGVEIHGAHGYLLEQFMKDSANDRSDEYGGSLENRCRFVVEVIDAIVAEVGAHRVGIRLSPFIDYMDCVDSDPVALGSYMVQQLNKHPGFLYCHMVEPRMAIVEGRRKITHGLLPFRKLFNGTFIAAGGYDREEGNKVIADGYADLVAYGRHFLANPDLPKRFAINAPLNKYNRSTFYIQDPVVGYTDYPFLDEKDEGAATYA

SEQ ID NO: 29992 - DNA, 1137 bp, Oryza sativa
  CDS (1)..(1137)
atggtgcacgcacctgcgaaagaggcgatcccgctgctgacgccgtacaagatggggcagctggagctgtcccaccgggtggtgctcgcgccgctgacgcggtgccgctcctacggccacgtgccgcagccgcacgccgcggtgtactactcgcagcgcgccaccaacggcggactcctcatcgcggaggccactgtcatctcccccaccgcgcagggctacccggacacccccggcatctacacgcagcagcagatcgaagcgtggaaacccatcgtcgacgccgtccaccgcaagggcgccctcttcttcctacagatatggcacgtcggcagggtctccaccacagatttccagccaaatggacaggcgccgatctcgagcaccgataagcagatcacaccggacgattcaggcatggtgtactccaagccccggcggctccggacagacgagatccctcagatcgtcgacgacttcaggcgagccgcgcggaacgccatcgagtcggggttcgacggcgtggagatccatggcgcgcacggctacctcctcgaccagttcatgaaggacagcgccaacgaccgcaccgacgagtacggtggcaacctcgagaaccggtgccgcttcgccgtcgaggtgatcgatgccgtcgtcgccgaggtgggagcgcaccgtgttggaatcagattatcgccattcgacaactacatggactgcttcgactccaacccggtagctctcggctcatacatggtgcagcaactcaacaagcacccaggctttctctactgccacatggtggagccaggaatggccatcgtcgaaggacggaggaagatcacccatggtctcctgccattcaggaagcagttcaatggcactttcatcgctgctggcgggtatgaccgggaggaagggaacaaggtggtggctgatggctatgccgatctcgtcgcctacgggaggctcttcttggctaaccctgacttgccgaggaggtttgagcttgacgcaccattgaacaggtataacatctcaataccaatgcctagtgctgagctcttgtccaaggtggcacaagtttacaatgtcatcgaagatgagcacattgtccaaggtggcacgagtttgtga

SEQ ID NO: 29993 - protein, 378 aa, Oryza sativa
MVHAPAKEAIPLLTPYKMGQLELSHRVVLAPLTRCRSYGHVPQPHAAVYYSQRATNGGLLIAEATVISPTAQGYPDTPGIYTQQQIEAWKPIVDAVHRKGALFFLQIWHVGRVSTTDFQPNGQAPISSTDKQITPDDSGMVYSKPRRLRTDEIPQIVDDFRRAARNAIESGFDGVEIHGAHGYLLDQFMKDSANDRTDEYGGNLENRCRFAVEVIDAVVAEVGAHRVGIRLSPFDNYMDCFDSNPVALGSYMVQQLNKHPGFLYCHMVEPGMAIVEGRRKITHGLLPFRKQFNGTFIAAGGYDREEGNKVVADGYADLVAYGRLFLANPDLPRRFELDAPLNRYNISIPMPSAELLSKVAQVYNVIEDEHIVQGGTSL

SEQ ID NO: 29994 - DNA, 1143 bp, Oryza sativa
  CDS (1)..(1143)
atggtgcacgcaccggcgaaagtggcagctgcggcggcgatcccgctgctgacgccgtacaagatggggcagctggagctctcccaccgtgtggtgctcgcgccgctcacgcggtgccgctcctacggcaacgtgccgcagccgcacgcggcggtgtactactcgcagcgggcgaccaggggcggcctcctcatcgcggaggccaccgacatctcccccaccgcgcagggctacccggagacccccggcatctacacgcagcagcagatcgaggcgtggaagcccatcgtcgacgccgtccaccgcaagggcgccctcttcttcctgcagatatggcacgtcggcagggtctccaccacagatttccagccgaatggacaggcgccgatctcaagcaccgacaagcagatcacaccggacgattcaggcatggtgtactccaagccccggcggctccggacggatgagatccctcagatcatcgacgacttcaggcgagccgcgcggaacgccatcgaggcggggttcgacggcgtggagattcatggcgcgcacggctacctcctggagcagttcatgaaggacagcgccaacgaccgcaccgacgagtacggtggcagcctcgagaaccggtgccgcttcgccgtcgaggtgatcgacgccgtcgtcgccgaggtgggagctcaccgtgtcggaatcagattatcgccgttcgtcgacttcatggactgcttcgactccgacccggtggctctcggctcatacatggtgcagcaactcaacaagcacccagggtttctctactgccacatggtggagccaagaatggccataatcgaaggacgaaggaagatcgcccatggcctcctaccattcaggaagcagttcaatggcactttcatcgctgctggcgggtatgaccgggaggaagggaacaaggtggtggctgatggctatgccgatctcgtcgcctatgggaggctcttcttggctaaccctgacttgccgaggaggtttgagcttgacgcaccattgaacaggtatgacaggtctaccttttatacacaggatcccgttgttggctatacagattacccttttcttgaggagattgatgaggagtcaagaactacttatgcttaa

SEQ ID NO: 29995 - protein, 380 aa, Oryza sativa
MVHAPAKVAAAAAIPLLTPYKMGQLELSHRVVLAPLTRCRSYGNVPQPHAAVYYSQRATRGGLLIAEATDISPTAQGYPETPGIYTQQQIEAWKPIVDAVHRKGALFFLQIWHVGRVSTTDFQPNGQAPISSTDKQITPDDSGMVYSKPRRLRTDEIPQIIDDFRRAARNAIEAGFDGVEIHGAHGYLLEQFMKDSANDRTDEYGGSLENRCRFAVEVIDAVVAEVGAHRVGIRLSPFVDFMDCFDSDPVALGSYMVQQLNKHPGFLYCHMVEPRMAIIEGRRKIAHGLLPFRKQFNGTFIAAGGYDREEGNKVVADGYADLVAYGRLFLANPDLPRRFELDAPLNRYDRSTFYTQDPVVGYTDYPFLEEIDEESRTTYA

SEQ ID NO: 29996 - DNA, 1185 bp, Oryza sativa
  CDS (1)..(1185)
atggatcggccgccgccggatcagcagcggcagaagcaggcgccgctcttctcgccgtaccagatgccccgcttccgcctcaaccaccgggtggtgctggcgccgatgacgcggtgcagggcgatcggcggggtgcccggcccggcgctggcggagtactacgcgcagcggaccacccagggtggcctgctcatctccgagggcaccgtcgtctcgcccgctggcccggggtttcctcatgtccctgggatatacaatcaagagcagactgatgcatggaagaaggtggtggatgctgttcatgccaagggaggcatctttttctgccagttatggcatgtaggcagagcttctcaccaagtataccagccaaacggtgctgcaccaatatcctcaactgataagccaatatcagcaagatggagaatactgatgcctgatggctcctatggcaagtatcctaaacctaggcgcctggcagcatcggaaatacctgaaattgtcgaacaatatcgtcaagccgccattaatgccattgaagcaggttttgatggcattgagatccatggtgctcatggctatatcattgatcaattcctaaaggatggaatcaatgaccgcactgacgagtatggtggctcactttccaaccgctgccggttcctacttgaggtaactagggctgtggtttctgccattggagcagaccgagtcgcggtgaggatatcaccagccattgatcaccttgacgcctatgattcagaccccattaagctcggcatggccgttgttgagcggctgaatgctctccagcagcagtcagggcggctcgcctacctccacgtcacgcagccacggtacaccgcctacgggcagaccgagtctgggcagcatggcagtgccgaggaggagagccgcctgatgcgcaccctccggggcacgtaccagggcacattcatgtgcagtggcggctacacgcgggagcttgggttggaagcagtggagagcggcgatgccgacctggtgtcgtacgggcggctcttcatatcaaacccggacctggtcgagcggttcaggctgaacgccgggctgaacaagtacgtgcgtaagacattctacacgcccgatcctgtcgtgggttacacggactatccgttcctcggacagcctaagtcgcggatgtaa

SEQ ID NO: 29997 - protein, 394 aa, Oryza sativa
MDRPPPDQQRQKQAPLFSPYQMPRFRLNHRVVLAPMTRCRAIGGVPGPALAEYYAQRTTQGGLLISEGTVVSPAGPGFPHVPGIYNQEQTDAWKKVVDAVHAKGGIFFCQLWHVGRASHQVYQPNGAAPISSTDKPISARWRILMPDGSYGKYPKPRRLAASEIPEIVEQYRQAAINAIEAGFDGIEIHGAHGYIIDQFLKDGINDRTDEYGGSLSNRCRFLLEVTRAVVSAIGADRVAVRISPAIDHLDAYDSDPIKLGMAVVERLNALQQQSGRLAYLHVTQPRYTAYGQTESGQHGSAEEESRLMRTLRGTYQGTFMCSGGYTRELGLEAVESGDADLVSYGRLFISNPDLVERFRLNAGLNKYVRKTFYTPDPVVGYTDYPFLGQPKSRM

SEQ ID NO: 29998 - DNA, 1170 bp, Brassica napus
  CDS (1)..(1170)
atggcggcgcagggaaactccacggacacacttttctctccttacaagatgggaagattcgatctctctcacagagtggttctggcgccgatgacacgttgcagggcgttgaacggcgttccgaatgcggcgttggcggagtattacgctcaacgcaccactcccggcggttttctcatctccgaaggcaccatgatctctcccggatccgcagggtttccacatgtaccaggaatctattcagaggaacaagtagaggcatggaaacccgttgtggaagcagttcactccaaaggaggtctcatcttctgtcaactatggcatgttggacgagcttctcatccgttgtaccaacctaatggtggatcgccaatatcgtcaacggacaaagccatctcagaaagatggcgagttctgttgcctgatggatcacacgcgaaataccctaaacctcgacctctacacgcttccgagatacctcgagtggtggaagattattgcaactcggctattaatgcaatccgagctggttttgatgggattgagatccatggagcgcatggttacctcattgatcagtttatgaaaaatgggatcaatgaccgtaccgaccaatatggaggctccattcaaaaccgttgcagattcttacttcaggtagtgaaaggtgtggtttcagccataggagctagtaaagttggcgtcaggatatctccagcaatagaccatctcgatgcaactgattctgacccactctccctcgggctagccgtggttgacttgctcaacaagttacaggacgatactggctccaagctcgcttaccttcacgtaacacagcctcggtaccacgcttatgggcaaacagaatctggaaggcaaggcagtgatgaggaagaagctaagttaatgaagagcttgcgtacggcttacaatgggacatttatgtctagtggaggtttcaacaaggaacttggtatgcaagccattcagcaaggggatgctgatttggtctcctttggcaggctgtttattgcaaaccctgacttggtttcgcggtttaaggttggtgcgaagttgaataaatataatcggaagacgttttacactcaagaccccgttgttggctacacagattattccttcttggctccagcttctcgcctctga

SEQ ID NO: 29999 - protein, 389 aa, Brassica napus
MAAQGNSTDTLFSPYKMGRFDLSHRVVLAPMTRCRALNGVPNAALAEYYAQRTTPGGFLISEGTMISPGSAGFPHVPGIYSEEQVEAWKPVVEAVHSKGGLIFCQLWHVGRASHPLYQPNGGSPISSTDKAISERWRVLLPDGSHAKYPKPRPLHASEIPRVVEDYCNSAINAIRAGFDGIEIHGAHGYLIDQFMKNGINDRTDQYGGSIQNRCRFLLQVVKGVVSAIGASKVGVRISPAIDHLDATDSDPLSLGLAVVDLLNKLQDDTGSKLAYLHVTQPRYHAYGQTESGRQGSDEEEAKLMKSLRTAYNGTFMSSGGFNKELGMQAIQQGDADLVSFGRLFIANPDLVSRFKVGAKLNKYNRKTFYTQDPVVGYTDYSFLAPASRL

SEQ ID NO: 30000 - DNA, 1125 bp, Brassica napus
  CDS (1)..(1125)
atggaaatggaaaatgcagtagcgaaacagagtatccctcttctcactccctacaagatgggaagattcaatctctcccacagggttgttctggcaccattgacgagacagaggtcatacggaaacgttcctcagcctcacgctgtcttgtactactcccagagaacaagcccaggagggtttctcatcactgaagctacaggagtttcagacacagctcaaggctaccaagatactcctgggatatggacgaaagagcatgtggaggcatggaaaccaattgtggatgctgttcatgccaaaggtggtgtcttcttctgtcaaatctggcatgttggtcgtgtttctaatcgaggttttcaaccaaatgggcaagctcccatctcttgttccgacaagccattgatgcctcaaatccgctctaacggcattgacgaagctctgtttaccccaccaagacggctaagtactgaagaaatccctggcattgtcaacgactttaggctcgcagcaagaaacgctatggaagctggctttgatggagttgagattcatggagctaatggctatctgatagaccagttcatgaaagacacggtgaatgacagaacagatgagtacggtggatcattacaaaaccgttgcaagttcgcactagacatagttgaagcagtggctaatgagatcggaccagaccgtgttggcattagactctctccctttgctgactacatggagtctgcagacacaaacccacaagcgttagcccttcacatggctcaatctctgaacaaatacgggatcctctactgtcatgtgatagaggcaagaatgaaaacaatgggagagataacagagtgtcctcacttgcttgtgcctatgaggaaagcttttcaggggactttcatctcagcgggtggtttcacgaggacagatgggaatgaggcagtggaagagggacggaccgatcttgtggcttatggtcggtggtttctcgcgaacccggatttgcctaagaggtttgaagtggatgcaccgttgaataaatatgataggccaacgttttacacttctgatcctgttgtgggttacacggattacccttttcttgaatcaaaagcttaa

SEQ ID NO: 30001 - protein, 374 aa, Brassica napus
MEMENAVAKQSIPLLTPYKMGRFNLSHRVVLAPLTRQRSYGNVPQPHAVLYYSQRTSPGGFLITEATGVSDTAQGYQDTPGIWTKEHVEAWKPIVDAVHAKGGVFFCQIWHVGRVSNRGFQPNGQAPISCSDKPLMPQIRSNGIDEALFTPPRRLSTEEIPGIVNDFRLAARNAMEAGFDGVEIHGANGYLIDQFMKDTVNDRTDEYGGSLQNRCKFALDIVEAVANEIGPDRVGIRLSPFADYMESADTNPQALALHMAQSLNKYGILYCHVIEARMKTMGEITECPHLLVPMRKAFQGTFISAGGFTRTDGNEAVEEGRTDLVAYGRWFLANPDLPKRFEVDAPLNKYDRPTFYTSDPVVGYTDYPFLESKA

SEQ ID NO: 30002 - DNA, 1098 bp, Glycine max
  CDS (1)..(1098)
atggcaactgaagccgatgctcctgtcattcctcttctcactccctacaaaatgggtaacttcaatctgtcccatagagttgttttggccccgttgaccagaatgagatcttacaataacgttcctcagcctcatgctgtattgtattactctcagagaacttctccaggaggtcttttgataagtgaagccactggtgtctctgacactgctcaagggttggtgcacacacccggcatatggacaaaagagcaagttgaagcatggaaacccattgtgaatgcagttcatgccaaaggtggtgtattcttttgtcagatttggcatgttggaagggtctcaagtccagtttttcagccaaatgggcaagcaccaatatcttctactgacaagccactcaaacaaaatggcattgaggaagcacaagtcacaccaccaaggaggctaaggacagatgagattcctcatattgtcaatgacttcagagttgctgcaaggaatgctataaaagcaggttttgatggggttgagatccacggtgctcatggctacttacttgagcaattcattaaagacaaagtgaatgatcgaagtgatggatatggtggatcccttgagaaccgttgccgattcgctctggaagtggttgaggctgttgtgaaggagataggggcagaaagagttggagttagactatcccctttcacagagcatgcagagtgtggagattcagaccccaaagcattggggctatacttggctaatgccctcagcaagtataacattctctattgtcacatggtggagccaagaatgaagaatgctcttgaagtagttgagtgccctcacagccttatgccaatgagaaaggccttcaatggcacttttatttctgcaggaggttatgacagaaaagatggcatcgatgctgtggctaaaaataggacagatcttgttgcttatggtcgcttgttcttggctaatccagacttgccaaagagatttgggcaagatgcgcctctcaacaagtacaaccgtgagaatttctacactcatgacccagttatcggttacactgactacccctttcttgaatga

SEQ ID NO: 30003 - protein, 365 aa, Glycine max
MATEADAPVIPLLTPYKMGNFNLSHRVVLAPLTRMRSYNNVPQPHAVLYYSQRTSPGGLLISEATGVSDTAQGLVHTPGIWTKEQVEAWKPIVNAVHAKGGVFFCQIWHVGRVSSPVFQPNGQAPISSTDKPLKQNGIEEAQVTPPRRLRTDEIPHIVNDFRVAARNAIKAGFDGVEIHGAHGYLLEQFIKDKVNDRSDGYGGSLENRCRFALEVVEAVVKEIGAERVGVRLSPFTEHAECGDSDPKALGLYLANALSKYNILYCHMVEPRMKNALEVVECPHSLMPMRKAFNGTFISAGGYDRKDGIDAVAKNRTDLVAYGRLFLANPDLPKRFGQDAPLNKYNRENFYTHDPVIGYTDYPFLE

SEQ ID NO: 30004 - DNA, 1101 bp, Triticum aestivum
  CDS (1)..(1101)
atgagcaagactgccctcctcaccccctacaagatgggaaggtttgatctttcccacagggtagttcttgcaccactgacaagggagcggtccttcggaaatgttcctcagcctcatgccatactgtattatcaacagagaacaaccaaaggaggccttttgattgctgaggccactggagtttcagacactgctcaagggtacaaagacactcctggcatttggacaaaggagcaagtagaagcatggaaaccgatcgtgaatggggttcacacaaaaggaggaatatttttctgtcagatttggcatgtaggaagagtctccaatcacacttttcagcctaacgggcaggctccaatttcgagcactgataagccactcaaacctgtagttagagccaatggcatagatgtgcctacaatttcaactcctaggcggctacagactaatgagattcctttggtaatcaacgattttagggctgctgctagaaatgcaattgaagccggatttgatggtgttgaaatccatggagctcatggttatttgattgatcagttcttaaaggaccaagtcaatgatcgcactgacaaatatggtgggagcttagagaatcgctgccgctttgcattggaagtagttcaagctgtagttgatgaagttggagctgataaggttgggataaggctctctccgtttgcaaactattcagaggcatccgactcaaacccagaagctctaggcctatacatggcacatgcactaaacaaatttggaattctctattgtcacatggtggaaccacggatggtgaatattggtgagaagtttgaaactccccatagtcttcgccccataagggatgcttttaaaggaacatttattgtagctgggggatacgacagggatgatggaaataaagcaatcgccgatgactatgctgatttggtagcatatgggcgcttgtttttatccaatcctgacttgcctcggaggtttgaaataggtgctcctctcaacaagtacataagagatactttctacctctctgatccagttattggatacactgattacccatttctgccgtccgatgtctag

SEQ ID NO: 30005 - protein, 366 aa, Triticum aestivum
MSKTALLTPYKMGRFDLSHRVVLAPLTRERSFGNVPQPHAILYYQQRTTKGGLLIAEATGVSDTAQGYKDTPGIWTKEQVEAWKPIVNGVHTKGGIFFCQIWHVGRVSNHTFQPNGQAPISSTDKPLKPVVRANGIDVPTISTPRRLQTNEIPLVINDFRAAARNAIEAGFDGVEIHGAHGYLIDQFLKDQVNDRTDKYGGSLENRCRFALEVVQAVVDEVGADKVGIRLSPFANYSEASDSNPEALGLYMAHALNKFGILYCHMVEPRMVNIGEKFETPHSLRPIRDAFKGTFIVAGGYDRDDGNKAIADDYADLVAYGRLFLSNPDLPRRFEIGAPLNKYIRDTFYLSDPVIGYTDYPFLPSDV

SEQ ID NO: 30006 - DNA, 1188 bp, Linum usitatissimum
  CDS (1)..(1188)
atggcagaagctgaagcagcagccggatccggatcatcagccactctgttctctccgtacaagatgggcaagttcagtctatcccacaggattgtgctggcgccgatgacgaggtgcagggcggcggagggaggtactccgacggcgatgatggctgattactacgctcagagatcgactcccggcggattgctcatctccgaaggcaccagcgtccatcctactgcccctgggtttcctcgcgtgccggggatttacactgaagagcaagtggaagcatggaggaaagtagtggacgcagttcatgccaaaggaagcatcatcttctgccagctctggcacgttggccgtgcttcccatcaagtttatcaaccaggtggagctgcaccgatctcatcaaccaccaagcccgtgtcgaaaaggggtcgaatccttatgccagatggcagctgggctccttacccgactccacgacagttagagacctccgagatacctggtgtggtcgagatgtaccgccactctgcagtcaatgccattagagcagggtttgacggcgttgagatccatagtgcacacggctacctaatcgaccagttcctcaaggacgggatcaacgaaagaagcgaccagtacggtgggtccatcgacaacagatgccggttccttatggaaatcgtccaggcagtggtctccgcagtcggtgcacctagactcggggtcaggatgtcaccggcgatcgaccacctagacgccatcgactcagacccgctcaagctaggcctggccgtggtggagaggctcaacaagctacaatgccaaggtggaggtacgaataagctcgcgtacctccacgtgacccagcctcgctacacggcctacggacaaaccgagtctggcaggccggggagcgaggaggaagaggccgccttgatgaggaccctgagggatgcttacgacgggacattcatggctagtggcgcttacaccagagagctagggctcgaagccgtggctcgaggggatgccgatttggtctcctatggtaggctgtttgtgtccaatccggacttggtgttgaggtttaaggttgatgcacctttgaataggtacactaggaagactttctatacccatgattttgttggatataccgactatcctttcatggagaaagctaaactttaa

SEQ ID NO: 30007 - protein, 395 aa, Linum usitatissimum
MAEAEAAAGSGSSATLFSPYKMGKFSLSHRIVLAPMTRCRAAEGGTPTAMMADYYAQRSTPGGLLISEGTSVHPTAPGFPRVPGIYTEEQVEAWRKVVDAVHAKGSIIFCQLWHVGRASHQVYQPGGAAPISSTTKPVSKRGRILMPDGSWAPYPTPRQLETSEIPGVVEMYRHSAVNAIRAGFDGVEIHSAHGYLIDQFLKDGINERSDQYGGSIDNRCRFLMEIVQAVVSAVGAPRLGVRMSPAIDHLDAIDSDPLKLGLAVVERLNKLQCQGGGTNKLAYLHVTQPRYTAYGQTESGRPGSEEEEAALMRTLRDAYDGTFMASGAYTRELGLEAVARGDADLVSYGRLFVSNPDLVLRFKVDAPLNRYTRKTFYTHDFVGYTDYPFMEKAKL

SEQ ID NO: 30008 - DNA, 1101 bp, Hordeum vulgare
  CDS (1)..(1101)
atgagcaacactgcactcctcaccccctacaagatgggaaggtttgatctttcccacagggtggttctcgcaccactgacaagggagcgatccttcggaaatgttcctcagcctcatgccgtactgtattatcaacagagaacaaccgaaggaggccttttgattgctgaggccactggagtttccgacactgctcaagggtacaaagatactcctggcatttggacaaaggagcaagtagaagcatggaaaccgatcgtcaatggggttcatgcaaaaggaggaatatttttctgtcagatttggcatgtaggaagagtctctaatcacacttttcagcctaatgggcaggctccaatttcgagcactgataagccactcaaacctgtagttagagccaacggcatagatgtggctacaatctcaactcctaggcggctacagactaatgagattcctttggtaatcaatgattttagggttgctgctagaaatgcgattgaagccggatttgacggtgttgaaatccatggagctcatggttatttgattgatcagttcttaaaggaccaagtaaatgatcgcactgacaaatatggtgggagcttagagaatcgttgccgttttgcactagaagtagttcaagccgtagttgatgaagttggagctgataaggttgggataaggctctcaccgtttgcgagctattcagaggcatccgactcaaacccagaagctctaggcctatacatggcacatgcactgaacaaatttggaattctctattgccacatggtggaaccacggatggtgaatattggtgaaaagtttgaaactccccatagtcttcgccccataagggatgcttttaagggaacatttattgtagctgggggatacgacagggatgatggaaataaagcaatcgccgatggctatgctgacttggtagcatatgggcgcttgtttttatccaatcctgacttgcctcggaggtttgaaataggtgctcctctcaacaagtacataagagatactttctacctctccgatccagttattggatacactgactacccatttctgccgtccgatgtctag

SEQ ID NO: 30009 - protein, 366 aa, Hordeum vulgare
MSNTALLTPYKMGRFDLSHRVVLAPLTRERSFGNVPQPHAVLYYQQRTTEGGLLIAEATGVSDTAQGYKDTPGIWTKEQVEAWKPIVNGVHAKGGIFFCQIWHVGRVSNHTFQPNGQAPISSTDKPLKPVVRANGIDVATISTPRRLQTNEIPLVINDFRVAARNAIEAGFDGVEIHGAHGYLIDQFLKDQVNDRTDKYGGSLENRCRFALEVVQAVVDEVGADKVGIRLSPFASYSEASDSNPEALGLYMAHALNKFGILYCHMVEPRMVNIGEKFETPHSLRPIRDAFKGTFIVAGGYDRDDGNKAIADGYADLVAYGRLFLSNPDLPRRFEIGAPLNKYIRDTFYLSDPVIGYTDYPFLPSDV

SEQ ID NO: 30010 - DNA, 1125 bp, Brassica napus
  CDS (1)..(1125)
atggaaaacgcagtaatgaaacagagtatccctctcctcacgccctacaagataggtagattcaatctttcccacagggttgttcttgcaccattgacgagacagagatcatacggaaacgttcctcaactacatgctgtgctatactacgctcagagaaccaccccaggaagtcttctcatcactgaagccactggagtttcagatacagctcaagggtatcaagatacacctggaatatggactaaagagcatgtggaggcatggaagccaatcgtggacgctgttcatgccaaaggtggcatcatcttctgtcagatttggcatgttggcagagtttctaataaaggttttcagccaaatgggcaagctcccatctcttgtacggacaagccattgatgcctcagatccgctctaacggcatcgatgaagccatgtttacccctccaagacgcctaagtactgaagagatccccaccattgtcagccatttcaggcttgcagcaagaaacgctatggaagctggcttcgacggagtagagatacatggagctaatggctatctcatcgaccagttcatgaaagacacggtgaacaatagaactgacgaatacggtggatcattacaaaaccgctgcaaattcgctctagacatagtcgaagcagtggccaacgagatcgggcctgatcgcgttggaatcaggctctctcccttcgcagactacatggaatcaggagacacaaacccacaagcattagcacttcacatggcggagtctctgaacaaatacggaatcttatactgccacgtgatcgaagcgaggatgaaaacaatgggtgaaataacagagtgtcatcctcacacgttaacgccgatgaggaaagccttctccgggacgtttatcgccgcaggaggtttcaagagggaagatgggaacgaggcggttgataagggaaggactgatctggtggcttatggtcggtggtttctggcgaaccccgatctgccaaagaggtttgaagttgatgcggagttgaataagtatgatagatcaacgttttatacttctgaccctgtcgtgggctacactgactacccgtttcttgattcaacagctagttaa

SEQ ID NO: 30011 - protein, 374 aa, Brassica napus
MENAVMKQSIPLLTPYKIGRFNLSHRVVLAPLTRQRSYGNVPQLHAVLYYAQRTTPGSLLITEATGVSDTAQGYQDTPGIWTKEHVEAWKPIVDAVHAKGGIIFCQIWHVGRVSNKGFQPNGQAPISCTDKPLMPQIRSNGIDEAMFTPPRRLSTEEIPTIVSHFRLAARNAMEAGFDGVEIHGANGYLIDQFMKDTVNNRTDEYGGSLQNRCKFALDIVEAVANEIGPDRVGIRLSPFADYMESGDTNPQALALHMAESLNKYGILYCHVIEARMKTMGEITECHPHTLTPMRKAFSGTFIAAGGFKREDGNEAVDKGRTDLVAYGRWFLANPDLPKRFEVDAELNKYDRSTFYTSDPVVGYTDYPFLDSTAS

SEQ ID NO: 30012 - DNA, 1122 bp, Brassica napus
  CDS (1)..(1122)
atggaaaacgcagtaatgaaacagagtatccctctcctcacgccctacaagataggtagattcaatctttcccacagggttgttcttgcaccattgacgagacagagatcatacggaaacgttcctcaactacatgctgtgctatactacgctcagagaaccaccccaggaagtcttctcatcactgaagccactggagtttcagatacagctcaagggtatcaagatacacctggaatatggactaaagagcatgtggaggcatggaagccaatcgtggacgctgttcatgccaaaggtggcatcatcttctgtcagatttggcatgttggcagagtttctaataaaggttttcagccaaatgggcaagctcccatctcttgtacggacaagccattgatgcctcagatccgctctaacggcatcgatgaagccatgtttacccctccaagacgcctaagtactgaagagatccccaccattgtcagccatttcaggcttgcagcaagaaacgctatggaagctggcttcgacggagtagagatacatggagctaatggctatctcatcgaccagttcatgaaagacacggtgaacaatagaactgacgaatacggtggatcattacaaaaccgctgcaaattcgctctagacatagtcgaagcagtggccaacgagatcgggcctgatcgcgttggaatcaggctctctcccttcgcagactacatggaatcaggagacacaaacccacaagcattagcggttcacatggcggagtctctgaacaaatacggaatcttatactgtcacgtgatcgaagcgaggatgaaaacaatgggtgaggtaacagagtgtcctcacacgttaacgccgatgaggaaagccttctcggggacgtttattgctgctggaggttttaagagggaagatgggaacgaggcggttgataagggaaggactgatctggtggcttatggtcggtggtttctggcgaaccccgatctgccaaagaggtttgaagttgatgcggcgttgaataagtatgatagatcaacgttttatgcttctgaccctgtcgtgggctacactgactacccgtttcttgattcaacagctagttaa

SEQ ID NO: 30013 - protein, 373 aa, Brassica napus
MENAVMKQSIPLLTPYKIGRFNLSHRVVLAPLTRQRSYGNVPQLHAVLYYAQRTTPGSLLITEATGVSDTAQGYQDTPGIWTKEHVEAWKPIVDAVHAKGGIIFCQIWHVGRVSNKGFQPNGQAPISCTDKPLMPQIRSNGIDEAMFTPPRRLSTEEIPTIVSHFRLAARNAMEAGFDGVEIHGANGYLIDQFMKDTVNNRTDEYGGSLQNRCKFALDIVEAVANEIGPDRVGIRLSPFADYMESGDTNPQALAVHMAESLNKYGILYCHVIEARMKTMGEVTECPHTLTPMRKAFSGTFIAAGGFKREDGNEAVDKGRTDLVAYGRWFLANPDLPKRFEVDAALNKYDRSTFYASDPVVGYTDYPFLDSTAS

SEQ ID NO: 30014 - DNA, 1113 bp, Glycine max
  CDS (1)..(1113)
atggcttctcctcttcttactccttacaagatgggcaaattcaatctgtcccatagagttgttttggcaccgctgaccagacagaggtcttacgacaacgtcccacaaccccatgccatcctctactactcccagagaacttccaacggaggccttctcattactgaagccactggcgtctctgacacggctcaaggctatccgcaaacccctggcatatggactaaagaccatgttcaagcttggaaacccattgtcgatgccgtccacgccaaaggcggtgttttcttctgtcagatttggcacgttggaagagtttcagattcagtttatcagccaaatggacaagcacccatatcttctacggacaagccactcacaccccaaattcgaagtaatggcattgatcaagtacaatttacccctccaaggagattaaggactgatgaaattccgcatattgtaaatgacttcagacttgctgcaaggaatgccatcgaagctggttttgatggggttgagatccatggggctcatggctacctgcttgagcaatttatgaaagataaagtgaatgaccgaacagacgaatatggtggatcccttgagaaccgctgccgatttgctttggaagttgttgaagctgttgttaatgagataggggcggacagagttggaattaggctatcgccattcgcagaatattcagagtctggagactctaatccaaaagaattggggctttacatgatgaatgccctcaataagtatggtattctttactgtcacatggtggaaccaagaatgaagactgttggagaaaaaactgaatgccctcatagcctggtgcctatgagaaaggccttcaatggcacttttatagccgcaggaggttatgacaggcaagaggggatcgatgccatatctgagaacagggctgatcttgttgcttatggtcgtttgttcttggccaatccagacttgccaaagagatttgcactcaatgctcctctcaacaagtatcaccgggagacattctacactcatgatccagttgttggttatactgactacccttttcatgctgaagaatccaatgttgtagcatcttag

SEQ ID NO: 30015 - protein, 370 aa, Glycine max
MASPLLTPYKMGKFNLSHRVVLAPLTRQRSYDNVPQPHAILYYSQRTSNGGLLITEATGVSDTAQGYPQTPGIWTKDHVQAWKPIVDAVHAKGGVFFCQIWHVGRVSDSVYQPNGQAPISSTDKPLTPQIRSNGIDQVQFTPPRRLRTDEIPHIVNDFRLAARNAIEAGFDGVEIHGAHGYLLEQFMKDKVNDRTDEYGGSLENRCRFALEVVEAVVNEIGADRVGIRLSPFAEYSESGDSNPKELGLYMMNALNKYGILYCHMVEPRMKTVGEKTECPHSLVPMRKAFNGTFIAAGGYDRQEGIDAISENRADLVAYGRLFLANPDLPKRFALNAPLNKYHRETFYTHDPVVGYTDYPFHAEESNVVAS

SEQ ID NO: 30016 - DNA, 1128 bp, Glycine max
  CDS (1)..(1128)
atgaacaagacgatggaagagaacgagaaagcgtttaatgttaatggaagggaagtgatacctctcctcgccccattcaaaatgggaaaattcaatctatctcacaggattgttctggcaccgttaacaagaacgaggtcatacaacttcatggctcagcctcatgctgctttgtattattctcaaagaacaacaaagggtggatttttgattggggaagcctcgggggtgtcagacactgcacaagggtacccaaatacaccaggaatttggacaagagaacaagtggaagcatggaaaccaattgtgagagccgttcatgaaaatgggggcatattcttttgccaactctggcacgccggaagagtctccaactatgtataccagccaaatggggagcccccaatttcaagcacgaacaaggcggttcaaggtagcagcacccaatacccacctccacgtcgtctaagaaccgatgaaatccctgagattgtcaatgacttcagaatggcagccaaaaatgccatagaagcaggttttgacggggtagagatacatggagctaatggatacttgctagaacaatttctaaaggacaaagtgaacgacagagatgatgagtatggaggtagcttagaaaatcgttgtcggtttccactaatggttgtgaaggctgtatgtgatgacattggagctgacaaagttggtgttaggctatcccctttcgccaattattgtaattgtgtagactctaatcctcaagcgttaggcatttacatggcacaatccttgagccaattgggcattctttattgccatgtcattgagcccaggatgctcacaatgtttgaaaaacatgagacagacgtgtcccttttgcctattcgaaaggccttcaacggaacatttattgttgctggtggctacaacaggagtgagggaaacagagtcatagccaatggaggtgcagatttggtggcttatggacgcctgtttttggcaaatccagacttgcccaaaagatttgaactcgatgttgagttaaacaaggctgatagaagcactttttacaccactgatcctgttgttggatatacagattatccatttcttgaaaatgattgttaa

SEQ ID NO: 30017 - protein, 375 aa, Glycine max
MNKTMEENEKAFNVNGREVIPLLAPFKMGKFNLSHRIVLAPLTRTRSYNFMAQPHAALYYSQRTTKGGFLIGEASGVSDTAQGYPNTPGIWTREQVEAWKPIVRAVHENGGIFFCQLWHAGRVSNYVYQPNGEPPISSTNKAVQGSSTQYPPPRRLRTDEIPEIVNDFRMAAKNAIEAGFDGVEIHGANGYLLEQFLKDKVNDRDDEYGGSLENRCRFPLMVVKAVCDDIGADKVGVRLSPFANYCNCVDSNPQALGIYMAQSLSQLGILYCHVIEPRMLTMFEKHETDVSLLPIRKAFNGTFIVAGGYNRSEGNRVIANGGADLVAYGRLFLANPDLPKRFELDVELNKADRSTFYTTDPVVGYTDYPFLENDC

SEQ ID NO: 30018 - DNA, 1116 bp, Glycine max
  CDS (1)..(1116)
atggaagagaacgagaaagcgtttaatgttaatggaagggaagtgatacctctcctcgccccattcaaaatgggaaaattcaatctatctcacaggattgttctggcaccgttaacaagaacgaggtcatacaacttcatggctcagcctcatgctgctttgtattattctcaaagaacaacaaagggtggatttttgattggggaagcctcgggggtgtcagacactgcacaagggtacccaaatacaccaggaatttggacaagagaacaagtggaagcatggaaaccaattgtgagagccgttcatgaaaatgggggcatattcttttgccaactctggcacgccggaagagtctccaactatgtataccagccaaatggggagcccccaatttcaagcacgaacaaggcggttcaaggtagcagcacccaatacccacctccacgtcgtctaagaaccgatgaaatccctgagattgtcaatgacttcagaatggcagccaaaaatgccatagaagcaggttttgacggggtagagatacatggagctaatggatacttgctagaacaatttctaaaggacaaagtgaacgacagagatgatgagtatggaggtagcttagaaaatcgttgtcggtttccactaatggttgtgaaggctgtatgtgatgacattggagctgacaaagttggtgttaggctatcccctttcgccaattattgtaattgtgtagactctaatcctcaagcgttaggcatttacatggcacaatccttgagccaattgggcattctttattgccatgtcattgagcccaggatgctcacaatgtttgaaaaacatgagacagacgtgtcccttttgcctattcgaaaggccttcaacggaacatttattgttgctggtggctacaacaggagtgagggaaacagagtcatagccaatggaggtgcagatttggtggcttatggacgcctgtttttggcaaatccagacctgcccaaaagatttgaactcgatgttgagttaaacaaggctgatagaagcactttttacaccactgatcctgttgttggatatacagattatccatttcttgaaaatgattgttaa

SEQ ID NO: 30019 - protein, 371 aa, Glycine max
MEENEKAFNVNGREVIPLLAPFKMGKFNLSHRIVLAPLTRTRSYNFMAQPHAALYYSQRTTKGGFLIGEASGVSDTAQGYPNTPGIWTREQVEAWKPIVRAVHENGGIFFCQLWHAGRVSNYVYQPNGEPPISSTNKAVQGSSTQYPPPRRLRTDEIPEIVNDFRMAAKNAIEAGFDGVEIHGANGYLLEQFLKDKVNDRDDEYGGSLENRCRFPLMVVKAVCDDIGADKVGVRLSPFANYCNCVDSNPQALGIYMAQSLSQLGILYCHVIEPRMLTMFEKHETDVSLLPIRKAFNGTFIVAGGYNRSEGNRVIANGGADLVAYGRLFLANPDLPKRFELDVELNKADRSTFYTTDPVVGYTDYPFLENDC

SEQ ID NO: 30020 - DNA, 1179 bp, Glycine max
  CDS (1)..(1179)
atggccgataatgcaacaacgcaaggaagcaacaccctattttctccttacaagatggccaaattcaacctctctcatagggtggtgttggctcctatgacaagatgcagagcgttgaactggattccacaggcagcgcttgctgaatactacgctcaaagatcaacaccaggtggatttctcatcagcgaaggcaccttgatctcccccactgctcctgggtttccccatgttcccgggatatattcagatgaacaagtagaggcatggcgaaacatagtggatgccgtgcatgccaaaggcagcattatcttctgtcaactttggcatgttggccgtgcatctcatccagtgtatcaacctggtggagctccacccatttcgtccaccagcaagcccatatcagacaagtggaaaattctcatgcccgatggctcccatggcatctacccagagcctcgtgcacttaccacttctgagatatctgaaatagtgcatcattatcgccaagcagctattaatgcaattcgagcaggttttgatggaatcgagattcatggagcacatgggtatctcattgatcaattcttaaaggatgcaatcaatgatagaacagatgaatacggtggaccactagaaaaccggtgcaggttcttaatggaggtagttgaagctgttgtctctgccattggagcggaaagagttgctatcagaatttcaccagcaattgatttcaatgacgcctttgactctgacccacttgggctaggcttagcagtgattgaaagactcaacaatttgcagaaacaagtgggcacaaaactcgcttatcttcatgttactcagcctcgattcacacttttggcgcaaaccgagtcagtgagtgaaaaggaggaagctcatttcatgcagaaatggagagaggcttatgagggaacattcatgtgtagtggagcttttactagggactcaggaatggaagctgtagctgaaggccatgctgatttggtatcctatggtcgtcttttcatctccaatccagacttggttttaaggcttaagctcaatgcacctcttaccaagtataacaggaacacattttacacccaagatcctgttataggctacacagattatcctttctttaatggaacaactgagacaaaattaagtaactag

SEQ ID NO: 30021 - protein, 392 aa, Glycine max
MADNATTQGSNTLFSPYKMAKFNLSHRVVLAPMTRCRALNWIPQAALAEYYAQRSTPGGFLISEGTLISPTAPGFPHVPGIYSDEQVEAWRNIVDAVHAKGSIIFCQLWHVGRASHPVYQPGGAPPISSTSKPISDKWKILMPDGSHGIYPEPRALTTSEISEIVHHYRQAAINAIRAGFDGIEIHGAHGYLIDQFLKDAINDRTDEYGGPLENRCRFLMEVVEAVVSAIGAERVAIRISPAIDFNDAFDSDPLGLGLAVIERLNNLQKQVGTKLAYLHVTQPRFTLLAQTESVSEKEEAHFMQKWREAYEGTFMCSGAFTRDSGMEAVAEGHADLVSYGRLFISNPDLVLRLKLNAPLTKYNRNTFYTQDPVIGYTDYPFFNGTTETKLSN

SEQ ID NO: 30022 - DNA, 1128 bp, Zea mays
  CDS (1)..(1128)
atggggcaacaagaaaaggaagtgatcccgctgatgaccccgtacaagatgggacagctggagctctcccaccgcgtggtgctggcgccgatgacgcggtgccgcgccatcggggacgtgccgcagccgcacgccgccgtgtactactcgcagcgcgccagcaggggcggcgtgctcatcaccgagggcacgggggtgtccgccaccgcgcagggcttcccggggtcccccggcatctggacgcaggagcaggtggcggcgtggaagcccatcgtcgacgccgtccaccgcaagggcgcgctcttcttctgccagatcgcgcacgtcggaagggcatccaccaacgatttccagccggacggccaggcgccggtctcgagcacggacgcgcagctcccacccgacgccgagtccggcacggtgttctccaggccacgccggctgcgggccgacgagatcccggggatcgtcgacgacttcaggcgcgccgcgcgcaacgcgatcgaggccgggttcgacggcgtggagatccacggagcgcacgggttcctcctggagcagttcatgaaggacggcgccaacgaccgcgccgacgagtacggcggcagcgtcgagaaccggtgccgcttcgtggtcgaggtcgtggacgctctggtccgtgaagtcggcgcgagccgggttggcatcaggctctccccgttcgcggactacttggactgtgcggattccaaccccttggcgctaggtcactacatggtggaacagctcaacaggcacgaggggtttctgtactgccacatggtggagcctcgaatggccatcgtcgacgaccgcaggcagattccgcatcgactcctgccgttcaaggcggcgttcaatggcaccttcatcgccgcgggcgggtacgacagggaggaagggaacaaggtggtcgccgaaggctacgcggacctcgtcgcatacggaaggctgttcttggccaacccagacctgcctaaaaggttcgaggtagacgagatcctgaacaagtatgatcgttccaccttttatacacaagaccctgttgttggctatacagactaccctttccttagggacgacagcgaagacttagctgctcaagcttaa

SEQ ID NO: 30023 - protein, 375 aa, Zea mays
MGQQEKEVIPLMTPYKMGQLELSHRVVLAPMTRCRAIGDVPQPHAAVYYSQRASRGGVLITEGTGVSATAQGFPGSPGIWTQEQVAAWKPIVDAVHRKGALFFCQIAHVGRASTNDFQPDGQAPVSSTDAQLPPDAESGTVFSRPRRLRADEIPGIVDDFRRAARNAIEAGFDGVEIHGAHGFLLEQFMKDGANDRADEYGGSVENRCRFVVEVVDALVREVGASRVGIRLSPFADYLDCADSNPLALGHYMVEQLNRHEGFLYCHMVEPRMAIVDDRRQIPHRLLPFKAAFNGTFIAAGGYDREEGNKVVAEGYADLVAYGRLFLANPDLPKRFEVDEILNKYDRSTFYTQDPVVGYTDYPFLRDDSEDLAAQA

SEQ ID NO: 30024 - DNA, 1176 bp, Zea mays
  CDS (1)..(1176)
atgggcagcggcggcgctaacactgcccccctcctcaccccctacaagatgggaaaattcgatgttacccacagggtagtcctcgcaccactgacgagacagcggtcctacggcaacgttccccagcctcatgccatactgtactatcagcagagggcgactaaaggaggtcttctgatcgctgaggccacgggggtttcagacactgctcaagggtacaaggacactcctggcatttggacccatgagcaagtcgaagcatggaagccgatcgtagacggggttcaccagaaaggagggatatttttctgtcagatttggcacgtagggagagtctccaattccacgtttcagcctaatgggcaggctccaatttcaagcaccgataagccactaaagcctcaagtgagagccaatggtatagacgtggctactttcgcagttcctagacgcttagagactgatgaaatccctttggtcgtcaatgatttcagggtagctgctcgaaatgcgattgaagctggatttgatggtgtcgaaatccatggagctcacggttacctgattgatcagtttctaaaggacggggtcaacgaccgcacagacaaatacggtggcagtctggagaaccgctgccggtttgcactggaagtaactcaagccgtggtcgacgaaattggagctgacaaggtcgggataaggctgtcaccattcgctagctactcggaggcgccggactcagacccggaagctctgggcatgtacatggcgaacgcgctgaacgagttcgggattctctactgccacatggtggagccgcggatggtgaaactcggtgaaaagttcgaaaccccctacagccttcgcccgataagggacgctttcaggggaacgttcatcgttgccggcggctacggcagggaggatgggaatcgcgcgatctccactgggtatgctgatttggtcgcgttcgggcgcgtgttcttggctaatcctgacctgcctcggaggttcgaagtagacgctccccttaacaagtacaacagagacacgttttacatccctgatccggttattggatacctgactacccatttctttcgtcagatgtataaatgttctcttttcagcaatctgctttttagattgtgtagtaactggttggtgtaccagtaa

SEQ ID NO: 30025 - protein, 391 aa, Zea mays
MGSGGANTAPLLTPYKMGKFDVTHRVVLAPLTRQRSYGNVPQPHAILYYQQRATKGGLLIAEATGVSDTAQGYKDTPGIWTHEQVEAWKPIVDGVHQKGGIFFCQIWHVGRVSNSTFQPNGQAPISSTDKPLKPQVRANGIDVATFAVPRRLETDEIPLVVNDFRVAARNAIEAGFDGVEIHGAHGYLIDQFLKDGVNDRTDKYGGSLENRCRFALEVTQAVVDEIGADKVGIRLSPFASYSEAPDSDPEALGMYMANALNEFGILYCHMVEPRMVKLGEKFETPYSLRPIRDAFRGTFIVAGGYGREDGNRAISTGYADLVAFGRVFLANPDLPRRFEVDAPLNKYNRDTFYIPDPVIGYLTTHFFRQMYKCSLFSNLLFRLCSNWLVYQ

SEQ ID NO: 30026 - DNA, 1131 bp, Zea mays
  CDS (1)..(1131)
atggtgcagcaagccgcgaaggaggtgatcccgctgctgacgccttacaagatggggcagttcgagctctctcaccgggtggtgctggcgccgctgacgaggtgccgctcctacggcaacgtgccgcagccacacgccgccgtgtactactcgcagcgcgccaccaggggtggcctgctcatcgcggaggccacgggggtgtcggccaccgcgcaggggttcccggagtctcctggcatctggacgcaggagcaggtcgaggcgtggaagcccatcgtcgacgccgtccaccgcaagggcgccatcttcgtctgccagatctggcatgtgggcagggtctccaccaacgagctccagcccaacggcgacgcgcctatctcgagcacggacaagcagatctcccccaacgccgagtccggaacggcgtactcgaagccgcgccggctgcggaccgacgaggtccccgggatcgtcgacgacttcaggcgggccgcacggaacgcgatccaggctggcttcgacgccgtcgagatccacggcgcgcacgggtacctcctggagcagttcatgaaggacagctgcaacgaccgcacggaccagtacggcggcagcctggagaaccggtgccgtctcgccgtggaggtcgtggacgccgtcgtccgcgaggtgggcgcgcgccgcgtcggcatcaggctgtcgcccttcgtcgacttcgtggactgcgtggactcggacccggtggcgctcggccactacatggtgcagcagctcaacaggcatagcggcttgctctactgccacatggtggagccccgcatggctaccgtcgacgggcgcaggcagatccctcacgggctcttgccgttccgaaaggcgtttcatggaacgttcatcgccgccggtgggtacgatcgggaggatggcaacaaggtggtggcagaagggtatgctgacctcgtcgcgtatgggaggctgttcttggctaacccagacctacctaggaggttcgagctggatgtggcactcaacaaatacgaccgctccaccttctacacgcaagatcctattgttggctacacagattaccctttctttgaagaagaagatggcaagaatgaggagtcagtctga

SEQ ID NO: 30027 - protein, 376 aa, Zea mays
MVQQAAKEVIPLLTPYKMGQFELSHRVVLAPLTRCRSYGNVPQPHAAVYYSQRATRGGLLIAEATGVSATAQGFPESPGIWTQEQVEAWKPIVDAVHRKGAIFVCQIWHVGRVSTNELQPNGDAPISSTDKQISPNAESGTAYSKPRRLRTDEVPGIVDDFRRAARNAIQAGFDAVEIHGAHGYLLEQFMKDSCNDRTDQYGGSLENRCRLAVEVVDAVVREVGARRVGIRLSPFVDFVDCVDSDPVALGHYMVQQLNRHSGLLYCHMVEPRMATVDGRRQIPHGLLPFRKAFHGTFIAAGGYDREDGNKVVAEGYADLVAYGRLFLANPDLPRRFELDVALNKYDRSTFYTQDPIVGYTDYPFFEEEDGKNEESV

SEQ ID NO: 30028 - DNA, 1200 bp, Zea mays
  CDS (1)..(1200)
atggcctccacggatcgctccacgccggcggaggaccagcaacagcagaagcgcccgtccctcttctcgccgtaccagatgccccacttccgcctcgcccaccgggtggtgctggcgccgatgaccaggtgcagggcgcccgacgcgctcccaggccccgcgctcgcggagtactacgcgcagcggtccacggaaggcggcttgctcatctccgagggcaccatcatctcgcccgccggccctgggttccctcgtgtccctgggatatacaatcaagaacagactgatgcatggaaaaaggtggttgatgctgttcatgccaagggagccatctttttctgccaactatggcatgtaggtcgagcttctcaccaagtatatcagccgggtggtgctgctccaatatcctctactgataaaccaatatcatcaagatggaggatactgatgcccgatggatcctatggcaagtatccaactccgaggcgcctagccacatccgagataccagaaattgtcgagcaataccgacaagcagccataaacgccatcaaagcaggtttcgatggcatcgagatccacggcgcccatggctacctaatcgaccagttcctcaaggacggtatcaacgaccggactgacgagtacggtggctcactctccaaccgttgccggttcctcctggaggtgacccgagccgtggtctctgcgataggggcagaccgcgtcgcggtccgagtgtccccggccatcgaccacctcgacgcctacgactccaaccccctgcagctcggcctggccgtagtggaccgcctcaacgctctccagcaggagaccgggcggctggcctacctccacgtgacgcagccacggtacacggcgtacgggcagacagagtccggccagcacgggagcgccgaggaggagagccggctgatgcgcgccctgcgaggcgcctaccgcggcacgttcatgtgcagcggtgggtacacgcgcgagctcggcgtcgaggccatcgagtccggggacgccgacctggtgtcctacgggcggctgttcatcgctaaccccgacctggtggagcggttccggcgcgacgccccgctgaacaaatacgtgcgcaagacgttctacaccccggaccccgtcgtcggttacacggactacacattcctcggccagcctaaggcacgcatgtga

SEQ ID NO: 30029 - protein, 399 aa, Zea mays
MASTDRSTPAEDQQQQKRPSLFSPYQMPHFRLAHRVVLAPMTRCRAPDALPGPALAEYYAQRSTEGGLLISEGTIISPAGPGFPRVPGIYNQEQTDAWKKVVDAVHAKGAIFFCQLWHVGRASHQVYQPGGAAPISSTDKPISSRWRILMPDGSYGKYPTPRRLATSEIPEIVEQYRQAAINAIKAGFDGIEIHGAHGYLIDQFLKDGINDRTDEYGGSLSNRCRFLLEVTRAVVSAIGADRVAVRVSPAIDHLDAYDSNPLQLGLAVVDRLNALQQETGRLAYLHVTQPRYTAYGQTESGQHGSAEEESRLMRALRGAYRGTFMCSGGYTRELGVEAIESGDADLVSYGRLFIANPDLVERFRRDAPLNKYVRKTFYTPDPVVGYTDYTFLGQPKARM

SEQ ID NO: 30030 - DNA, 1122 bp, Zea mays
  CDS (1)..(1122)
atggtgcagcaagccgcgaaggaggtgatcccgctgctgacgccttacaagatggggcagttcgagctctctcaccgggtggtgctggcgccgctgacgaggtgccgctcctacggcaacgtgccgcagccacacgccgccgtgtactactcgcaacgcgccaccaggggtggcctgctcatcgcggaggccacgggggtgtcggccaccgcgcaggggttcccggagtctcctggcatctggacgcaggagcaggtcgaggcgtggaagcccatcgtcgacgccgtccaccgcaagggcgccatcttcgtctgccagatctggcatgtgggcagggtctccaccaacgagctccagcccaacggcgacgcgcctatctcgagcacggacaagcagatctcccccgacgccaagtccggaacggcgtactcgaagccgcgccggctgcggaccgacgaggtccccgggatcgtcgacgacttcaggcgggccgcacggaacgcgatccaggctggtttcgacgccgtcgagatccacggcgcgcacgggtacctcctggagcagttcatgaaggacagctgcaacgaccgcacggaccagtacggcggcagcctggagaaccggtgccgtctcgccgtggaggtcgtggacgccgtcgtccgcgaggtgggcgcgcgccgcgtcggcatcaggctgtcgccctttgttgacttcgtggactgcgtggactcggacccggtggcgctcggccactacatggtgcagcagctcaacaggcatagcggcttgctctactgccacatggtggagccccgcattaccgcccacgggcgcaggcagatccctcacgggctcttgccgttccgaaaggcgtttcatggaacgttcatcgccgccggtgggtacgatcgggaggaaggcaacaaggtggtggcagaagggtatgctgacctcgtcgcgtatgggaagctgttcttggctaacccggacctgcctaggaggttcgagctggatgtggcactcaacaaatacgaccgctccaccttctacacgcaagatcctattgttggctacacagattaccctttctttgaagaagaagatggcaagaatgagaggtga

SEQ ID NO: 30031 - protein, 373 aa, Zea mays
MVQQAAKEVIPLLTPYKMGQFELSHRVVLAPLTRCRSYGNVPQPHAAVYYSQRATRGGLLIAEATGVSATAQGFPESPGIWTQEQVEAWKPIVDAVHRKGAIFVCQIWHVGRVSTNELQPNGDAPISSTDKQISPDAKSGTAYSKPRRLRTDEVPGIVDDFRRAARNAIQAGFDAVEIHGAHGYLLEQFMKDSCNDRTDQYGGSLENRCRLAVEVVDAVVREVGARRVGIRLSPFVDFVDCVDSDPVALGHYMVQQLNRHSGLLYCHMVEPRITAHGRRQIPHGLLPFRKAFHGTFIAAGGYDREEGNKVVAEGYADLVAYGKLFLANPDLPRRFELDVALNKYDRSTFYTQDPIVGYTDYPFFEEEDGKNER

SEQ ID NO: 30032 - DNA, 1131 bp, Zea mays
  CDS (1)..(1131)
atggtgcagcaagccgcgaaggaggtgatcccgctgctgacgccttacaagatggggcagttcgagctctctcaccgggtggtgctggcgccgctgacgaggtgccgctcctacggcaacgtgccgcagccacacgccgccgtgtactactcccagcgcgccaccaggggtggcctgctcatcgcggaggccacgggggtgtcggccaccgcgcaggggtacccggagactcctggcatctggacgcaggagcaggtcgaggcgtggaagcccatcgtcgacgccgtccgccgcaagggcgccatcttcgtctgccagatctggcatgtgggcagggtctccaccaacgagctccagccgaacggcgatgcgcctatctcgagcacggacaagcagatctccccggacgccgagtccggaacggcgtactcgaagccgcgccggctgcggaccgacgaggtctccgggatcgtcgacgacttcaggcgggccgcacggaacgcgatccaggctggcttcgacgccgtcgagatccacggcgcgcacgggtacctcctggagcagttcatgaaggacagctgcaacgaccgcacggaccagtacggcggcagcctggagaaccggtgccgtctcgccgtggaggtcgtggacgccgtcgtccgcgaggtgggcgcgcgccgcgtcggcatcaggctgtcgcccttcgtcgacttcgtggactgcgtggactcggacccggtggcgctcggccactacatggtgcagcagctcaacaggcatagcggcttgctctactgccacatggtggagccccgcatggctaccgtcgacgggcgcaggcagatccctcacgggctcttgccgttccgaaaggcgtttcatggaacgttcatcgccgccggtgggtacgatcgggaggatggcaacaaggtggtggcagaagggtatgctgacctcgtcgcgtatgggaggctgttcttggctaacccagacctacctaggaggttcgagctggatgtggcactcaacaaatacgaccgctcccccttctacacgcaagatcctattgttggctacacagattaccctttctttgaagaagaagatggcaagaatgaggagtcagtctga

SEQ ID NO: 30033 - protein, 376 aa, Zea mays
MVQQAAKEVIPLLTPYKMGQFELSHRVVLAPLTRCRSYGNVPQPHAAVYYSQRATRGGLLIAEATGVSATAQGYPETPGIWTQEQVEAWKPIVDAVRRKGAIFVCQIWHVGRVSTNELQPNGDAPISSTDKQISPDAESGTAYSKPRRLRTDEVSGIVDDFRRAARNAIQAGFDAVEIHGAHGYLLEQFMKDSCNDRTDQYGGSLENRCRLAVEVVDAVVREVGARRVGIRLSPFVDFVDCVDSDPVALGHYMVQQLNRHSGLLYCHMVEPRMATVDGRRQIPHGLLPFRKAFHGTFIAAGGYDREDGNKVVAEGYADLVAYGRLFLANPDLPRRFELDVALNKYDRSPFYTQDPIVGYTDYPFFEEEDGKNEESV

SEQ ID NO: 30034 - DNA, 20 bp, Artificial sequence
  primer
atgagcacactcttcgaccc

SEQ ID NO: 30035 - DNA, 21 bp, Artificial sequence
  primer
ctacagggtcggatagtccag

SEQ ID NO: 30036 - protein, 456 aa, Artificial sequence
  consensus sequence
  Variant (2)..(11): Xaa in position 2 to 11 is any amino acid
  Variant (12)..(24): Xaa in position 12 to 24 is any or no amino acid
  Variant (26)..(26): Xaa in position 26 is any amino acid
  Variant (27)..(29): Xaa in position 27 to 29 is any or no amino acid
  Variant (31)..(31): Xaa in position 31 is any amino acid
  Variant (34)..(34): Xaa in position 34 is any amino acid
  Variant (36)..(41): Xaa in position 36 to 41 is any amino acid
  Variant (42)..(60): Xaa in position 42 to 60 is any or no amino acid
  Variant (63)..(63): Xaa in position 63 is any amino acid
  Variant (66)..(68): Xaa in position 66 to 68 is any amino acid
  Variant (69)..(70): Xaa in position 69 to 70 is any or no amino acid
  Variant (72)..(72): Xaa in position 72 is any amino acid
  Variant (74)..(75): Xaa in position 74 to 75 is any amino acid
  Variant (76)..(76): Xaa in position 76 is any or no amino acid
  Variant (78)..(78): Xaa in position 78 is any amino acid
  Variant (80)..(81): Xaa in position 80 to 81 is any amino acid
  Variant (82)..(96): Xaa in position 82 to 96 is any or no amino acid
  Variant (99)..(102): Xaa in position 99 to 102 is any amino acid
  Variant (103)..(104): Xaa in position 103 to 104 is any or no amino acid
  Variant (106)..(108): Xaa in position 106 to 108 is any amino acid
  Variant (110)..(115): Xaa in position 110 to 115 is any amino acid
  Variant (118)..(119): Xaa in position 118 to 119 is any amino acid
  Variant (121)..(125): Xaa in position 121 to 125 is any amino acid
  Variant (126)..(127): Xaa in position 126 to 127 is any or no amino acid
  Variant (129)..(129): Xaa in position 129 is any amino acid
  Variant (132)..(132): Xaa in position 132 is any amino acid
  Variant (135)..(154): Xaa in position 135 to 154 is any amino acid
  Variant (155)..(188): Xaa in position 155 to 188 is any or no amino acid
  Variant (190)..(191): Xaa in position 190 to 191 is any amino acid
  Variant (193)..(195): Xaa in position 193 to 195 is any amino acid
  Variant (198)..(205): Xaa in position 198 to 205 is any amino acid
  Variant (206)..(207): Xaa in position 206 to 207 is any or no amino acid
  Variant (209)..(213): Xaa in position 209 to 213 is any amino acid
  Variant (214)..(214): Xaa in position 214 is any or no amino acid
  Variant (219)..(219): Xaa in position 219 is any amino acid
  Variant (222)..(222): Xaa in position 222 is any amino acid
  Variant (224)..(224): Xaa in position 224 is any amino acid
  Variant (226)..(226): Xaa in position 226 is any amino acid
  Variant (228)..(228): Xaa in position 228 is any amino acid
  Variant (231)..(232): Xaa in position 231 to 232 is any amino acid
  Variant (235)..(239): Xaa in position 235 to 239 is any amino acid
  Variant (241)..(241): Xaa in position 241 is any amino acid
  Variant (243)..(243): Xaa in position 243 is any amino acid
  Variant (245)..(245): Xaa in position 245 is any amino acid
  Variant (248)..(248): Xaa in position 248 is any amino acid
  Variant (249)..(251): Xaa in position 249 to 251 is any or no amino acid
  Variant (255)..(255): Xaa in position 255 is any amino acid
  Variant (257)..(259): Xaa in position 257 to 259 is any amino acid
  Variant (261)..(263): Xaa in position 261 to 263 is any amino acid
  Variant (265)..(274): Xaa in position 265 to 274 is any amino acid
  Variant (275)..(278): Xaa in position 275 to 278 is any or no amino acid
  Variant (280)..(280): Xaa in position 280 is any amino acid
  Variant (283)..(300): Xaa in position 283 to 300 is any amino acid
  Variant (301)..(312): Xaa in position 301 to 312 is any or no amino acid
  Variant (314)..(364): Xaa in position 314 to 364 is any amino acid
  Variant (365)..(404): Xaa in position 365 to 404 is any or no amino acid
  Variant (406)..(409): Xaa in position 406 to 409 is any amino acid
  Variant (412)..(415): Xaa in position 412 to 415 is any amino acid
  Variant (416)..(417): Xaa in position 416 to 417 is any or no amino acid
  Variant (422)..(423): Xaa in position 422 to 423 is any amino acid
  Variant (425)..(438): Xaa in position 425 to 438 is any amino acid
  Variant (439)..(441): Xaa in position 439 to 441 is any or no amino acid
  Variant (443)..(443): Xaa in position 443 is any amino acid
  Variant (444)..(450): Xaa in position 444 to 450 is any or no amino acid
  Variant (452)..(453): Xaa in position 452 to 453 is any amino acid
  Variant (455)..(455): Xaa in position 455 is any amino acid
LXXXXXXXXXXXXXXXXXXXXXXXRXXXXPXTRXRXXXXXXXXXXXXXXXXXXXXXXXXXYYXQRXXXXXGXLXXXEXTXXXXXXXXXXXXXXXXXPGXXXXXXQXXXWXXXXXXVHXXGXXXXXXXQXWHXGRXXXXXXXXXXXXXXXXXXXXXXXXXXXXXXXXXXXXXXXXXXXXXXXXXXXXXXPXXLXXXEIXXXXXXXXXXAXXXXXXAGFDXVEXHXAXGXYLXXQFXXXXXNXRXDXYGXXXXENRXRXXXEXXXAXXXXXXXXXXXXXXRXSPXXXXXXXXXXXXXXXXXXXXXXXXXXXXXXLXXXXXXXXXXXXXXXXXXXXXXXXXXXXXXXXXXXXXXXXXXXXXXXXXXXXXXXXXXXXXXXXXXXXXXXXXXXXXXXXXXXXXXXXXXXDXXXXGRXXXXXXNPDLXXRXXXXXXXXXXXXXXXXXYXXXXXXXXGXXYXD

SEQ ID NO: 30037 - protein, 14 aa, Artificial sequence
  protein pattern
  Variant (4)..(4): Xaa in position 4 is any amino acid
  Variant (5)..(5): Xaa in position 5 is Ile or Val
  Variant (7)..(7): Xaa in position 7 is Ile, Leu or Val
  Variant (9)..(9): Xaa in position 9 is Ala, Cys, Gly or Ser
  Variant (10)..(10): Xaa in position 10 is Ala, Gly or Ser
  Variant (11)..(11): Xaa in position 11 is any amino acid
  Variant (12)..(12): Xaa in position 12 is Gly, Ser or Thr
  Variant (13)..(13): Xaa in position 13 is Phe or Tyr
  Variant (14)..(14): Xaa in position 14 is Phe, Ile or Leu
GFDXXEXHXXXXXX

SEQ ID NO: 30038 - protein, 11 aa, Artificial sequence
  protein pattern
  Variant (4)..(4): Xaa in position 4 is Asp, Gly, Asn, Pro, Ser or Thr
  Variant (5)..(6): Xaa in position 5 to 6 is any amino acid
  Variant (9)..(9): Xaa in position 9 is any amino acid
  Variant (10)..(10): Xaa in position 10 is Lys or Arg
  Variant (11)..(11): Xaa in position 11 is Phe, Ile or Leu
YGGXXXNRXXX

SEQ ID NO: 30039 - DNA, 1503 bp, Azotobacter vinelandii
  CDS (1)..(1503): transl_table=11
atgagcgaacaaccgctgaaccagcatgccctccacgaggaagaaaacaagctgatcgccctgcgcaaggagaaactcgccgccgagcgcgcgaaaggcaatgccttccccaacgacttccgccgcgacagctactgcgccgacctgcagaagcgctatgccgaggcgggcaaggaggagctggaagcggccgcgatcccggtcaaagtggccgggcgcatcatgctcaaccgcggcgccttcatggtcatccaggacatgaccgggcgcatccaggtctacgtcgaccgcaagggcctgccggccgagacgctggaggcggtcaagcactgggacctgggcgacatcatcgccgccgagggcaccctggcgcgctccggcaagggcgatctctacgtgcacatgagcacggtgcgcctgctgaccaagtcgctgcgcccgctgccggacaagcatcatggcctgaccgacaccgagcagcgctaccgccagcgttacgtcgacctgatggtcaacgaggaaacccgccacaccttccgcgtgcgttcgcagatcatcgcccacattcgcaggttcctcgccgagcgcgacttcctcgaggtggaaacgccgatgctccaggtcatccccggcggcgccgcggccaagcccttccagacccaccacaacgcgctggacctgccgatgttcctgcgcatcgcacccgagctctacctcaagcgcctggtggtcggcggcttcgagcgggtcttcgagatcaaccgcaacttccgcaacgaaggcgtctcgacccgccacaaccccgaattcaccatgctcgagttctaccaggcctacgccgactacgaggacaacatggacctcaccgagcagttgttccgcgaactggcgcaactggtgctggggaccaccgacgtgccctaccagggtaaggtgttccacttcggcgagcccttcgcccgcctgtcggtgttcgactcgatcctctactacaacccggaagtctccgccgcggacctgcgcgacatcgagaaatgccgcgccatcgccaggaaggccggcgccgacgtcaagggtttcgagggactgggcaagctgcagacgatgatcttcgaggagttggtcgagcaccgcctggaacagccgaccttcatcacccgctatcccttcgaggtttcgccgctggcgcggcgcagcgacgacgatccgagcgtcaccgaccgcttcgagctgttcatcggcggccgcgagatcgccaacgcctactccgagctgaacgacgccgaggaccaggccgagcgcttcatgcagcaggtccgggacaaggatgccggcgatgacgaggccatgcacttcgacgccgacttcgtgcgcgccctggaatacggcatgccgccgaccgccggcgaaggcatcggcatcgaccgtctggtgatgctgctgaccgattcgccgtcgatccgcgacgtgatccttttcccgcacatgcgtccggaagtctga

SEQ ID NO: 30040 - protein, 500 aa, Azotobacter vinelandii
MSEQPLNQHALHEEENKLIALRKEKLAAERAKGNAFPNDFRRDSYCADLQKRYAEAGKEELEAAAIPVKVAGRIMLNRGAFMVIQDMTGRIQVYVDRKGLPAETLEAVKHWDLGDIIAAEGTLARSGKGDLYVHMSTVRLLTKSLRPLPDKHHGLTDTEQRYRQRYVDLMVNEETRHTFRVRSQIIAHIRRFLAERDFLEVETPMLQVIPGGAAAKPFQTHHNALDLPMFLRIAPELYLKRLVVGGFERVFEINRNFRNEGVSTRHNPEFTMLEFYQAYADYEDNMDLTEQLFRELAQLVLGTTDVPYQGKVFHFGEPFARLSVFDSILYYNPEVSAADLRDIEKCRAIARKAGADVKGFEGLGKLQTMIFEELVEHRLEQPTFITRYPFEVSPLARRSDDDPSVTDRFELFIGGREIANAYSELNDAEDQAERFMQQVRDKDAGDDEAMHFDADFVRALEYGMPPTAGEGIGIDRLVMLLTDSPSIRDVILFPHMRPEV

SEQ ID NO: 30041 - DNA, 1512 bp, Idiomarina loihiensis L2TR
  CDS (1)..(1512): transl_table=11
atgactgataaatcgcaggcacctgaagtagacgtaaacgaacagatcgcgcagcgaaaggcgaaactgtcggcgcttcgcgataagggtatcgcattcccgaacgatttccgtcgggactcgttagctgctgacttacacgctgaatacgataatctgagcaaagaagagctggcggaaaaaggcattcgcgtgaaagttgccggccgtatgatgacccgccgtattatggggaaagccagtttcgcaaccatccaggatatgagcggcaaaattcaactgtatgttgcccgcgacaatctgcctgaaggttattacaacacggaatttaaaaaatgggatttaggcgatattctcggcgcctctggcaccttgtttattaccggaaccggtgagttaagcgtgcaagttgacgaagtacgtttgctgactaaagcactgcgtcctttgccggataaattccatggcttgtcagatcaggaaatgcgctatcgtcagcgttatctggacctgattaccaacgaagagtctcgcagtactttcatggctcgctctaaaatcattgactatattcgtcgttttttaagtgaccgtcagtttctggaagttgaaactcctatgatgcaggcgattccgggcggcgccgcagctcgtcctttcagcacgcaccataacgcactggatatggaactgtttttacgtattgcaccagaactttacctgaaacgtttagtcgttggtggttttgagaaggtgttcgaaattaaccgtaatttccgtaatgaaggcctgtcaacgcgccacaaccctgagttcactatgttggagttctactgggcgtacgcggattatcacgacttaatggatttaaccgagcagatgttacgtggtgcggctgagtcggtcttaggctctgctcagtttaccagccagggcgtggattatgatttcggtaagccgtttgagcgcatgacagtgttggaagctattgttaagtacatgccggaagtgagccttgagcagcttaatgacatgaatacagcaactgaaattgccgagcaggttggtgtcagtgttaagccgtcatggggcttaggtaaagttcagatcgaaatttttgagactgttgctgagcatcgtttaattcagcctacctttattactgcgtacccggctgaagtttcaccgttggctcgtcgtcacgacgacaatccgtttgtgactgatcgttttgaattttttgccggtggtcgtgagttggcgaatggtttctcggagcttaacgatgctgaagatcaggctgaacgttttcgcgagcaagttgaacagaaagaagcgggcgatgatgaagccatgttctacgacgaagattatgtcaccgcactggaacacggtatgccgccaacagccggtcagggcattggtattgaccgtctggtaatgttgctaacggattctgcgtctattcgcgacgtattattgttcccgcatatgcgcccaaaagcggattaa

SEQ ID NO: 30042 - protein, 503 aa, Idiomarina loihiensis L2TR
MTDKSQAPEVDVNEQIAQRKAKLSALRDKGIAFPNDFRRDSLAADLHAEYDNLSKEELAEKGIRVKVAGRMMTRRIMGKASFATIQDMSGKIQLYVARDNLPEGYYNTEFKKWDLGDILGASGTLFITGTGELSVQVDEVRLLTKALRPLPDKFHGLSDQEMRYRQRYLDLITNEESRSTFMARSKIIDYIRRFLSDRQFLEVETPMMQAIPGGAAARPFSTHHNALDMELFLRIAPELYLKRLVVGGFEKVFEINRNFRNEGLSTRHNPEFTMLEFYWAYADYHDLMDLTEQMLRGAAESVLGSAQFTSQGVDYDFGKPFERMTVLEAIVKYMPEVSLEQLNDMNTATEIAEQVGVSVKPSWGLGKVQIEIFETVAEHRLIQPTFITAYPAEVSPLARRHDDNPFVTDRFEFFAGGRELANGFSELNDAEDQAERFREQVEQKEAGDDEAMFYDEDYVTALEHGMPPTAGQGIGIDRLVMLLTDSASIRDVLLFPHMRPKAD

SEQ ID NO: 30043 - DNA, 1506 bp, Pseudomonas aeruginosa
  CDS (1)..(1506): transl_table=11
atgagcgaccaacaactcgaccagcacgaactgcaacaggaagaaaacaagctgatcgcccagcgcaaggaaaaacttgccgccgtgcgcgaagcccgggccatcgccttccccaacgacttccgccgcgacgcctacttcgcggacctgcagaaacagtacgccgacaagaccaaggaagagctggaagccgcagcgatcccggtcaaggtggccggtcggatcatgctcaaccgcggttccttcatcgtcctccaggacagcagcgagcgcctgcaggtctacgtcaaccgcaagaccctgccggaagaaaccctggccgagatcaagacctgggacctgggcgacatcatcggcgccgaaggcgtgctggcccgctcgggcaagggcgacctgtacgtcgacatgaccagcgtgcgcctgctgaccaagtcgctgcgtccgctgccggacaagcaccatggcctgaccgacaccgagcagcgctaccgccagcgctacgtcgacctgatggtcaacgaggaaacccgccacaccttccgcgtgcgttcccaggtcatcgcccacatccgccgtttcctcagcgagcgcggtttcctcgaagtggagaccccgatgctgcagaccatccccggcggcgccgcggccaagccgttcgagacccatcacaacgcgctggacatggccatgttcctgcgcatcgccccggagctgtacctcaagcgcctggtggtcggcggtttcgagaaggtcttcgagatcaaccgcaacttccgtaacgaaggcgtctcgacccggcacaaccccgagttcaccatgctcgagttctaccaggcctacgccgactacgaagacaacatggacctgaccgaggaactgttccgcgaactggcccagtcggtactcggtaccaccgacgtgccctacggcgacaaggtcttccacttcggcgagccgttcgtgcgcctgtcggtgttcgattcgatcctcaagtacaacccggagatcaccgccgccgacctcaacgacgtcgagaaggcgcgggccatcgccaagaaggccggcgccaaggtcctcggccacgaaggcctgggcaagctgcaggtgatgattttcgaggaactggtggagcacaagctggagcagccgcacttcatcacccgctaccccttcgaggtttcgccgctggcccgccgcaacgacgaagacccgagcgtcaccgaccgcttcgagctgttcatcggcggccgcgagatcgccaatgcctattccgagctgaacgacgccgaggaccaggccgagcgcttcatgttgcaggtcaaggagaaggacgccggcgacgacgaggcgatgcactacgacgccgacttcatcaatgccctggaatacggcatgccgccgaccgccggcgaaggcatcggcatcgaccgcctggtgatgctgctgaccaactcgccgtcgatccgcgacgtgatcctgttcccgcacatgcgcccgcaggcctga

SEQ ID NO: 30044 - protein, 501 aa, Pseudomonas aeruginosa
MSDQQLDQHELQQEENKLIAQRKEKLAAVREARAIAFPNDFRRDAYFADLQKQYADKTKEELEAAAIPVKVAGRIMLNRGSFIVLQDSSERLQVYVNRKTLPEETLAEIKTWDLGDIIGAEGVLARSGKGDLYVDMTSVRLLTKSLRPLPDKHHGLTDTEQRYRQRYVDLMVNEETRHTFRVRSQVIAHIRRFLSERGFLEVETPMLQTIPGGAAAKPFETHHNALDMAMFLRIAPELYLKRLVVGGFEKVFEINRNFRNEGVSTRHNPEFTMLEFYQAYADYEDNMDLTEELFRELAQSVLGTTDVPYGDKVFHFGEPFVRLSVFDSILKYNPEITAADLNDVEKARAIAKKAGAKVLGHEGLGKLQVMIFEELVEHKLEQPHFITRYPFEVSPLARRNDEDPSVTDRFELFIGGREIANAYSELNDAEDQAERFMLQVKEKDAGDDEAMHYDADFINALEYGMPPTAGEGIGIDRLVMLLTNSPSIRDVILFPHMRPQA

SEQ ID NO: 30045 - DNA, 1518 bp, Klebsiella pneumoniae subsp. pneumoniae MGH 78578
  CDS (1)..(1518): transl_table=11
atgtctgaacaacaagcacaaggtgccgatgaggccattgaccttaataatgaactgaaagctcgtcgcgaaaaactggctgcgctgcgtgagcagggcgtagctttccccaacgatttccgtcgcgatcatacctctgaccaattgcatgctgaattcgatgcgaaggacaacgatgaactcgcttccctgaacgttgaagttgcggtggctggtcggatgatgacccgtcgcgtgatgggcaaagcctccttcgtcaccctccaggacgtcggcggccgcattcagctgtacgtggcgcgcgatgacctgccggaaggcgtctacaacgaacagtttaagaaatgggacctcggcgatatcatcgccgcccgcggcaagctgttcaaaacgcaaaccggcgaactctcgatccactgcaccgagctgcgcctgctgaccaaagccctgcgcccgctgccggataaattccacggcctgcaggatcaggaagttcgctatcgccagcgctatctggatctgatcgccaacgaagagtcgcgtcatacgttccgtatccgttcgcagatcctcgccaccatgcgccagttcatggtggcccgcggctttatggaagtcgaaacgccgatgatgcaggtgatccctggcggtgcgtcagcccgtccgttcattacccatcacaacgccctggatctcgatatgtacctgcgcatcgcgccggaactgtatctgaaacgtctggtggttggcggttttgaacgcgtgtttgaaatcaaccgtaacttccgcaacgaagggatctcggtacgccataacccagagttcaccatgatggaactatatatggcgtatgcggactacaaagacctgatcgaactgaccgagtcgctgttccgcaccctggcgcagacggtgctgggcaaaaccgaagtgccgtatggcgaccaggtgtttgatttcggcaagccgtttgaaaaactgaccatgcgggaagcgatcaagaaacaccgtccggaaaccaacatggcggatctggataacttcgacgcggcgaaagcgctggcggaatctatcggtattcaggtagagaaaagctgggggctgggacgcatagttaccgaaatctttgacgaagtggcggaagcgcatctgattcagccgaccttcatcaccgaatacccggcggaagtttctccgctggcgcgccgtaacgacgtcaacccggaaatcactgaccgctttgaattcttcatcggcggccgcgaaatcggtaacggtttcagcgagctgaacgatgccgaagaccaggcgcagcgcttccaggatcaggtgaacgccaaagcggcgggcgatgacgaagcgatgttctacgacgaagactacgtgaccgccctcgagtacggcctgccgccgaccgccggtctgggtatcggtatcgaccgcatggtgatgctgtttaccaacagccataccatccgcgacgtgatcctcttcccggccatgcgtccgcagaagtaa

SEQ ID NO: 30046 - protein, 505 aa, Klebsiella pneumoniae subsp. pneumoniae MGH 78578
MSEQQAQGADEAIDLNNELKARREKLAALREQGVAFPNDFRRDHTSDQLHAEFDAKDNDELASLNVEVAVAGRMMTRRVMGKASFVTLQDVGGRIQLYVARDDLPEGVYNEQFKKWDLGDIIAARGKLFKTQTGELSIHCTELRLLTKALRPLPDKFHGLQDQEVRYRQRYLDLIANEESRHTFRIRSQILATMRQFMVARGFMEVETPMMQVIPGGASARPFITHHNALDLDMYLRIAPELYLKRLVVGGFERVFEINRNFRNEGISVRHNPEFTMMELYMAYADYKDLIELTESLFRTLAQTVLGKTEVPYGDQVFDFGKPFEKLTMREAIKKHRPETNMADLDNFDAAKALAESIGIQVEKSWGLGRIVTEIFDEVAEAHLIQPTFITEYPAEVSPLARRNDVNPEITDRFEFFIGGREIGNGFSELNDAEDQAQRFQDQVNAKAAGDDEAMFYDEDYVTALEYGLPPTAGLGIGIDRMVMLFTNSHTIRDVILFPAMRPQK

SEQ ID NO: 30047 - DNA, 1809 bp, Arabidopsis thaliana
  CDS (1)..(1809)
atggaggcacttaaggtatggagtctaacggcgacgccactgaaacaattactccgtctatcctcttcttctacacgtctcgccaccacaatatatggacgaagatcctaccacttatcacctgcgctacgatgtgcctccgcagcttcttcttcttcttccagtgccacgacggctgaaacttctaaaccctccggccgcaatcgccggtctgcgtcatcttccaattccacctctgatcgtgaagctatccgctccattcgccttaaaaaggttgaagaattgagaggccaaggtcttgaaccttatgcttataagtgggaaaaatcccacagtgcaaatcagcttcaagagatatataagcatttagctaacggtgaagaatcagacaatgagattgattgtgtttctatagctggtagagtcgttgctcgtagagcctttggaaaacttgcattcttgactctcagggatgactctggaactattcagctttactgtgagaaggaaagactttcagatgatcagtttgaacagttgaagcaatttatcgacattggtgatattttgggtgctagtggctcgatgaagaggactgagaaaggggagctttctatatgtgtgaattctttttcaattctcacaaagtctctccttccacttccagacaaatatcatggtctaactgatattgataaacgttaccgccaacggtatgttgatatgattgctaatcctgaagtggctgatgtgttccggagaagggcaaaaatcgtttcagagatacgcaagacagttgagtcttttggatatttggaggttgaaactccagttcttcagggagcagctggtggagctgaagcaagaccttttgtaacgtttcataactcacttgggagggatctctacctgaggattgcaactgagcttcacttgaagagaatgctagttggtgggtttgagaaagtgtatgaaattggtcgtatatttagaaacgaaggcatttcaacacgtcacaatcctgaattcacgaccatcgagatgtatgaagcttattcggactaccatagcatgatggacatggcagaattaattgtcactcaatgttcaatggcagttaatgggaagctaacaattgattaccagggaacagagatctgccttgagcggccttggagaagagaaaccatgcataatctcgttaaagagataacaggaatcaatttcagtgagctaggggaagatctcggaaatgccaaagacacagttctgctcgcactccaggacgtgcttgagcccaaggacaaatctggaattagagcttgctcttccctaggccatcttcttaatgagatttttgaagttgttgtagagccaaagcttgtgcagcccacatttgtcttggactacccaatcgagatatctcctttggccaagccacatcgcggcaatgccggtttgactgaaagatttgagctgttcatctgtggtcgtgaaatggcaaacgcattctctgaattgactgatcccgtggaccagaggacacggttggaagagcaagtaaggcagcataacgcaaagagagcagaggctgttcgggaatctcctgaaccaaacgcaaagaaagatgatgatgatgatgagtcatacgaagtgacccttgacgaagactttctcactgccttggaatacggaatgcctccggcttcgggaatggggcttggaattgacaggctggtgatgctgttgacgaactccgcgagtataagagacgtcattgcttttcctgttctgaaacttcagcagtaa

SEQ ID NO: 30048 - protein, 602 aa, Arabidopsis thaliana
MEALKVWSLTATPLKQLLRLSSSSTRLATTIYGRRSYHLSPALRCASAASSSSSSATTAETSKPSGRNRRSASSSNSTSDREAIRSIRLKKVEELRGQGLEPYAYKWEKSHSANQLQEIYKHLANGEESDNEIDCVSIAGRVVARRAFGKLAFLTLRDDSGTIQLYCEKERLSDDQFEQLKQFIDIGDILGASGSMKRTEKGELSICVNSFSILTKSLLPLPDKYHGLTDIDKRYRQRYVDMIANPEVADVFRRRAKIVSEIRKTVESFGYLEVETPVLQGAAGGAEARPFVTFHNSLGRDLYLRIATELHLKRMLVGGFEKVYEIGRIFRNEGISTRHNPEFTTIEMYEAYSDYHSMMDMAELIVTQCSMAVNGKLTIDYQGTEICLERPWRRETMHNLVKEITGINFSELGEDLGNAKDTVLLALQDVLEPKDKSGIRACSSLGHLLNEIFEVVVEPKLVQPTFVLDYPIEISPLAKPHRGNAGLTERFELFICGREMANAFSELTDPVDQRTRLEEQVRQHNAKRAEAVRESPEPNAKKDDDDDESYEVTLDEDFLTALEYGMPPASGMGLGIDRLVMLLTNSASIRDVIAFPVLKLQQ

SEQ ID NO: 30049 - DNA, 1539 bp, Vibrio cholerae O1 biovar eltor str. N16961
  CDS (1)..(1539): transl_table=11
atgcaaatgactgatgctgttcaaaacgagattaatcaagagcaaatcgcgcaagaagaaaacaaactgattgcagagcgtcgcagcaagttggatcacatccgcaagaactgtaaagcaaacgggcacccaaactcgttccgtcgcgacagcctagcgggtgatctgcagaagaagttcggtgaaaagagtaaggaagaactggaagcgctcaatcacgtggtgtctatcgctggtcgtgtgatggcaaaacgtggcccattcttggtgattcaagaaacctctggccgcattcaggcttatgcatcgaaagaagtgcaacaagagctgaaagataaataccaaggtttggatatcggtgacatcatcggtgtgcaaggtgccctgcacaaatccggtaaaggcgatttgtacgtcaacatggagcaattccaactgctgaccaaagcactgcgcccgctgccagagaaattccacggtctgactgaccaagaaatgcgttaccgccagcgttacgttgacctgatcgtcaacgaaaactctcgcaacgctttcattgtacgttctaaggtgatgtcagccattcgtaacttcatgatctcaaaacagttcatggaagtggaaacgccgatgatgcacgtgatccctggtggtgctagtgcgcgcccattcatcacgcaccacaacgcgctcgacatgccgatgtacctgcgtatcgcgcctgagctgtacctgaagcgtctggttgtcggtggttttgatcgtgtattcgaaatcaaccgtaacttccgtaacgaaggtctttctccacgtcacaacccagaattcaccatgatggaattctatatggcgtacgcggactacaaagatctgatggatctgacggaagagctgctcagctctgtggcgttagaagttctcggttcaacctccatgccttacggtgagcataccgttgaatttggtggtaaatacgcgcgtatgagcatgtttgatgcgatcaagcactacaacccaaatcacgcgcagatccaagctctgaccgaagaagacatccaaaaccgtgacctcatggtttctatcgcgaaatccgttcacgttgatgtggagcctttctggacctgtggtcagcttctcgaagagatctttggtgaaacggctgagccgaaactgatgcagccaactttcatcactggctacccagcagatatctctccactggcacgtcgtagcgatgacaacccgttcttcactgaccgctttgagttcttcatcggtggccgtgaagtggcaaacggcttctcagagctgaacgatgctgaagaccaagatgcgcgtttcaaagcccaagtggaagcgaaagagtctggtgatgatgaagccatgttctatgatgccgactacattaccgctttagagcacggcttaccgccaacagcgggtcaaggtattggtattgatcgtctggttatgctcctgaccaatactcacactatccgtgatgtgattttgttcccagcgatgcgccctcagcaataa

SEQ ID NO: 30050 - protein, 512 aa, Vibrio cholerae O1 biovar eltor str. N16961
MQMTDAVQNEINQEQIAQEENKLIAERRSKLDHIRKNCKANGHPNSFRRDSLAGDLQKKFGEKSKEELEALNHVVSIAGRVMAKRGPFLVIQETSGRIQAYASKEVQQELKDKYQGLDIGDIIGVQGALHKSGKGDLYVNMEQFQLLTKALRPLPEKFHGLTDQEMRYRQRYVDLIVNENSRNAFIVRSKVMSAIRNFMISKQFMEVETPMMHVIPGGASARPFITHHNALDMPMYLRIAPELYLKRLVVGGFDRVFEINRNFRNEGLSPRHNPEFTMMEFYMAYADYKDLMDLTEELLSSVALEVLGSTSMPYGEHTVEFGGKYARMSMFDAIKHYNPNHAQIQALTEEDIQNRDLMVSIAKSVHVDVEPFWTCGQLLEEIFGETAEPKLMQPTFITGYPADISPLARRSDDNPFFTDRFEFFIGGREVANGFSELNDAEDQDARFKAQVEAKESGDDEAMFYDADYITALEHGLPPTAGQGIGIDRLVMLLTNTHTIRDVILFPAMRPQQ

SEQ ID NO: 30051 - DNA, 1584 bp, Chlamydophila pneumoniae J138
  CDS (1)..(1584): transl_table=11
atgacggcgagagcagaatatttagaccatgaggattttttatataggagtcacaaacttcaggaactttctgagttgggtgtagtcctttatccttacgagtttcctggagttttttcatgcgaagatattaaaaaaacgtttgctagtcaagagttagggaatagtgaagctgctatgagtaggtccactcctagagtgcgttttgctgggcgtttggttcttttccgtgcgatggggaaaaatgcttttgggcaaattttagaccataatcaaaccatccaagtgatgttcaaccgtgagtttacctccgtacacggactttctgaagatgctgagattactccgattaagtttatagaaaaaaagttagatttaggagatatccttgggatcgatggctatttatttttcacccattccggagagcttaccgttcttgtagagactgtaaccctactttgtaaatccttactttcgttgcctgataagcacgcaggtttgagtgacaaagaagtccgctaccgcaagcgttggttagatctaatttcctcaagagaggttagcgatacctttgtgaaaagaagctatattattaagcttatccgtaattatatggatgctcatggatttttagaggtagagactcctatattacaaaatatctacgggggagcagaagctaagcctttcacaacaacaatggaagctttacattcggagacgtttttaagaatctccctggaaatcgctttgaagaaaatcctagtaggaggagctcctcgtatttatgaactcggtaaagtcttcagaaacgaaggaatcgatagaacacataatcctgaatttaccatgatagaagcgtatgctgcttacatggactataaagaggtcatggtctttgtagaaaatcttgttgagcatcttgtccgtgctgtaaatcacgacaatacctctctagtctattcttattggaaacatggcccccaagaggtagattttaaagctccttggattcgtatgacaatgaaagaaagtatcgcgacctatgcaggtattgatgttgacgttcacagtgatcagaagcttaaggaaatcttaaagaagaaaactacctttcctgagactgcatttgcgacagcttcccgggggatgttgatagcagccttatttgatgaacttgtctctgataatttaatagctcctcaccacattacagatcaccctgtagagacaaccccgttatgtaaaactctgcgttccggagataccgcatttgtagagcgcttcgaaagtttttgcttagggaaagagttgtgtaatgcctattcggaactcaatgatcctatccgtcaaagagaactcttggagcaacagcatactaaaaaagaactccttccggatagtgagtgtcatcctatcgatgaagagtttttagaagctctgtgtcagggaatgccccctgcaggaggatttggtataggtgtcgatagacttgttatgattcttacaaatgctgcatctatacgcgatgtgctgtatttccctgtaatgcggcgcttcgatgcagagaagacgaattaa

SEQ ID NO: 30052 - protein, 527 aa, Chlamydophila pneumoniae J138
MTARAEYLDHEDFLYRSHKLQELSELGVVLYPYEFPGVFSCEDIKKTFASQELGNSEAAMSRSTPRVRFAGRLVLFRAMGKNAFGQILDHNQTIQVMFNREFTSVHGLSEDAEITPIKFIEKKLDLGDILGIDGYLFFTHSGELTVLVETVTLLCKSLLSLPDKHAGLSDKEVRYRKRWLDLISSREVSDTFVKRSYIIKLIRNYMDAHGFLEVETPILQNIYGGAEAKPFTTTMEALHSETFLRISLEIALKKILVGGAPRIYELGKVFRNEGIDRTHNPEFTMIEAYAAYMDYKEVMVFVENLVEHLVRAVNHDNTSLVYSYWKHGPQEVDFKAPWIRMTMKESIATYAGIDVDVHSDQKLKEILKKKTTFPETAFATASRGMLIAALFDELVSDNLIAPHHITDHPVETTPLCKTLRSGDTAFVERFESFCLGKELCNAYSELNDPIRQRELLEQQHTKKELLPDSECHPIDEEFLEALCQGMPPAGGFGIGVDRLVMILTNAASIRDVLYFPVMRRFDAEKTN

SEQ ID NO: 30053 - DNA, 1533 bp, Mycoplasma pulmonis UAB CTIP
  CDS (1)..(1533): transl_table=4
ttgagtagacatagtatttatttatacttgccaaagtatataattttaaggattaaaatgaacgataatattaaacttacagaacaagaaattattagacgagaaaaactaaaaaaatatgaatctttaggtattaaaactttcaaaaaatttgatcatgaaaagatcaatatttatagcaatgaaattgttgaaaaatacaatcattttagtaaagatgaacttttagaaaaacaaataaaattaatcattgctggaagaattttaactcaaagaggaccttttattgttatccaagatactaatggaaaaattcaactctatgtagataaaaaagagcttgaagagcaaaaagaaactcttgctcttcttgatataggtgacattatttatgttaaaggtacactaatgaaaactatgaaaggtgagttaacaattaaggttaatttctttgatcttttaacaaaaggtctaactcctcttgctgaaaaatatcatggattagtagatgttgaagagcgttatagaaaaagatatttggatttgatttccaatccaaatatcaaagaaattttttgaacaagaactaaagtaatttcaaaaattagaaagttctttgatgaacaaaatttcatggaagttgaaactcctatgcttcattcaattttaggaggagcaaatgctcgaccttttaagacttatcataattcactaagctcaagttttaacttaagaatagcaactgaattacctttaaaaaaacttttagttggtggaattgatagagtctatgaaataggaagaatttttagaaatgaaggaatagacacaactcataatcctgaatttacatcaattgagttttatcaagcttattcaaatttagaaatcatgatggagcaaactgaaaatctaattaaatttatagccaaagaattaggactttcaaaaattaaaaaccatgatgttgaaattgatcttttagctgattttaaaaaaataaatatggttgatgctgtctcagaggcaacaaaagttgattttagaaacattgatttagacaaagctatagaagtagctggtcgctataaagtaaaagttgaaaaatactttaaagttggccacatcattaatgaattgtttgaactattaattgaaaaaactctaatccaaccaacttttgtaactggacatcctattgaaatttctccattggctgccacttcagaagatgagcgttttactgaaagagctgagcttttcattaatacaaaagagtatgcaaacatgtttacagagttaaatgatcctcttgatcaaagaagaagatttgaagctcaattagaagaaaaagaaagtggtaatgaagaagctagtgaaattgatgagagtttcttaagcgctttagaatacggacttcctccagctggaggttgcggtattggtattgaccgtcttgtaatgcttttaactgaaaaagagtcaattagagaagttattctttttccaactttaaagaaaaaacaagtttaa

SEQ ID NO: 30054 - protein, 510 aa, Mycoplasma pulmonis UAB CTIP
MSRHSIYLYLPKYIILRIKMNDNIKLTEQEIIRREKLKKYESLGIKTFKKFDHEKINIYSNEIVEKYNHFSKDELLEKQIKLIIAGRILTQRGPFIVIQDTNGKIQLYVDKKELEEQKETLALLDIGDIIYVKGTLMKTMKGELTIKVNFFDLLTKGLTPLAEKYHGLVDVEERYRKRYLDLISNPNIKEIFWTRTKVISKIRKFFDEQNFMEVETPMLHSILGGANARPFKTYHNSLSSSFNLRIATELPLKKLLVGGIDRVYEIGRIFRNEGIDTTHNPEFTSIEFYQAYSNLEIMMEQTENLIKFIAKELGLSKIKNHDVEIDLLADFKKINMVDAVSEATKVDFRNIDLDKAIEVAGRYKVKVEKYFKVGHIINELFELLIEKTLIQPTFVTGHPIEISPLAATSEDERFTERAELFINTKEYANMFTELNDPLDQRRRFEAQLEEKESGNEEASEIDESFLSALEYGLPPAGGCGIGIDRLVMLLTEKESIREVILFPTLKKKQV

SEQ ID NO: 30055 - DNA, 1725 bp, Drosophila melanogaster
  CDS (1)..(1725)
atggccgctgcaagtggagaactgtccaagaatgagctaaagcgtcgcctgaaggccgagcaaaaggccaaggagaaggctgagaaggcggccgctgcgccggcggaaaatactgctggcaagaagaagagcagtgccgccgaggaggaggagatctcgccgaatgaatactttaagctgcgctccgccgccgttcaggagctgaaacgttcacccgcaacggatccctatccacacaagttccatgtgagtagctcgctggaagacttcattgccaagtacgagaacagcctcaaggagggcgagaccctggagaatgtcaaactgagcgtggctgggcgcgtgcatgccatacgcgagtcgggcgccaagctcattttctacgatctgcgcggcgagggcgtcaaggtgcaggtgatggccagcgctaagtcctacaagtcggaggcggatttcgaaatcgatacgtccaaattgcgacgtggtgatatcatcggcgttgtcggacatcccggcaaaaccaagaagggtgaactgtccgttatgcccagcgagatcaagctgctatcgccctgtctacacatgctgccccatctgcatttcgggttgaaggacaaggagacgcgctaccgccagcgctatcttgatctcattctcaacaacaatgtgcgagagaaattccagatccgtgccaagatcatctcgtacgtgcgtcagttcctggatcgtctgggtttcctggagatcgagacgcccatgatgaacatgatcgccggtggagccactgccaagcccttcgtgacgcatcacaatgacctcaagatggatctgttcatgcgcattgctccggagctgtatcacaagatgctggtggtgggtggactcgatcgtgtgtacgagatcggacggcagttccgcaacgagggcatcgacctcacccacaatcctgaattcaccacgtgcgagttctacatggcgtatgccgactacgctgacattatggatatcaccgagcagttggtctcgggaatggtgaaagcgatccgtggctcctacaaggtcatctatcatccggagggtccagagggacctgagcaagaacttgactttacgccgccctttaagcgcgtatccatgatcaaaacgctggaagagaagctgcaggtgaagttccccgcggccgacaccttcaattcgccagagacgaatcagttcctgtctcagctgtgcgctaagcaccaggtcgagtgcccagctccgcgcaccactgcccgcctgctggacaagctcgtcggcgaattcatcgaggagttttgcgtgaatccaacgttcatctgtgagcatccgcagatcatgtcgccgctggccaagtaccatcgcagtattcccggcctgacggagcgcttcgaactgtttgtggccaagaaggagatttgcaacgcgtataccgagttgaacgatccggttgtgcagcgcgagcgtttcgagcagcaggccagcgacaaggcggccggcgatgatgaggcccagctggtcgacgagaacttctgcacgtccctggagtacggactgccgcccaccggtggttttggcatgggcatcgatcgcctggccatgttcctcacggactccaacaacatcaaggaggttctgctgttccccgccatgaaaccggaggatgccaaccgcacggcagcggaaactgctcccaccgcacagcagtag

SEQ ID NO: 30056 - protein, 574 aa, Drosophila melanogaster
MAAASGELSKNELKRRLKAEQKAKEKAEKAAAAPAENTAGKKKSSAAEEEEISPNEYFKLRSAAVQELKRSPATDPYPHKFHVSSSLEDFIAKYENSLKEGETLENVKLSVAGRVHAIRESGAKLIFYDLRGEGVKVQVMASAKSYKSEADFEIDTSKLRRGDIIGVVGHPGKTKKGELSVMPSEIKLLSPCLHMLPHLHFGLKDKETRYRQRYLDLILNNNVREKFQIRAKIISYVRQFLDRLGFLEIETPMMNMIAGGATAKPFVTHHNDLKMDLFMRIAPELYHKMLVVGGLDRVYEIGRQFRNEGIDLTHNPEFTTCEFYMAYADYADIMDITEQLVSGMVKAIRGSYKVIYHPEGPEGPEQELDFTPPFKRVSMIKTLEEKLQVKFPAADTFNSPETNQFLSQLCAKHQVECPAPRTTARLLDKLVGEFIEEFCVNPTFICEHPQIMSPLAKYHRSIPGLTERFELFVAKKEICNAYTELNDPVVQRERFEQQASDKAAGDDEAQLVDENFCTSLEYGLPPTGGFGMGIDRLAMFLTDSNNIKEVLLFPAMKPEDANRTAAETAPTAQQ

SEQ ID NO: 30057 - DNA, 1596 bp, Schizosaccharomyces pombe 972h-
  CDS (1)..(1596)
atgatttcacgaggtcttttatccaaagggatcttatccattattaaaagaaaaaatacaggaaatttaatcccccatgtttattatagtgaataccatgcagacatcgaagagagaagaaaagcgctaggacgactgggaatcagcttgtatccgtcagttacttcagatgcctcaacgactacaattcctgtaataatcgagaaatggaggaacaagattaccaagtctgagatcgcaatggtcaggtatacggtgtgtggtcgaatttcaagcatccgttattcaggttccaaacttgcattttttgatgtcctttatggaaataaaaagcttcaggttgtttttaataaaaagaatattggcacagaagaagaaatgaagggaaagtttattcctcgattaaaagctctccaaaaaggagattgcattcaatgttctggcaacgttggaagaagtggaagtggagagctttccatatatgctacagaactaccaaaattgttatctccatgtctccatccaattcccgttaaactaacgaactacgaaaaaagatttgaaaaacgctttgtcgatatgatgtcaaataccaaatcacttgagttacttgagaagagatatcgaataattgaatccattagaaaattctttagtgaaagaggatttttagaagttgaaacccctattctttcacatcactttggaggtgctactgcgcgaccctttatcactagtgatattcataaactacccttgacactccggtgtgctccagagctatggctcaaacaactagtaatagggggaatgaatcgagttttcgaattaggaaaaaatttccgaaatgaaggtatcgatgctacgcataatcctgagtttactagttgtgaagcctactgcgcatatttaaatttggagggtatgaaaaaacttactgaagagctaattagatttatctgtttaacaattaatggaaacttgcaaataagcggtcaaaccgtagacctagaaaaaggatttgaagtcattgagtttattcctgcattacagaaggagcttaatgtagagctttcccctctagataactctgaaaactgccggaaacagctgatatcaatctttaaacgttgtgaaatcatgctgccaaagacgtgtacagtagctcatttgttggataaacttttcgattctttggtcttaaaatataatacctcttcccctaaatttgtcattaaccatcccgaagtaatgtcacctcttgccaaatcagatatcaaattatacggcgctgtcgagcaacggatttcaaaaagatttgagctttatattggtggctatgaaatatgtaatgcctatgaggaagaaaatgatccagttgctcaatatcataaatttcaagcacaaaaatatgaccgtcttcaactaggagatgatgaaactcccgcgccagactctgattttgtacatgccttggaatacggtttaccacctacagctggatggggaatgggcgttgatagactagtcatgctaatgacaggacagtcaaagatatcggagatccttccatttggatctcttcgatatgtttag

SEQ ID NO: 30058 - protein, 531 aa, Schizosaccharomyces pombe 972h-
MISRGLLSKGILSIIKRKNTGNLIPHVYYSEYHADIEERRKALGRLGISLYPSVTSDASTTTIPVIIEKWRNKITKSEIAMVRYTVCGRISSIRYSGSKLAFFDVLYGNKKLQVVFNKKNIGTEEEMKGKFIPRLKALQKGDCIQCSGNVGRSGSGELSIYATELPKLLSPCLHPIPVKLTNYEKRFEKRFVDMMSNTKSLELLEKRYRIIESIRKFFSERGFLEVETPILSHHFGGATARPFITSDIHKLPLTLRCAPELWLKQLVIGGMNRVFELGKNFRNEGIDATHNPEFTSCEAYCAYLNLEGMKKLTEELIRFICLTINGNLQISGQTVDLEKGFEVIEFIPALQKELNVELSPLDNSENCRKQLISIFKRCEIMLPKTCTVAHLLDKLFDSLVLKYNTSSPKFVINHPEVMSPLAKSDIKLYGAVEQRISKRFELYIGGYEICNAYEEENDPVAQYHKFQAQKYDRLQLGDDETPAPDSDFVHALEYGLPPTAGWGMGVDRLVMLMTGQSKISEILPFGSLRYV

SEQ ID NO: 30059 - DNA, 1776 bp, Schizosaccharomyces pombe 972h-
  CDS (1)..(1776)
atgagtgaggaacaggtgaatggagttacacaggctgtaaaggctttagtccttgatcccgtcactggtgaacaagtctcaaagactgagttaaagaagcgcgaaaaacaacgtgctcgtgaattagctaaagcaaaaaagcaagccgaaaaggctgcgtctgctcctgttgctgctcctaagagctcttcaaagaaggaagaagatttggacccttcccagtactttgaaaatcgttctcgtactatcatggaattacgccaaacgaaggatcctaatccttatccccacaagttccaggtcaccatcaccctccctgaatttatagccaaatatgagggactagctcgtggtgaaactaagcctgaagttgaagttgcagttgccggccgtgttcttgggcttcgtactgctggtaataagctgcgtttctatgaaatccatgctgatgggaaaaagcttcaagttatgtgtcaagcgcaagatgctgacactgtcgactttgctgctcagcatgagcatttaagacgtggtgatattatcggtattcgcggatatcctggtcgttccaaccctaagggacgtgctgatggtgaactttcaatctttgctcgtcaatgcgttttacttagtccttgtttacgcatgcttcctaaagaacattatggtttgaaggatttagaaattcgtcaccgccaacgttatttagaccttattatgaatcgctcaactcgtgaccgttttgttatgcgtagccgtatcattcaatacatccgtcactttttcgatagccgtgactttatggaggtggagactcctatgatgaacatgattgctggtggtgctactgccaaaccttttgttactcatcataatgatttagatatggatttgtacatgcgtatcgctcccgaactgtatcttaaaatgcttgttgtaggtggtttggatcgggtttacgaaattggccgtcaatttcgtaacgaaggtgccgacttgacccataacccagaattcacatctattgaattttatcaagcctatgctgattactatgatctcatggacacaactgaagagctactttctggtcttgtgaaagaccttaccggttcctacaaagttccctaccatcctgaaggacctgaaggccctaagtgggaacttgattttagtcgtccttggcgtcgtattaacatgattgagtatttggaggagaaacttaacactaaattcccacctggtgaccaattgcatactcctgaagccaatgcatttttaagagacttgtgtgctaagcacggtgttgaatgcgccccacctcaaacgtgctcccgactcttggacaaattggttggcgagttcattgaaagtgaatgtatcaatcctactttcattattggtcatcctcaaatgatgtctccattggctaaataccatcgttctgatgcgggcctgtgtgaacgctttgaagctttcgttgcaactaaggaaatctgcaatgcttatactgagttgaacgatatttttgaccaacgagctcgtttcgaagaacaagctcgtcaaaaggctcagggtgatgatgaagctcaaatcattgatgagaacttctgcacggcccttgagtatggtctacctcctaccggtggttggggaatgggtgttgaccgtcttgttatgtttttgactgacagtaacactatccgtgaagtcttgctttttcctcatatgaagcccgaagtgcaagctgcagaacctactgtcgttaaagagtaa

SEQ ID NO: 30060 - protein, 591 aa, Schizosaccharomyces pombe 972h-
MSEEQVNGVTQAVKALVLDPVTGEQVSKTELKKREKQRARELAKAKKQAEKAASAPVAAPKSSSKKEEDLDPSQYFENRSRTIMELRQTKDPNPYPHKFQVTITLPEFIAKYEGLARGETKPEVEVAVAGRVLGLRTAGNKLRFYEIHADGKKLQVMCQAQDADTVDFAAQHEHLRRGDIIGIRGYPGRSNPKGRADGELSIFARQCVLLSPCLRMLPKEHYGLKDLEIRHRQRYLDLIMNRSTRDRFVMRSRIIQYIRHFFDSRDFMEVETPMMNMIAGGATAKPFVTHHNDLDMDLYMRIAPELYLKMLVVGGLDRVYEIGRQFRNEGADLTHNPEFTSIEFYQAYADYYDLMDTTEELLSGLVKDLTGSYKVPYHPEGPEGPKWELDFSRPWRRINMIEYLEEKLNTKFPPGDQLHTPEANAFLRDLCAKHGVECAPPQTCSRLLDKLVGEFIESECINPTFIIGHPQMMSPLAKYHRSDAGLCERFEAFVATKEICNAYTELNDIFDQRARFEEQARQKAQGDDEAQIIDENFCTALEYGLPPTGGWGMGVDRLVMFLTDSNTIREVLLFPHMKPEVQAAEPTVVKE

SEQ ID NO: 30061 - DNA, 1581 bp, Corynebacterium glutamicum ATCC 13032
  CDS (1)..(1581): transl_table=11
gtgactaattccaatcccacttccaagaacaattccgccgatttgcctgagcagctgcgaattcgtcgcgaaaagcgcgagcgcattctggacagtggattggacgcctacccagtcgaggttgatcgcaccatctcaatctctgacctgcgctcccaatttgttgtcattacagaagacctccaagagcgcgaagaaggcgtaacctacctcgaagtaggcgaagaaaccgacgttgaggtcgcaatcgctggccgcgtcatgttcgttcgcaacaccggcaagctctgcttcgcatccatccaagaaggaaacggcaccaccgtccaagcaatgctgtccctggcagcagtcggtgaagaatccctcaaggcctggaaagccgatgtggacatgggtgacatcgtttccgtccgcggcaaagtaatctcctccaagcgtggcgaactctccgtgatggctgactcctggcacatggcctccaagtccctgcgcccactgccagtcgcattcgcggacctcagcgaagacacccgcgtccgccaccgctacaccgacctcatcatgcgcgaacaagcccgcaccaacgcgctcacccgcatcaaggtcatgcgtgcactccgccactacctcgaagaccaagacttccttgaggtagaaacccccatgctgcaaaccctccacggtggcgcagcagcacgaccattcgaaacccactccaacgccctcgacattgacctctacctgcgcatcgcaccagagctttacctcaagcgctgcgttgtcggcggcatcgagcgcgtcttcgaagtcaaccgcaacttccgcaacgaaggcgtcgactcctcccactccccagaattcgccatgctcgaaacctacgaagcctggggaacctacgaaaccggcgcgaaactgatcaagggtctcgtccaatccgtcgcccaagaagtcttcggaaccaccctggtcaccctcgcagacggcaccgaatacgacctcggcggcgagtggaaagtcatcgagatgtacccttccctcaacgaagccctcgcacgcaaattcccaggacaaccagaagtaaccatcgactccaccgtcgaagaactccgcgaaatcgccaaggtaatcggcctctccgtccccgaaaacggcggctggggacacggcaaactcgtcgaagaaatctgggaactcctctgcgaagaccaactctacggaccaatctttgtcaaagacttcccagtagaaacctccccactcacacgccaacaccgcaccaagccaggcgtcaccgaaaagtgggacctctacgtccgcggatttgaactagcaaccggatactccgaactcatcgacccagtcatccaacgcgaacgcttcgaagaccaagcccgcctcgccgccgacggagacgacgaagccatggtcctcgacgaagacttcctcaccgcaatggaacaaggcatgccaccaacctccggcaacggcatgggaatcgaccgcctcctcatggccctcaccggcctcggaatccgcgaaaccgtactcttcccaatggtgaaaccagaacaaaagtag

SEQ ID NO: 30062 - protein, 526 aa, Corynebacterium glutamicum ATCC 13032
MTNSNPTSKNNSADLPEQLRIRREKRERILDSGLDAYPVEVDRTISISDLRSQFVVITEDLQEREEGVTYLEVGEETDVEVAIAGRVMFVRNTGKLCFASIQEGNGTTVQAMLSLAAVGEESLKAWKADVDMGDIVSVRGKVISSKRGELSVMADSWHMASKSLRPLPVAFADLSEDTRVRHRYTDLIMREQARTNALTRIKVMRALRHYLEDQDFLEVETPMLQTLHGGAAARPFETHSNALDIDLYLRIAPELYLKRCVVGGIERVFEVNRNFRNEGVDSSHSPEFAMLETYEAWGTYETGAKLIKGLVQSVAQEVFGTTLVTLADGTEYDLGGEWKVIEMYPSLNEALARKFPGQPEVTIDSTVEELREIAKVIGLSVPENGGWGHGKLVEEIWELLCEDQLYGPIFVKDFPVETSPLTRQHRTKPGVTEKWDLYVRGFELATGYSELIDPVIQRERFEDQARLAADGDDEAMVLDEDFLTAMEQGMPPTSGNGMGIDRLLMALTGLGIRETVLFPMVKPEQK

SEQ ID NO: 30063 - DNA, 1824 bp, Drosophila melanogaster
  CDS (1)..(1824)
atgttcgcccgctgcgcccttagaaccgtgcaggggtcatggccccgatgcagatacaccggaattcagccacttgccgccggtttccacgtgagcgctccgcaaatggagccaagcaagcagaccaaacttgagctaaagcgtcgcctgaaggccgagcaaaaggccaaggagaaggctgagaaggcggccgctgcgccggcggaaaatactgctggcaagaagaagagcagtgccgccgaggaggaggagatctcgccgaatgaatactttaagctgcgctccgccgccgttcaggagctgaaacgttcacccgcaacggatccctatccacacaagttccatgtgagtagctcgctggaagacttcattgccaagtacgagaacagcctcaaggagggcgagaccctggagaatgtcaaactgagcgtggctgggcgcgtgcatgccatacgcgagtcgggcgccaagctcattttctacgatctgcgcggcgagggcgtcaaggtgcaggtgatggccagcgctaagtcctacaagtcggaggcggatttcgaaatcgatacgtccaaattgcgacgtggtgatatcatcggcgttgtcggacatcccggcaaaaccaagaagggtgaactgtccgttatgcccagcgagatcaagctgctatcgccctgtctacacatgctgccccatctgcatttcgggttgaaggacaaggagacgcgctaccgccagcgctatcttgatctcattctcaacaacaatgtgcgagagaaattccagatccgtgccaagatcatctcgtacgtgcgtcagttcctggatcgtctgggtttcctggagatcgagacgcccatgatgaacatgatcgccggtggagccactgccaagcccttcgtgacgcatcacaatgacctcaagatggatctgttcatgcgcattgctccggagctgtatcacaagatgctggtggtgggtggactcgatcgtgtgtacgagatcggacggcagttccgcaacgagggcatcgacctcacccacaatcctgaattcaccacgtgcgagttctacatggcgtatgccgactacgctgacattatggatatcaccgagcagttggtctcgggaatggtgaaagcgatccgtggctcctacaaggtcatctatcatccggagggtccagagggacctgagcaagaacttgactttacgccgccctttaagcgcgtatccatgatcaaaacgctggaagagaagctgcaggtgaagttccccgcggccgacaccttcaattcgccagagacgaatcagttcctgtctcagctgtgcgctaagcaccaggtcgagtgcccagctccgcgcaccactgcccgcctgctggacaagctcgtcggcgaattcatcgaggagttttgcgtgaatccaacgttcatctgtgagcatccgcagatcatgtcgccgctggccaagtaccatcgcagtattcccggcctgacggagcgcttcgaactgtttgtggccaagaaggagatttgcaacgcgtataccgagttgaacgatccggttgtgcagcgcgagcgtttcgagcagcaggccagcgacaaggcggccggcgatgatgaggcccagctggtcgacgagaacttctgcacgtccctggagtacggactgccgcccaccggtggttttggcatgggcatcgatcgcctggccatgttcctcacggactccaacaacatcaaggaggttctgctgttccccgccatgaaaccggaggatgccaaccgcacggcagcggaaactgctcccaccgcacagcagtag

SEQ ID NO: 30064 - protein, 607 aa, Drosophila melanogaster
MFARCALRTVQGSWPRCRYTGIQPLAAGFHVSAPQMEPSKQTKLELKRRLKAEQKAKEKAEKAAAAPAENTAGKKKSSAAEEEEISPNEYFKLRSAAVQELKRSPATDPYPHKFHVSSSLEDFIAKYENSLKEGETLENVKLSVAGRVHAIRESGAKLIFYDLRGEGVKVQVMASAKSYKSEADFEIDTSKLRRGDIIGVVGHPGKTKKGELSVMPSEIKLLSPCLHMLPHLHFGLKDKETRYRQRYLDLILNNNVREKFQIRAKIISYVRQFLDRLGFLEIETPMMNMIAGGATAKPFVTHHNDLKMDLFMRIAPELYHKMLVVGGLDRVYEIGRQFRNEGIDLTHNPEFTTCEFYMAYADYADIMDITEQLVSGMVKAIRGSYKVIYHPEGPEGPEQELDFTPPFKRVSMIKTLEEKLQVKFPAADTFNSPETNQFLSQLCAKHQVECPAPRTTARLLDKLVGEFIEEFCVNPTFICEHPQIMSPLAKYHRSIPGLTERFELFVAKKEICNAYTELNDPVVQRERFEQQASDKAAGDDEAQLVDENFCTSLEYGLPPTGGFGMGIDRLAMFLTDSNNIKEVLLFPAMKPEDANRTAAETAPTAQQ

SEQ ID NO: 30065 - DNA, 1611 bp, Corynebacterium efficiens YS-314
  CDS (1)..(1611): transl_table=11
ttgctcccgagccaggggtatcgactaacgttggtatccgtgactgactcgaattccacttccaagaacaattccgccgatttgcctgaacagctgcgcattcgtcgcgagaagcgccagcgcatcctggacagtggaaaggccgcctaccctgtcgaggtcgaccgcaccatctccattacggacctgcgtgagaagtatgtggtgggggagggtgacgccgagggcgtgacctacctggccgccggggatgaaaccgatgacacggtggccattgccggccgcgtcatgttcatccgcaacaccggcaagctctgcttcgccgtcatccaggagggcaacggcaccaccgtccaggcgatgctgtccctggccgccgtgggtgaggaggccctggctggctggaaggctgacgtcgacctcggagacatcgtctccgtgcgtggccgggtcatcgcctccaagcgtggtgaactctccgtcatggccgactcctggcacatggcctcgaagtccctccgccccctgccggtcgcatttgccgacatgagcgaggacacccgcgtccgccaccgctacaccgacctgatcatgcgcgaacaggcacgcaccaacgccctgacccgcatcaaggtcatgcgcgcactgcgtaagtacctggagggcgaggacttcctcgaggtggagaccccgatgctgcagaccctccacggtggtgccgcagcacgtcccttcgtgacccactccaacgccttcgacctggacctctacctgcgtatcgcgccggagctgttcctgaagcgctgtgtggtcggtggcatggagcgcgtcttcgaggtcaaccgcaacttccgcaatgagggcgccgattccacccactccccggaattctccatgctggagacctaccaggcctggggcacctacgaaaccggtgcccgcctgatccagggcctggtgcagttcgtggcgcaggaggtcttcggcaccaccgaggtgacgcttgccgacggcaccacctacgacctcggtggcgaatggaagaccatcgagatgtacccctccctcaatgaggccctccagcgcaagttccccggtcagcccgaggtcacggtggaaagctccgtggaggagctccgcgagattgccgctgtcatcggtctggccgtgcccgagaagggcggctggggccacggcaagctggtcgaggagatctgggagctgctgtgcgaggaccagctctacggcccgatcttcgtcaaggacttccccgtggagaccagccccctgacccgccagcaccgcgacaagccgggcgtcaccgagaagtgggacctctacgtccgcggcttcgaactggccaccggttactccgagctggttgacccggtcatccagcgcgaacgcttcgaggaccaggcccgcctggccgccggcggcgatgatgaggccatggtgctcgacgaggacttcctcgccgccatggaacagggcatgccgccgactgcgggttgtggcatgggcatcgaccgtctcctcatggccctgaccggcctgggtatccgcgaaaccgtgctgttccccctggtcaagcccgaaccccggcagtag

SEQ ID NO: 30066 - protein, 536 aa, Corynebacterium efficiens YS-314
MLPSQGYRLTLVSVTDSNSTSKNNSADLPEQLRIRREKRQRILDSGKAAYPVEVDRTISITDLREKYVVGEGDAEGVTYLAAGDETDDTVAIAGRVMFIRNTGKLCFAVIQEGNGTTVQAMLSLAAVGEEALAGWKADVDLGDIVSVRGRVIASKRGELSVMADSWHMASKSLRPLPVAFADMSEDTRVRHRYTDLIMREQARTNALTRIKVMRALRKYLEGEDFLEVETPMLQTLHGGAAARPFVTHSNAFDLDLYLRIAPELFLKRCVVGGMERVFEVNRNFRNEGADSTHSPEFSMLETYQAWGTYETGARLIQGLVQFVAQEVFGTTEVTLADGTTYDLGGEWKTIEMYPSLNEALQRKFPGQPEVTVESSVEELREIAAVIGLAVPEKGGWGHGKLVEEIWELLCEDQLYGPIFVKDFPVETSPLTRQHRDKPGVTEKWDLYVRGFELATGYSELVDPVIQRERFEDQARLAAGGDDEAMVLDEDFLAAMEQGMPPTAGCGMGIDRLLMALTGLGIRETVLFPLVKPEPRQ

SEQ ID NO: 30067 - DNA, 1476 bp, Geobacter sulfurreducens PCA
  CDS (1)..(1476): transl_table=11
atggaagagttgagtgagctgttgctccagaggcggcgcaaggtcgacgccctctgggaagcggggatcaatccctacccgaatgatttcaaacctctccatacgtctgccgatttcagggaggcctatggcaccgtggataccattgaggatgatccccgcagctttaccgtcgcgggccgtatcatcgcgcgccgctccttcggcaaggctgcgtttatccagatccaggaccgtaagggacggatgcaggtctacgtacgcaaggatacggtgggcgacgaggcgttcgaggcgttcgagactttcgatatcggcgacatcgtcggtgtcggcggcaccccgttccggaccaagaccggcgagctcactctcaatgccgcgttcatccgtctcctgaccaagtcgctccagccgcttcccgagaagttccacgggctcacggacgttgagacgcgctatcgccagcgctacgtggacctcatcgtgaaccccgaggtgcgcgaggtgttcgtcaagcggtcccgcatcgtcaatctcatccgcgaattcatggtgcgcaaggattttctcgaagtggaaacgcccatgatgcagccgatccccggcggtgccacggcgcgccccttcgtgacccaccacaatgccctcgatatgcagctttttcttcggatcgcaccggagctgtacctgaagcggctcgtggtcggcggcttcgagcgggtcttcgagatcaaccgtaacttccgcaacgaggggatttcagtgcgccacaaccccgagttcaccatgatggagttctatcaggcctacgccacctttgaagacctgatggatttcacggaggaactcctctgtcatgttgcgcaggaagtgctgggcaccctcgatttcacctaccaggagatgccgatcagcttccagcgcccctggaagcggctcgccgttgtcgaggcgattctggaatacggcgacatcgacgccaagtccctggcggaccgggatctggcctatgcctacgcccagcggctggggctcgacctgcccgccgacgtggggtacggcaagctcattaccgagattttcgaggaagtggcggaaacaaaactgatccagccgacgttcattaccgcctatcccaccgaagtgtcacccctttcccgcaagagcgacaaggatccggagatcgtggaccggttcgagctgttcattgccggtcgcgagatggccaacgccttctccgagttgaacgacccggtggaccagaaggagcgcttcctcgcccaggtggcggccaaggccaagggcgacgacgaggcccactacatggacgaggattacatccgcgcgcttgagttcggccttccccccacggcgggggaggggatcggcatcgaccggctcgtgatgctgctgaccgattcaccttcgattcgcgacgtcattctctttccgcaactacgcaaggaaaaataa

SEQ ID NO: 30068 - protein, 491 aa, Geobacter sulfurreducens PCA
MEELSELLLQRRRKVDALWEAGINPYPNDFKPLHTSADFREAYGTVDTIEDDPRSFTVAGRIIARRSFGKAAFIQIQDRKGRMQVYVRKDTVGDEAFEAFETFDIGDIVGVGGTPFRTKTGELTLNAAFIRLLTKSLQPLPEKFHGLTDVETRYRQRYVDLIVNPEVREVFVKRSRIVNLIREFMVRKDFLEVETPMMQPIPGGATARPFVTHHNALDMQLFLRIAPELYLKRLVVGGFERVFEINRNFRNEGISVRHNPEFTMMEFYQAYATFEDLMDFTEELLCHVAQEVLGTLDFTYQEMPISFQRPWKRLAVVEAILEYGDIDAKSLADRDLAYAYAQRLGLDLPADVGYGKLITEIFEEVAETKLIQPTFITAYPTEVSPLSRKSDKDPEIVDRFELFIAGREMANAFSELNDPVDQKERFLAQVAAKAKGDDEAHYMDEDYIRALEFGLPPTAGEGIGIDRLVMLLTDSPSIRDVILFPQLRKEK

SEQ ID NO: 30069 - DNA, 1500 bp, Mycobacterium avium subsp. paratuberculosis K-10
  CDS (1)..(1500): transl_table=11
gtgagtcccgccccagacgccgacattcccgagcagtaccggatccgccgggacaagcgcgcgcggctgctcgccgaggggcacgacccgtacccggtcgccgtcgaacgcacccacacgctggcgcaggtgcgcgccgcccaccccgacctgcccgtcgacaccgcgaccgacgacgtggtcggcgtcgccggccgggtgatcttcgcgcgcaactccggcaagctgtgcttcgccacgctgcaggagggcgacggcaccaccctgcaggtgatggtcagcctggacaaggtgggccgcgaagccctggacgcgtggaaggccgacgtcgacctgggcgacatcgtctccgtgcacggcaccgtgatcagctcccggcgcggcgaactgtccgtgctcgccgactcgtggcggatggcgtccaagtcgttgcgtccgctgcccgtcgcgcacaaggagatgagcgaagaggcgcgggtgcggcagcgctacgtcgacctgatcgtgcgcccgcaggcgcgcacggtcgcccggcagcggatcgcggtgatccgggcgatccgcaacgccttggaacggcgcgggtttctcgaagtcgaaaccccaatgttgcagacgctggccgggggcgcggccgcgcggccgttcgtcacccattccaatgcgctcgacatcgatctctacctgcggatcgctccggaactgttcctcaagcgctgcgtcgtcggcggtttcgataaggttttcgaactaaatcgcgtgttccgaaacgaaggtgcggattccacccattctccggaattctccatgctggagacctaccaggcctacggaacgtatgacgattcggcggtggtgacgcgcgagcttattcaagaggtggccgacgaggccatcggaacccgacaactaccgctgcccgacggcagcgtctacgacatagacggagaatgggcttctatagaaatgtacccgtcgctgtcggcggcgctcggtgaggagatcaccccgcagaccacggtggaaaagctgctcggcatcgccgagcggctgggcgtcgagatcccccgcgaccgcggctacgggcacggcaagatcgtcgaggagctgtgggagcacaccgtgggcgacacgctcaccgcgcccacgttcgtgcgggatttcccggtcgagacaacgcctttgacgcgtcagcaccgcagcatcgacggcgtcaccgagaaatgggacctgtacgtgcgtggggtcgagctggccaccggctactcggagttgaccgatcccgtggtgcagcgcgagcggttcgccgcccaggcgcgtgcggcggccgccggcgacgacgaggccatggtgctcgacgaagactttctcgccgcgctcgagtatgggatgccgccctgcaccggaacgggaatgggtatcgaccggttgttgatgacattgaccgggctgtcaattcgggagacagttttgttccccatcgttcggccgcattcgtag

SEQ ID NO: 30070 - protein, 499 aa, Mycobacterium avium subsp. paratuberculosis K-10
MSPAPDADIPEQYRIRRDKRARLLAEGHDPYPVAVERTHTLAQVRAAHPDLPVDTATDDVVGVAGRVIFARNSGKLCFATLQEGDGTTLQVMVSLDKVGREALDAWKADVDLGDIVSVHGTVISSRRGELSVLADSWRMASKSLRPLPVAHKEMSEEARVRQRYVDLIVRPQARTVARQRIAVIRAIRNALERRGFLEVETPMLQTLAGGAAARPFVTHSNALDIDLYLRIAPELFLKRCVVGGFDKVFELNRVFRNEGADSTHSPEFSMLETYQAYGTYDDSAVVTRELIQEVADEAIGTRQLPLPDGSVYDIDGEWASIEMYPSLSAALGEEITPQTTVEKLLGIAERLGVEIPRDRGYGHGKIVEELWEHTVGDTLTAPTFVRDFPVETTPLTRQHRSIDGVTEKWDLYVRGVELATGYSELTDPVVQRERFAAQARAAAAGDDEAMVLDEDFLAALEYGMPPCTGTGMGIDRLLMTLTGLSIRETVLFPIVRPHS

SEQ ID NO: 30071 - DNA, 1542 bp, Lactobacillus johnsonii NCC 533
  CDS (1)..(1542): transl_table=11
gtggcaaagaatgaaatgaacgaccaactaatcgctcgtcgtgaaaaaatggacgaaatgcgtgaaaacggtattgaaccttttggcgtaagaaaatttgatcgtcaagacttagctcgtactttgaatgaaaagtatagtaatgaagataaagatgaattaaatgctgatatgcctatgactaagattgcaggtcgtatgcttgcaaaacgtggtaagggtaaagttggatttgcagatctttatgaccgtactggtaaaattcaaatttacgtacgtaaagatatcgttggtgaagataactacaagatttttaagaagtctgatattggtgactttttaggtattgatggtgaagtaatgaagaccgatactggtgagttgactattcgtgctactcacattactttcttgtctaaggctcttcgtccattgcctaataaatgggatggtttaaaggatgttgaacaaatttatcgtcagcgctaccttgacttaattacaaatcatgatagttacatgcgttttgttcaccgtactcaaattattcaagctattcgtgactatttgaataatagagatttcttagaagttgaaactccagttctccacaatattcctggtggtgctgaagctcgtccatttattactcaccacaatgctttggatattgatctttacatgagaattgctttggaacttccattgaagcgtttaattgttggtggtatggaacgtgtttatgaaatcggccgtgtatttagaaatgaaggtcttgatactaagcacaacccagaatttactgaacttgaaacttatgcagcttactgggacttccatgatgtaatggatgaggcagaaggaattattagagcagctgctaaagttgtttcaccagatggtaagattacttaccaaggaactgatattgacttaggtaagccattccgccgtgttcacatggttgatttaatcaaggaaaagactggtgttgacttctggaagccaatgactattgaagaagcaagaaaagttgctgatgaacacaacgttcactatgaaagctactggaaggttggccacattattaatgccttctttgaagaattcggtgaaggatcaattgttcaacctacttttgtttatggacacccagtagaagtatcaccacttgctaagaagaatgctgatgatccaagatttactgatcgttttgaaatcttcattatgggtgcagaatatggtaatgcattctcagaattaaatgatccagatgatcaacgtcatcgtttcgaagaccaaatggctgaaagagaagctggtaacgatgaagcagatatgattgatgaggattaccttcgtgctatggaattcggtatgcctcctacaggtggtctaggtattggtattgatcgtttggtaatgcttttaactgatgctcctgctattcgtgatgtcttactcttcccaacaatgcgccctgaaaaggttgaaagtgttgaagcagaagttcaagaagatttgaagaaaaagaacaaatag

SEQ ID NO: 30072 - protein, 513 aa, Lactobacillus johnsonii NCC 533
MAKNEMNDQLIARREKMDEMRENGIEPFGVRKFDRQDLARTLNEKYSNEDKDELNADMPMTKIAGRMLAKRGKGKVGFADLYDRTGKIQIYVRKDIVGEDNYKIFKKSDIGDFLGIDGEVMKTDTGELTIRATHITFLSKALRPLPNKWDGLKDVEQIYRQRYLDLITNHDSYMRFVHRTQIIQAIRDYLNNRDFLEVETPVLHNIPGGAEARPFITHHNALDIDLYMRIALELPLKRLIVGGMERVYEIGRVFRNEGLDTKHNPEFTELETYAAYWDFHDVMDEAEGIIRAAAKVVSPDGKITYQGTDIDLGKPFRRVHMVDLIKEKTGVDFWKPMTIEEARKVADEHNVHYESYWKVGHIINAFFEEFGEGSIVQPTFVYGHPVEVSPLAKKNADDPRFTDRFEIFIMGAEYGNAFSELNDPDDQRHRFEDQMAEREAGNDEADMIDEDYLRAMEFGMPPTGGLGIGIDRLVMLLTDAPAIRDVLLFPTMRPEKVESVEAEVQEDLKKKNK

SEQ ID NO: 30073 - DNA, 1515 bp, Bdellovibrio bacteriovorus HD100
  CDS (1)..(1515): transl_table=11
gtggaggggcccgcgggccccgtaactggagtaattatgagcatcaatgaaaatccgctaagagccgagaagcgcaaaaaacttcatgcgcttcgtgaaaaaggcatcaacccgtatccatacgtctttgaaaacaaggcgaagatctctgaagtgactgcggagcatgctgcgactttgcaggcgggtgaaaagaagccggaatttacctatcgcattgctggccgtctgatgaccctgcgtatgatggggaaagcgtctttcttcaatcttcaggatcagacgggttccgttcaggtctatgtaaaaactgaggagctgtctgaacaggaccgcatggcattcgagctggtggatctgggtgacatcgtcggtattgaggggtttgttttcaaatcccaaaaaggtgagttttcgatttacgcaaaatccttccagattctgacgaaaaccatcgagccgttgccagagaaattccacggcgttcaggacatcgaaatcaagtatcgtcacagacacctggatttgatgaccgatgcggattcccgcaaggtgtttgaaactcgttccaagatcatcaaagaagtacgtcgcttccttgatgaccgtggttttatggaagtggaaaccccgacattgcagccggtttacggcggtgctgcggcgactccgttcaccacacaccacaaagctttggacatgaagctttacatgcgtatttcccctgaactttatctgaaacgcctgatcgtgggtggtttcgagaaagtttacgaaatcagcaaaaacttccgtaacgaaggtatcgaccgcactcacaacccggaatttgcgttgcttgagttctacgaggcttacacggactacaactatcagatgaaacagttcgaagaactgatctcttctttggccttgaaaatcaccggcagcatgaaggtgacttatcagggtaaagagatcgacttcactcctccttggagacgtctgacggttcatgaaggtgttaaagaatacgcgggcattgatccggacaaggcaactgatcaggaaatcttccaggccatccgtaaaaacggtggcgatatcgatgagccgggtaaacgcggcgaaatgatcatggaactgtttgaactgacagcagagcagcacctggtgcagccgacattcgtgatggatcacccggtggagatttctccgctgacgaagattcaccgtcgcgacagcagactggttgagcgtttcgaaccgttcgcagcctgcatggaaatcggcaatgcttactctgagctgaacgatccggaagatcagttggcccgtttgaaagaacaggaagccaaccgtgcgaaggacgaagaagcgcatccgatggatgaagacttcctgctggcgatcgacgctggtatgccgccaacaggtggcgtgggaatcggtatcgagcgtatcgtgatgttgctaacggatagaccaagtatccgtgacatcatctttttcccaacaatgcgtattacaaaatag

SEQ ID NO: 30074 - protein, 504 aa, Bdellovibrio bacteriovorus HD100
MEGPAGPVTGVIMSINENPLRAEKRKKLHALREKGINPYPYVFENKAKISEVTAEHAATLQAGEKKPEFTYRIAGRLMTLRMMGKASFFNLQDQTGSVQVYVKTEELSEQDRMAFELVDLGDIVGIEGFVFKSQKGEFSIYAKSFQILTKTIEPLPEKFHGVQDIEIKYRHRHLDLMTDADSRKVFETRSKIIKEVRRFLDDRGFMEVETPTLQPVYGGAAATPFTTHHKALDMKLYMRISPELYLKRLIVGGFEKVYEISKNFRNEGIDRTHNPEFALLEFYEAYTDYNYQMKQFEELISSLALKITGSMKVTYQGKEIDFTPPWRRLTVHEGVKEYAGIDPDKATDQEIFQAIRKNGGDIDEPGKRGEMIMELFELTAEQHLVQPTFVMDHPVEISPLTKIHRRDSRLVERFEPFAACMEIGNAYSELNDPEDQLARLKEQEANRAKDEEAHPMDEDFLLAIDAGMPPTGGVGIGIERIVMLLTDRPSIRDIIFFPTMRITK

SEQ ID NO: 30075 - DNA, 1503 bp, Mycoplasma mycoides subsp. mycoides SC str. PG1
  CDS (1)..(1503): transl_table=4
atgttagataatagaaaatttagtgaacaagaattagtcagaagaaataaatataaaactttagttgaacaaaacaaagatccttataaagttactaattgaaaaagaaacactacattattaaagttaaatgaaaaatataaagattatagtaaagaagatttattaaatttaaatcaagaattagtagtagttgctggaagaattaaattatatagagaggctggtaaaaaagctgcttttgttaatattgatgaccaagattcaagtattcaattatatgtaagattagatgaaataggtgatcaatcttttgaagattttagaaacttcgatttaggagatattattggggttaaaggaatcatgatgagaactgatcatggcgaactttcaattagatgtaaagaagttgttttattatctaaagctttaagaccactacctgataaacacgctggaattcaagatatagaagaaaaatatcgtagaagatatgttgatttaattgtaaatcatgacgttagaaaaacatttcaagctcgaactaaaataataagaactttacaaaactttttagataataaaggttatatggaagttgaaactccgattttacactcattaaaaggaggagcttctgctaagccttttattactcactataatgttttaaatactgatgtttatttaagaatagctacagaactacatttaaaacgtttaattgttggtggttttgaaggggtttatgaaataggtcgtatttttagaaatgaaggaatgagtactcgccacaatcctgaatttacaagtattgaattatatgttgcttatgaagatatgttctttttaatgaatttaacagaagaaatttttagagtatgtaatgctgcagttaattcaaattctataattgaatataataatgtaaaaatcgatctatcaaaaccatttaaaagattacatatggttgatggtattaaacaagtaacaggtgttgatttttgaaaagaaatgactgtacaacaagctttagaattggctaaaaaacataaagttcatgttgaaaaacatcaagaatcagttggacatattattaatttattttatgaagaatttgttgaatcaactattgttgaaccaacttttgtttatggtcatccaaaagaaatttctccactagcaaaatctaatccaagcgatccaagatttactgatagatttgaattgtttattcttggaagagaatatgctaatgcatttagtgagttaaacgatccaattgatcaatatgaaagatttaaagctcaaattgaagaagaatctaaaggaaatgatgaagccaatgatatggatattgactttattgaagccttagaacacgcaatgccaccaactgctggaattggtataggaattgatagattagtaatgcttttaactaattcagaatctattaaagatgtattattatttccacaaatgaagccaagagaataa

SEQ ID NO: 30076 - protein, 500 aa, Mycoplasma mycoides subsp. mycoides SC str. PG1
MLDNRKFSEQELVRRNKYKTLVEQNKDPYKVTNWKRNTTLLKLNEKYKDYSKEDLLNLNQELVVVAGRIKLYREAGKKAAFVNIDDQDSSIQLYVRLDEIGDQSFEDFRNFDLGDIIGVKGIMMRTDHGELSIRCKEVVLLSKALRPLPDKHAGIQDIEEKYRRRYVDLIVNHDVRKTFQARTKIIRTLQNFLDNKGYMEVETPILHSLKGGASAKPFITHYNVLNTDVYLRIATELHLKRLIVGGFEGVYEIGRIFRNEGMSTRHNPEFTSIELYVAYEDMFFLMNLTEEIFRVCNAAVNSNSIIEYNNVKIDLSKPFKRLHMVDGIKQVTGVDFWKEMTVQQALELAKKHKVHVEKHQESVGHIINLFYEEFVESTIVEPTFVYGHPKEISPLAKSNPSDPRFTDRFELFILGREYANAFSELNDPIDQYERFKAQIEEESKGNDEANDMDIDFIEALEHAMPPTAGIGIGIDRLVMLLTNSESIKDVLLFPQMKPRE

SEQ ID NO: 30077 - DNA, 1758 bp, Nasonia vitripennis
  CDS (1)..(1758)
atggctgatagcgcggcgcccggcgaaaagttgtcgaaaaatgagctcaagaggaggcaaaaagcggagcaaaaattaaaggaaaaggcagaaaaggaagctgccaagaaggaggaggtcaaggaagctaagaaggaatcggctggaaatgagatttctgaagaaaacattagccctaatgagtattttaagcttagaggtcaagccattgagaggctcaaggccaacaatgaccacccctacccacacaaattccatgtgtcgatatccttggaaaacttcattgagaagtacagcaataaggtagcagatggtgagatgctggaaaatgagttttgcagtattgctggcagagtgcactctatcagaagagctggtgccaagcttatcttctttgacctcaggggagaaggaactaaagttcaagtgatggccaatgccaggcattactacgatgaggagaaatacgttgtagatactgacaaaatcggccgtggtgatattattggagtagagggattcccctgcaagagcaaaaagggagaattctcaattatgccaaaaagcataaagcttctcagtccctgccttcacatgcttccacacttacactttggactgaaagataaggaaacgaggtttaggcagcgttacttagatcttatcataaacgacaaagtgaggcagaaattctatgttcgcgctaaaattatttcttatctccgcaaattcctcgatgatctgggtttcctagaaatcgagactccaatgatgaacatgatcgccggtggtgcgacggctaaacctttcgttacgcatcacaacgacctgaatatggacctgtacatgagaatcgctccagagctttatcacaagatgcttgtagttggtggaattgaccgagtgtacgaagtcggcaggcagttcaggaacgagggtatcgacatgacgcataatcccgaattcacgacctgtgagttctacatggcctatgcagactacaatgacctcatgtccattactgaagagttggtctctggcatggtcaagaccatacatggaacatacaaaatcaagtatcacccagatggggaaggcggcgaggaagtggagatcgactttactccgccgttcaagcgagtctccatggttaaaacgctggaagagctgttgaatgtcaaattccccaagccaacagagtttaacactcccgagaccaacaagttccttatcgacctatgcgcaaagcacgaagttgagtgcccggcgcctaagactactgccaggttattagataagctcgtcggagacttcattgaggagaagtgcatcaatcctacgtttatcatggatcacccacaaatcatgtcgccactcgctaaatggcatcgttctgaagctggtcttacggaacgtttcgagcttttcgtaatgaaaaaagaaatctgcaatgcttacactgagttgaatgatccgttcgttcaaagagaaaggtttgaacagcaagccaaagacaaagcagccggtgatgacgaagcacaattaatcgacgagaacttctgcactgctcttgaatatggattacctccgactgctggatggggtatcggaatcgaccgtctcacgatgttccttacggattcgaataatatcaaggaggtactgttcttccctgccatgaagccagatgatccgaataaaaacaaagaggcaacagaagaaactgctgctgtaaatcatcagccagaaaaaaagtaa

SEQ ID NO: 30078 - protein, 585 aa, Nasonia vitripennis
MADSAAPGEKLSKNELKRRQKAEQKLKEKAEKEAAKKEEVKEAKKESAGNEISEENISPNEYFKLRGQAIERLKANNDHPYPHKFHVSISLENFIEKYSNKVADGEMLENEFCSIAGRVHSIRRAGAKLIFFDLRGEGTKVQVMANARHYYDEEKYVVDTDKIGRGDIIGVEGFPCKSKKGEFSIMPKSIKLLSPCLHMLPHLHFGLKDKETRFRQRYLDLIINDKVRQKFYVRAKIISYLRKFLDDLGFLEIETPMMNMIAGGATAKPFVTHHNDLNMDLYMRIAPELYHKMLVVGGIDRVYEVGRQFRNEGIDMTHNPEFTTCEFYMAYADYNDLMSITEELVSGMVKTIHGTYKIKYHPDGEGGEEVEIDFTPPFKRVSMVKTLEELLNVKFPKPTEFNTPETNKFLIDLCAKHEVECPAPKTTARLLDKLVGDFIEEKCINPTFIMDHPQIMSPLAKWHRSEAGLTERFELFVMKKEICNAYTELNDPFVQRERFEQQAKDKAAGDDEAQLIDENFCTALEYGLPPTAGWGIGIDRLTMFLTDSNNIKEVLFFPAMKPDDPNKNKEATEETAAVNHQPEKK

SEQ ID NO: 30079 - DNA, 1719 bp, Anopheles gambiae str. PEST
  CDS (1)..(1719)
ttggctgatgcaacatcttcgttttctttcagtgggcaaatgcatcgttgtgcggccaatgaagcggagcaggggaagcaggaaacaaagactcaacaacctacgatggaatcgaaacgagctgataaaaagttttcctttaccggatctgtggaagaacgaatttctcctaacgaatacttcaagctgcgaagtgttgccgtgagtgagctaaaaaaacgccccaaaacgcatccttatccgcacaagttttgcgtgacaatttcgattggtgatttcattggcaagtataaggatataccggtcgccggtacgctggatgatgtgagcgtcagtgtggcgggacgggtgcatgcaatccgtgaatcaggtgacaagctgatatttttcgatcttcgcggagaagggcagaagctgcaaatcatggccagtgcagcggggtatcaaaacgaggagcaattttacgacgaaacttcacgattgcgacgtggcgacattatcggcgtgacaggagcgccgggtaaaacgaagaagggagagctgtcggtaatggcaaagcaaatacagctgctggcaccgtgtctgcacatgctgccccatctgcattacggattgaaggataaagagacccggtatcgacagcggtacctggatcttatgttgaacaacgacgttcggtctatctttgtaactcgagctaggatcattagcttcatacgtcgatttctggacggtgcgggctttctggaggtggaaacgccaatgatgaatatgatcgctggtggagcaactgccaaaccattcgtcacgcatcacaacgatttgaatatggatctgtttcttcgcattgcgcccgagctgtacttgaagatgctgaccgtgggtgggcttgatcgggtgtacgaaataggacgccagtttcgcaatgaaggcatggatgtgacccacaatccggagtttaccacgtgcgagttctacatggcgtatgcagattataacgatctcatggaaatcacggagcagcttttatctagcctggtgtacagtgtccacgggtcgttcaaagtcaaataccatcctgaaggtcatggaggtgatgaggttgagattgattttactccaccgttcaagcgtatatctatgattgatacactggaggatgttttgagcgtaaaatttccccccgcagaccaattggacacaccggaagcggctaaatttttagaggaactctgccaacagcgcaacatagactgccaaccaccgaggaccactgcacgattgctggataaatttgtgggtgagtttttggaaggcaattgccacaatccaacattcatttgtgatcatccgcaaattatgagcccactggcaaagtaccaccgcactcgctccggtttgacggaacgattcgagctgtttgtaatggggaaagaaatctgtaacgcttataccgagctgaacgatccggctgtgcagcggcaacggtttaagcaacaggcagcagaaaaggccgccggaaatgacgaggcccagctggtagatgagaacttttgtactgccctggagtatggtttaccgccgacaggaggctgggggttgggtatcgacagactggccatgtttttaaccgactgtaccagtattaaggaagtgttgctctttccggccatgaaaccagatgaatcaatacgcaaaaggggcaacggtggtgcctga

SEQ ID NO: 30080 - protein, 572 aa, Anopheles gambiae str. PEST
LADATSSFSFSGQMHRCAANEAEQGKQETKTQQPTMESKRADKKFSFTGSVEERISPNEYFKLRSVAVSELKKRPKTHPYPHKFCVTISIGDFIGKYKDIPVAGTLDDVSVSVAGRVHAIRESGDKLIFFDLRGEGQKLQIMASAAGYQNEEQFYDETSRLRRGDIIGVTGAPGKTKKGELSVMAKQIQLLAPCLHMLPHLHYGLKDKETRYRQRYLDLMLNNDVRSIFVTRARIISFIRRFLDGAGFLEVETPMMNMIAGGATAKPFVTHHNDLNMDLFLRIAPELYLKMLTVGGLDRVYEIGRQFRNEGMDVTHNPEFTTCEFYMAYADYNDLMEITEQLLSSLVYSVHGSFKVKYHPEGHGGDEVEIDFTPPFKRISMIDTLEDVLSVKFPPADQLDTPEAAKFLEELCQQRNIDCQPPRTTARLLDKFVGEFLEGNCHNPTFICDHPQIMSPLAKYHRTRSGLTERFELFVMGKEICNAYTELNDPAVQRQRFKQQAAEKAAGNDEAQLVDENFCTALEYGLPPTGGWGLGIDRLAMFLTDCTSIKEVLLFPAMKPDESIRKRGNGGA

SEQ ID NO: 30081 - DNA, 1848 bp, Magnaporthe grisea 70-15
  CDS (1)..(1848)
atggcggactctgctgcctcagagcctcccaccgatcaggtggccaacctcatcttggatgaggttaccggcgagaaggtctccaagacggagctcaagcgccggcaaaaggcccgccagaaggccgatgagaaggccaagaaggccgcagctgcccctcccaagcccgccgctgcgaagaaggcagccaagcccgacgagcaggaacttaaccccaaccagtactttgagattcgaagccgtgaggtcaatggcatgctcgagaacccctcgggccccaacccgtacccgcacaagttcctggtcgactacgatccttcccagtttgacaaggacttcaagcacctcaagtctggcgacgtcgacaagacccgggaaatcaggattgccggccgcatcttcaccaagcgtagctccggaaacaagctgatcttctacgacatcaagactggctccgacacgacgacgaccggctccaagatgcagatcatgtgccaggctcagtacgtcaaggagggtggcccgacattcgagcagcagcacgagcaccttggcaggggagatgtcattggtatcgttggattccctggcagaaccgcgcccaaggccaagctcgagaggggcgaagagggcgagctgtctctgtttgcgaccgaggttgttcagctgtcaccatcgctgcacctgcttcctggtgaacgtgccggcttcacggacggcgagaagaggttccgcatgcgctacctcgacttcatgttcaacgacaagtctcgtgaggttctgtggcagcgtagccgaatcgtcaagtacatccgcgacttcttccacgacaggcggttcatcgaggtggagactcccatgatgacgtccatcgcgggtggcgcaacagcgcttcccttcgtcacgcaccacaacgagtatgatctcgacatgtttatgcgtatcgcgccggagctgtacctcaagatgcttgtggtgggcggttacaacaaggtctttgagatcggcaagaacttccgcaatgagggctgcgatttgactcacaacccagagttcaccactatcgaggcgtatgcggcttactacgacatgtacgatgtaatggactacaccgaggagctggtctccggactggtcaagcacctgactggcggctacgagaccaagttcaccacacagacgggtgagacgtacgaggtcaactgggcaaggccatggaagcgcgtcaagatcatgcccgagctcgagaggctcacgggcaagaaatttcctccttatagcgaactccacaccgatgagaccaaccaattcctccgcgacctgcttaaggagaagaacattgagtgcacgccgccattgacaaacgctcgcatgctcgacaagctcattggcgagtacctggaggagacttgcatcaacccgactttcctgatggagcacccgcaattgatgtccccattggccaagtaccaccgtaccgagaagggtatctctgagcgttttgagggtttcgtctgcaagaaggagatctgcaacgcgtacactgagctgaacaacccattcgaccagaggttgcgctttgaagagcaagcacgtcaaaaggcacagggtgacgacgaggcccagatgattgacgagaacttcctgaggtcactggagtatggtctgcctccaactgccggatggggtctgggcatcgaccggctgtgcatgttcttgaccaacaacgctacgatcagagaggttttggcgttcccattcatgagggatgagaagagtggcccgccagtggctgccgaggtagccaatgttgagccggtgccagtcgagggtattgcccacaagtaa

SEQ ID NO: 30082 - protein, 615 aa, Magnaporthe grisea 70-15
MADSAASEPPTDQVANLILDEVTGEKVSKTELKRRQKARQKADEKAKKAAAAPPKPAAAKKAAKPDEQELNPNQYFEIRSREVNGMLENPSGPNPYPHKFLVDYDPSQFDKDFKHLKSGDVDKTREIRIAGRIFTKRSSGNKLIFYDIKTGSDTTTTGSKMQIMCQAQYVKEGGPTFEQQHEHLGRGDVIGIVGFPGRTAPKAKLERGEEGELSLFATEVVQLSPSLHLLPGERAGFTDGEKRFRMRYLDFMFNDKSREVLWQRSRIVKYIRDFFHDRRFIEVETPMMTSIAGGATALPFVTHHNEYDLDMFMRIAPELYLKMLVVGGYNKVFEIGKNFRNEGCDLTHNPEFTTIEAYAAYYDMYDVMDYTEELVSGLVKHLTGGYETKFTTQTGETYEVNWARPWKRVKIMPELERLTGKKFPPYSELHTDETNQFLRDLLKEKNIECTPPLTNARMLDKLIGEYLEETCINPTFLMEHPQLMSPLAKYHRTEKGISERFEGFVCKKEICNAYTELNNPFDQRLRFEEQARQKAQGDDEAQMIDENFLRSLEYGLPPTAGWGLGIDRLCMFLTNNATIREVLAFPFMRDEKSGPPVAAEVANVEPVPVEGIAHK

SEQ ID NO: 30083 - DNA, 1614 bp, Magnaporthe grisea 70-15
  CDS (1)..(1614)
atgcccctttcaaaactgttcgacgtgtgtccttcagatagtaactccggccgtatgagagtggtgcgtgggatcgaagatatagatgaacccctgaccgcaaaaggccgcatcatgaacatccgcagccacggctccctgatattcctggacatcgccggcgactacgagacgctgcaggtcgctatcagctacgcatttctgaaagaaaagtccccagctgagatggaaggcgtcagcctccgcgactttaaagcaaagggtgcccagctgcagcgcggcgactgggtcgtcgccgccgggcacatggaggcagacaggcgtgacggcctgcgcatgcgcgcacataacttcccctcgatccgcgccaaggccctcaacataccgcccctttccgtcatcgacgatgggctcatgagccaatctcgccacctggacctgatgctcaacaaggtgagcgtcgatgcgctgcgcgcccgcgcccgcatcatccagaccgtccgccgcaccctcgacgaccgcggctacgtcgaggtccagacgccgctgctggcgggttcggccggtggggcgacggcccgcccatttgccacgacggccacagagtttggttcctcgcagcacctcgccctccgcgtcgccccggagctctggctcaagaggctcgtcatgggcggcatggaccgcgtctacgaggtcgggccttgcttccgcaacgagggcgtcgacgccacccataaccccgagttcaccatgtgcgagttctacgaggcctgggcagacctagaccacctcatgctcatgacggagaggctgatgcagctcatctcatccgacctcaaggccgcgtccaaagacgcagaggccgtgggccgtcgcccctggctgctgcccgacatggaccgcatcgcctccactttctgtgaagaaggcaccacccccaaagtccacttcatcacgaggcttgagcaagcgctgggcttcaagctccccgacctggaatccaccacagcgttggcggaattaataatgaaactacgcgagcggggcgaggatgctgacatccttgccgccgccgactacccggagcagggagacgccgccaccaccacggcgcccatgacgctacccaagctccttgacgacctgggctcaaaatacgtcgagaagtgctcgaccgttgggccccaccgggcattctttgtcacgcaccacccggcctgcatggcgccgctggcgcgaagcggcgtgtgccccatcaccaagcagaaggtcgctctcagggccgagttctttgtcaatggcgtcgagctggccaacatgtacgaggaggagtttgaggccgacgagcaggagcgcaagttcaacgcagcggcgcggttgaggcgtgatgccgtcgggctcaacagcgacgaggccagctacgtcttggccatgcgtggcggcatgccgcccacaggaggatggggctgtggtattgacaggcttgccatgctcttcaccggcaagccgaggatccgggacgtcctgacctttgggaacttgaggaacgtggtgcacgcgacgcggttgccgggaccatggaatgccgcagcgaagcgttttcggttgtga

SEQ ID NO: 30084 - protein, 537 aa, Magnaporthe grisea 70-15
MPLSKLFDVCPSDSNSGRMRVVRGIEDIDEPLTAKGRIMNIRSHGSLIFLDIAGDYETLQVAISYAFLKEKSPAEMEGVSLRDFKAKGAQLQRGDWVVAAGHMEADRRDGLRMRAHNFPSIRAKALNIPPLSVIDDGLMSQSRHLDLMLNKVSVDALRARARIIQTVRRTLDDRGYVEVQTPLLAGSAGGATARPFATTATEFGSSQHLALRVAPELWLKRLVMGGMDRVYEVGPCFRNEGVDATHNPEFTMCEFYEAWADLDHLMLMTERLMQLISSDLKAASKDAEAVGRRPWLLPDMDRIASTFCEEGTTPKVHFITRLEQALGFKLPDLESTTALAELIMKLRERGEDADILAAADYPEQGDAATTTAPMTLPKLLDDLGSKYVEKCSTVGPHRAFFVTHHPACMAPLARSGVCPITKQKVALRAEFFVNGVELANMYEEEFEADEQERKFNAAARLRRDAVGLNSDEASYVLAMRGGMPPTGGWGCGIDRLAMLFTGKPRIRDVLTFGNLRNVVHATRLPGPWNAAAKRFRL

SEQ ID NO: 30085 - DNA, 1833 bp, Gibberella zeae PH-1
  CDS (1)..(1833)
atggctgacgctgctgcccccccgaccgagcaggttgccaacctgcacctcgatgaggtaactggtgagaagatctccaagaccgagttgaagaagcgccagaaggcccgccagaaggaggaggaaaagaagaagaaggctgccgagcgtggtcccgctcccgctcccaagaaggctgccggtggtgctgaggcttctgagaaggacctcacccccaaccagtacttcgagatccgatccaggaacatcaacaagctccgcgagaccaagagccccaacccctacccccacaagttcaatgttacatacgacctgcgaaagttcgtcgaggagtttggtcacctcaagtctggcgagcatgccaaggacaagatcattcaaattggtgcccgtgtccacggaaagcgagcatctggcgccaagctcctcttctacgatgtccgaactgagggtgtcaaggtccagatcatgtgccaggctcaagaggttcgtgagggagctccctcttttgaggaccagcacgagcaccttcgccgaggtgatatcatcggaattatcggataccctggccgaactgcacccaagaccaagatcgagaagggtgaggagggtgagctgtccattttcgccaccgaagttgttctcctgactccttgcctgcatgcccttcccgatgaccactacggcttcaaggatctcgagcagcgataccgtaagcgatacctcgatctcatctgcaacgagaaggcccgtaacgtcttcatcactcgatctaagatgatcacctggatccgcaaatacttcgacgagcgtgacttcgtcgaggttgagactcccatgatgaaccagattgctggtggtgccactgccaagcccttcaccactcaccacaacgagtatgatatgcccatgttcatgcgtgtcgcccctgagctttacctcaagatgcttgtcgtcggtggtctcaaccgcgtgtacgagattggacgtcagttccgaaacgaaggtgctgatcttactcacaaccccgaattcaccaccattgaattttacgaggcctacgctgatgtcaacgacttaatgaagaccaccgaggaaatgatctccggcctcgtcaagtacctcaccggtggctacaagactactttccatactcagagtggcgagaagtacgaggtcaactgggaggcgccttggccccgatatgagatgatccccactcttgaggaggctactggcgagaagtttccttcgggtgaccagctccacactcaagagaccaacgagttcctcaagaatgtccttaagaagatgaacctggagtgcacacctcctctgactaacgcccgcatgattgacaagctggttggcgagttcatcgaggagaagtgtgtcaacccttctttcatcactggccaccctcaggtcatgagccctctcgccaagtaccaccgtgagatccccggtctgtgcgagcgattcgaggctttcgtgtgcaagaaggagatcgccaacgcttacaccgagttgaacgatcccttcgaccagcgcctgcgtttcgaggagcaggcccgccagaaggaccagggtgacgacgaggctcagcttgtcgatgagaacttctgtacctcgctcgagtacggtctgcctcctaccggtggctggggtatgggtattgaccgaatggtcatgttcctgactgacaactacaccattcgtgaggtccttactttcccattcatgaaggatgacaagctggagcagaagaagcaactggccgccgaggtggctggcattgaacccatgcctgaggaaggtattgctcacaagtaa

SEQ ID NO: 30086 - protein, 610 aa, Gibberella zeae PH-1
MADAAAPPTEQVANLHLDEVTGEKISKTELKKRQKARQKEEEKKKKAAERGPAPAPKKAAGGAEASEKDLTPNQYFEIRSRNINKLRETKSPNPYPHKFNVTYDLRKFVEEFGHLKSGEHAKDKIIQIGARVHGKRASGAKLLFYDVRTEGVKVQIMCQAQEVREGAPSFEDQHEHLRRGDIIGIIGYPGRTAPKTKIEKGEEGELSIFATEVVLLTPCLHALPDDHYGFKDLEQRYRKRYLDLICNEKARNVFITRSKMITWIRKYFDERDFVEVETPMMNQIAGGATAKPFTTHHNEYDMPMFMRVAPELYLKMLVVGGLNRVYEIGRQFRNEGADLTHNPEFTTIEFYEAYADVNDLMKTTEEMISGLVKYLTGGYKTTFHTQSGEKYEVNWEAPWPRYEMIPTLEEATGEKFPSGDQLHTQETNEFLKNVLKKMNLECTPPLTNARMIDKLVGEFIEEKCVNPSFITGHPQVMSPLAKYHREIPGLCERFEAFVCKKEIANAYTELNDPFDQRLRFEEQARQKDQGDDEAQLVDENFCTSLEYGLPPTGGWGMGIDRMVMFLTDNYTIREVLTFPFMKDDKLEQKKQLAAEVAGIEPMPEEGIAHK

SEQ ID NO: 30087 - DNA, 1632 bp, Candida glabrata CBS 138
  CDS (1)..(1632)
atgcttcgtatagttggtgctcggctgctgtacgcgagctcgaggatacgaattggtagaggtttggcatcaaaggttgctattgattctagtaatctagaattcacgaagagaaatgaattggttttgagctcattggataggtattatccttctatgagttctattgagcgtggtaatttagtcagtattgatatatttttgaagaagtatgggagtacatctgaagatcaattgaacaaaataaaccaaaaaatatcattatgcggcaggatcaaaagtatacgattctcagggaaaaagatggcatttattgatctggtggatggaattcatggtattcagttgatattaaattgtcgagaaattggaaattcggcaactttcgaaagtgagctgtcctttttaaggaaaggcgactatgtaatgacaactggtttaccgcgattatccaagtcaaggatgaagaatatatcacttcgttgcacagatttgccgaagatattatcggtcgcacagatgcctcttccacctaaacttatcgatacggtaaaatcgaatagtaacaaagttgtcgactatcagattaatgggtttcagaacatacgaattagaagctccattttaaagtctatcagaaactttttggaggaacgggatttcattgaggttgaaacgccaatattatcatctaaaagtaatggtgccgtcgccaaaccatttatgtcatcatcaaaggactttgataaacttatgttgagagtagcaccagaattatggctgaaacgtctaatcatttcaggttgtaataaggtttttgagataggtaaatctttcagaaatgaaggtatagatggaagtcataatccagaattcacgacgttggaattctaccaatcttacttgacaatggaagatctaataaagctaaatgaagacttgtttaagaagattataacagatctgactaacaatttaacaataaagcagtatctacctgaatcactgttggagttagaagacatattgaaaagtaacaattggaaatttaagagagttgaatttttacctacgttatcaaaggagctaggcgttgacctttcacaagtaaaaatagaggattcaaagcaattgctggaagtcattcctcaaaaatacaagggccagttttttggaaagtcatcttcgtattcttcttcccaaatattaaacagattatgttccgagctaattgaggaaaaatattgtaatagtagtcatcctactattatatatcaccacccagcggtgatatctcccctagccaagagtaatcccgatgattcgcggacgacaaagaggtttgagttatttataaaaggtagagaatatagcaatgcttatgaagaagagaactgccctcaagtccagttagaaaaatttgagcaacaggcgcgcatgaaagaggactacggagataatgacactctgagttcgatagatcaagagtacatcaatgcgatgaagtggggtatgccacccataggtggcttcggccttggaattgatcgcctgtgcatgcttatcactggatgccaacgtattgaacaagtactgccatttggaaccctggatgacgtaaatagacagtaa

SEQ ID NO: 30088 - protein, 543 aa, Candida glabrata CBS 138
MLRIVGARLLYASSRIRIGRGLASKVAIDSSNLEFTKRNELVLSSLDRYYPSMSSIERGNLVSIDIFLKKYGSTSEDQLNKINQKISLCGRIKSIRFSGKKMAFIDLVDGIHGIQLILNCREIGNSATFESELSFLRKGDYVMTTGLPRLSKSRMKNISLRCTDLPKILSVAQMPLPPKLIDTVKSNSNKVVDYQINGFQNIRIRSSILKSIRNFLEERDFIEVETPILSSKSNGAVAKPFMSSSKDFDKLMLRVAPELWLKRLIISGCNKVFEIGKSFRNEGIDGSHNPEFTTLEFYQSYLTMEDLIKLNEDLFKKIITDLTNNLTIKQYLPESLLELEDILKSNNWKFKRVEFLPTLSKELGVDLSQVKIEDSKQLLEVIPQKYKGQFFGKSSSYSSSQILNRLCSELIEEKYCNSSHPTIIYHHPAVISPLAKSNPDDSRTTKRFELFIKGREYSNAYEEENCPQVQLEKFEQQARMKEDYGDNDTLSSIDQEYINAMKWGMPPIGGFGLGIDRLCMLITGCQRIEQVLPFGTLDDVNRQ

SEQ ID NO: 30089 - DNA, 1776 bp, Candida glabrata CBS 138
  CDS (1)..(1776)
atgtctcaggaagaagccaccaaagctgccactgaaggtgttgccaaccttcacttggatgaagtcaccggtgaaatggtgtccaagtccgagttgaagaagcgtatgaaggccagacaggtcgaggccaagaaggccgccaagaaagcctctgctcagccaaagccggagccaaagaagaagaagaacgaccttttggctgacctggacccatcccagtacttcgaggctagatcacgtcaaattctggaattgagaaagacccacagcccaaacccatacccacacaagttccaagtctctatcagcaaccctgaattcttggccaagtatgcgcacttgaagagaggtgagactttgccaaacgaaatcgtcagcatcgccggtagaatccacgccaagagagaatccggttccaagttgaagttctacgttctccacggtgacggtgtcgaagtccaagtcatgtctcaattgcaagactacgccgatgccgaggcttacgagaacgaccacgacttgatcaagagaggtgacattgtcggtgttgaaggttacgtcggtagaacccaaccaaagaaaggtggtgaaggtgaaatctctgtctttgttaagcgtattgaattgttgaccccatgtctgcacatgttgccagctgaccacttcggtttcaaggaccaagagaccagatacagaaagcgttaccttgacttgatcatgaacaaggactccagaaagagattcatcacaagatccaagattatcaagtacatcagaaagtttttggacaacagagactttatcgaagttgaaacccctatgatgaatgttattgccggtggtgccaccgccaagcctttcgttacacaccacaacgacttggacatggacatgtttatgagaattgccccagaattgttcttgaaggaattggttgtcggtggtatggaccgtgtctacgaaattggtagacaattcagaaatgaaggtatcgatatgactcacaaccctgaattcaccacttgtgaattttaccaagcttatgccgatgtttatgacctaatggatatgactgaattgctattttccgaaatggtcaaggaaatcaacggctcttacgttatcaagtaccacccagatccaaacaacccagaaaaggaaatggaattgaacttcgctagaccatggaagagaatcaacatgattgaagaattggagaagagattcaatgttacattcccagctggtgaccaactacatactaaagaaactggtgagttcttgcaaaaggtcttgaaggacaacaacttggaatgtccaccaccaatcactaacgcccgtatgctagataagcttgtcggtgaattagaagacacatgtatcaacccaactttcatctttggtcacccacaaatgatgtctccattagctaaatactctagagatcaaccaggtttgtgtgaacgtttcgaagtcttcgttgctaccaaggaaatctgtaacgcttacactgaattgaatgatccatttgaccaaagagctcgtttcgaagaacaagccagacaaaaggaccaaggtgatgacgaagctcaattaatcgatgagaccttctgtaacgctttggaatacggtctaccacctactggtggttggggttgtggtattgatagattggccatgttcttgactgactctaacacaatcagagaagtcctattgttcccaactttgaagccagatgttctaagagatgaggttaagaaggaagagaactaa

SEQ ID NO: 30090 - protein, 591 aa, Candida glabrata CBS 138
MSQEEATKAATEGVANLHLDEVTGEMVSKSELKKRMKARQVEAKKAAKKASAQPKPEPKKKKNDLLADLDPSQYFEARSRQILELRKTHSPNPYPHKFQVSISNPEFLAKYAHLKRGETLPNEIVSIAGRIHAKRESGSKLKFYVLHGDGVEVQVMSQLQDYADAEAYENDHDLIKRGDIVGVEGYVGRTQPKKGGEGEISVFVKRIELLTPCLHMLPADHFGFKDQETRYRKRYLDLIMNKDSRKRFITRSKIIKYIRKFLDNRDFIEVETPMMNVIAGGATAKPFVTHHNDLDMDMFMRIAPELFLKELVVGGMDRVYEIGRQFRNEGIDMTHNPEFTTCEFYQAYADVYDLMDMTELLFSEMVKEINGSYVIKYHPDPNNPEKEMELNFARPWKRINMIEELEKRFNVTFPAGDQLHTKETGEFLQKVLKDNNLECPPPITNARMLDKLVGELEDTCINPTFIFGHPQMMSPLAKYSRDQPGLCERFEVFVATKEICNAYTELNDPFDQRARFEEQARQKDQGDDEAQLIDETFCNALEYGLPPTGGWGCGIDRLAMFLTDSNTIREVLLFPTLKPDVLRDEVKKEEN

SEQ ID NO: 30091 - DNA, 1554 bp, Kluyveromyces lactis NRRL Y-1140
  CDS (1)..(1554)
atgttgaggtcatatcacatccttcgcgggttccaaaggttacactcgaccgaggccggtgtcttggagtacaggacaagaaatgcagaaatatctaagaatttaaccaaatggtacccttctctatcaaatattccgaaacctacgatagatgtgtctcgtttcattaaagagtatgatggtttaaaggtagatgaccgttcaactacacatactttacgaggaaagatcaccaatatgagattctccggtaagaagattggtttcattaacctcttaaatgatgagaaatcgctgcaagtaattgttaacctcagtaaccttcccatgtctgttggtgagtttcaggcacacatgagaaagttcaagattggagatcacattcaagtaacaggatttccgggggtgtctcaaaagcagggaacattatcccttaaggtgaattcagaattgaaaatgctctctccagcacaaataccaattcctccaaagcttcttgattcgagcaaaagaaactctaataaaacgttggattacttggttaatggaacggaagcaatatacatacggcacttggtaactaaaagaatcagagaatggctctataagcaggagttcattgaagtggagacaccaataatctcttctaaatctaatggagctaatgccaagccttttattacccattgtactgccatcgataaggaacaaccgttcgaactacggatcgctcctgaattatggttgaaacggttatgcattggtggcatgaacaaaatctttgaaatcggtaaggtattcagaaatgaaggtatagattctacacataacccggaattcacaaccttggaattttatcagtgctatatcaatatggagcaacttatagaaatgagtgaatccctcttaatatatgtatgtcagggaatcgataaacccaaagcacaagaattattagaccaaattaaggccaacaatggtaaattcaaaagactggagttcttacctacattaacacaaaagacgggaatcgattttgacaatatggatttgaataatgccgaacttcttaaagaaaaattgagaaaagctaacatcagcatatcagaatcgtctgtatcgccacaacagattttggatgaactatgtggtaaatacattgaatcacagtgtgatactttgctgccgactatcatataccatcatcctacagtgttatctccattagcgaaaactgattccaataacgttcaaatcacaaaacgttttgaaattttcatcaaccgtaaagagtatatgaacgcatacgaggaagaaaattgccccgacttacaattggagaaattcactaatcaattggcatccaaaacccagttcaaagatgacgaaatgatggcggttgatctaccttatgttcaggctatgaagtacggaatgcctcccattggtggatttggtctgggtattgatagattgtgtatgctattggcagacacacagcgaattgaggaagttttaagttttgggacccttgacgatgtcaacaggcaataa

SEQ ID NO: 30092 - protein, 517 aa, Kluyveromyces lactis NRRL Y-1140
MLRSYHILRGFQRLHSTEAGVLEYRTRNAEISKNLTKWYPSLSNIPKPTIDVSRFIKEYDGLKVDDRSTTHTLRGKITNMRFSGKKIGFINLLNDEKSLQVIVNLSNLPMSVGEFQAHMRKFKIGDHIQVTGFPGVSQKQGTLSLKVNSELKMLSPAQIPIPPKLLDSSKRNSNKTLDYLVNGTEAIYIRHLVTKRIREWLYKQEFIEVETPIISSKSNGANAKPFITHCTAIDKEQPFELRIAPELWLKRLCIGGMNKIFEIGKVFRNEGIDSTHNPEFTTLEFYQCYINMEQLIEMSESLLIYVCQGIDKPKAQELLDQIKANNGKFKRLEFLPTLTQKTGIDFDNMDLNNAELLKEKLRKANISISESSVSPQQILDELCGKYIESQCDTLLPTIIYHHPTVLSPLAKTDSNNVQITKRFEIFINRKEYMNAYEEENCPDLQLEKFTNQLASKTQFKDDEMMAVDLPYVQAMKYGMPPIGGFGLGIDRLCMLLADTQRIEEVLSFGTLDDVNRQ

SEQ ID NO: 30093 - DNA, 1767 bp, Kluyveromyces lactis NRRL Y-1140
  CDS (1)..(1767)
atgtctcaacctcacgaagttgctgctgccactgaggccgtcgcaaatatgcatttggacgaacttactggtgaaatggtctccaagtccgaattaaagaagcgtattaagcaaagacaagtcgaagctaagaaggctgccaagaaggccactgctaaaccaactcctgagccaaagaagaaagcaaataccgatgcttttgctgatttggatccatctcaatacttcgaagctagatctagacaaattaacgaattgaggaagactcacagtcctaacccatatccacacaagttccaagtttctgttactttgccagaatttttgtccaaatatgccaacttgaagcgtggtgaaactttaccagaggaaaaggtttctattgctggtagaatccatgccaagagagaatctggttccaaattgaagttctacgttctgcatggtgatggtgtcgaagtccaagttatgtctcaattacaggactaccacaccgaatcttcatatgaagatgaccatagtctaatcaagagaggtgatatcgttggtgtcgaaggttatgttggtagaacttctccaaagaaaggtggtgaaggtgaaatttctgtctttgtttcccgtattcaacttttgaccccatgtttgcacatgttgccaaccgatcactttggtttcaaggaccaggaattgagatacagaaagagatacttagacttgattatgaataaggatgccagaaaccgcttcattactcgttctaagatcattagttacgttagaaagttcttggataccagaaactttatcgaagtggaaaccccaatgatgaacgttattgctggtggtgccactgcaaagccatttgttactcatcataatgatctagacatggatatgtacatgagaattgccccagaattgttcttgaaggaattagttgtcggtggtatggatagagtttacgaaattggtagacaattcagaaacgaaggtattgatatgacccacaacccggaatttaccacttgtgaattctatcaagcttacgctgatgtatatgacttgatggatatgacagaaattatgatctccgaaatggttaaggaaatcactggttcgtacgtcatcaagtatcacccagatccaaatgatgaaactaaggaactagaattgaacttcactagaccttggaagagaattaatatgattgaagaattagaaaatagattccatgtcacattcccagccggtgaccaactgcacactgctgaaactggtgaattcttgaagaaggtcttgaaggataacaagatggactgtgctccaccattgaccaatgctagaatgttggacaagttggttggagaactagaagacacttgtatcaatccaaccttcatctttggccacccacaaatgatgtctccattggctaaatactccagagatcaaccgggcctatgtgagagatttgaagttttcgttgccacaaaggaaatctgtaacgcttacactgaattgaacgatccattcgaccaaagagctcgtttcgaagaacaagccaaccaaaaggcccaaggtgatgacgaagcacaacttgttgatgaaactttctgcaatgcattggaatacggtttaccaccaactggtggttggggttgtggtattgatagattggccatgttcttggctgattctaacaccatcagagaagtcttgctattcccaactttgaaaccggaagtcgtcaaggaagaaaagaattag

SEQ ID NO: 30094 - protein, 588 aa, Kluyveromyces lactis NRRL Y-1140
MSQPHEVAAATEAVANMHLDELTGEMVSKSELKKRIKQRQVEAKKAAKKATAKPTPEPKKKANTDAFADLDPSQYFEARSRQINELRKTHSPNPYPHKFQVSVTLPEFLSKYANLKRGETLPEEKVSIAGRIHAKRESGSKLKFYVLHGDGVEVQVMSQLQDYHTESSYEDDHSLIKRGDIVGVEGYVGRTSPKKGGEGEISVFVSRIQLLTPCLHMLPTDHFGFKDQELRYRKRYLDLIMNKDARNRFITRSKIISYVRKFLDTRNFIEVETPMMNVIAGGATAKPFVTHHNDLDMDMYMRIAPELFLKELVVGGMDRVYEIGRQFRNEGIDMTHNPEFTTCEFYQAYADVYDLMDMTEIMISEMVKEITGSYVIKYHPDPNDETKELELNFTRPWKRINMIEELENRFHVTFPAGDQLHTAETGEFLKKVLKDNKMDCAPPLTNARMLDKLVGELEDTCINPTFIFGHPQMMSPLAKYSRDQPGLCERFEVFVATKEICNAYTELNDPFDQRARFEEQANQKAQGDDEAQLVDETFCNALEYGLPPTGGWGCGIDRLAMFLADSNTIREVLLFPTLKPEVVKEEKN

SEQ ID NO: 30095 - DNA, 1662 bp, Debaryomyces hansenii CBS767
  CDS (1)..(1662)
atggtatcttcaagaatgtggattaatagagctagaaggtatgttgtcggtaagggtggcatgagtctcaaccgcaagttaatgagtaccagtgagagtgaaacggtaaattatgctaacaggaaaactataatcgaacaaaagccccaagggtactatccgcccattgatacaatcagacccaatgatgctaaaagaagccgtataccgaactttagacagtcttttgagatggtagattttgttcagtatcctagcaaacggtatcctgagctatataatatagagggtaagatcacaagtatacgaaaatcggggaaagcgatgtacttcattgatttgatacaagacggggcaaaggtgcagataatggccagtaataagctcatgcaaatgacagcacaagaatttgatgatgcccatgcgtttttcagaaagggtgactttatttcgtgtgttggacatccctcagtcaccaacgtaggtgaattgtcattaaagctatgtagacccattaatttagcgtcaccgtgcttgaatctgatgacgattcccgacaagataaaagataggggtcttataaatagtaacagagttttggactacttggtgaacgccgatctgaagcaaaggctaatgataaaatccatcgtcattcaggcaatccggcaattttttgtaaagagagattttatggaagtccagacacctatccttggaggatatggaacgggagcaaatgcagagcccttcaagaccattctgaacgcgttgaaatccacaggggatggtagcaagtatttacagttgagagttgctcctgaactctggctaaagaagttagtaattagtggatttgataagatcttcgaaataggtcagaatttcagaaatgaaggcattgatctgacccataaccccgaatttaccacttgcgaattttaccaatcatttacaaatttgaatgaattgatgatattaacagaagaattatttgtggagatctttgatacattaaaggaaaagaagctatcactcgtggacgagcaactaccatcactttctgcattggccagtggcacttttccaaagtacgaattcattcctacattagaactgaagaccggtgttgcattaccaagcgagttgactgcggaaagcttgattgaatattataacagtataggtcttgaggttcccgtattaaaatctccatcgaatctccttgataatctctcatctatctatttggaatcaatttctcaggatacaaaaactcccattttcatatataatcaaccttcggtgttatctcctttagccaaatcggcaatacttgactatgacggaagaagttatgatatttctttgcgcttcgaattattcattcaaggtaaagaatacgtcaattcctatgaagaggaaaattctccatttgaacagtctaagaagtttaaactacaacaattgacaaaaacacagtttaatgataatgaaatgattatccctgattgggaatacataaagctgatggaatatggtttacctcctacgggtggatggggatgcggaatcgatcgtttatgtatgctcttctctgggagcgaaagaattgaagaagtgctttcttttggtaatattagagatgtcgttagacagtaa

SEQ ID NO: 30096 - protein, 553 aa, Debaryomyces hansenii CBS767
MVSSRMWINRARRYVVGKGGMSLNRKLMSTSESETVNYANRKTIIEQKPQGYYPPIDTIRPNDAKRSRIPNFRQSFEMVDFVQYPSKRYPELYNIEGKITSIRKSGKAMYFIDLIQDGAKVQIMASNKLMQMTAQEFDDAHAFFRKGDFISCVGHPSVTNVGELSLKLCRPINLASPCLNLMTIPDKIKDRGLINSNRVLDYLVNADLKQRLMIKSIVIQAIRQFFVKRDFMEVQTPILGGYGTGANAEPFKTILNALKSTGDGSKYLQLRVAPELWLKKLVISGFDKIFEIGQNFRNEGIDLTHNPEFTTCEFYQSFTNLNELMILTEELFVEIFDTLKEKKLSLVDEQLPSLSALASGTFPKYEFIPTLELKTGVALPSELTAESLIEYYNSIGLEVPVLKSPSNLLDNLSSIYLESISQDTKTPIFIYNQPSVLSPLAKSAILDYDGRSYDISLRFELFIQGKEYVNSYEEENSPFEQSKKFKLQQLTKTQFNDNEMIIPDWEYIKLMEYGLPPTGGWGCGIDRLCMLFSGSERIEEVLSFGNIRDVVRQ

SEQ ID NO: 30097 - DNA, 1782 bp, Debaryomyces hansenii CBS767
  CDS (1)..(1782)
atgtctgaagaagttgcgaaggttgctgaacaattacaaaaaacctatttggatgatgtcaccggtgaacaagtgtcgaaaaccgaattaaaaaagagacaaaagcaaagagccaatgacgctaagaaggcagaaaaggctgctaagagtgctgcttcagctccaaaggtcgctaagaagaaggatcaattagttgatttaaatccaaatcaatattttgaaatcagatctcgtcaaattgacgaattgaggcaagccaacctcgctgacggctccgctttcaacccttacccacacaagttccatgtttccattcagttaccggccttcgctgaaaagtacaaggatttgaagaagggtgaatctttgaaagatgttgaagtcaaggtcagtggtagaattatgggtaagagagaatctggatccaagttgaagttctacgttttgaagggtgatggtgttcaaattcagatcatggctcaagctcaggatgttgaaaatgctgaagaatacgaaaagatgcacgaatacttgagaagaggtgatattattggtgttactggttatcctggtagaacaagccctgccaagggtggtgagggtgaagtatccgttttcgccacttccgttcaattattgaccccatgtttgcacatgttaccaactgagcattatggtttcaaggatcaagaagccagatatagaaagcgttacttagatttgattatgaacgaatctaccagagatcgtttcaaggtcagatctcagatcatttctttcattcgtaagtttttagatactagagattttactgaagttgaaaccccaatgatgaatgttattgctggaggtgctactgctaaaccattcgttactcatcacaatgatttgaacatggatatgttcatgagaattgcgccagaattattcttaaaagaattagttgttggtggtatggatagagtctacgaaatcggtcgtcaatttagaaatgaaggtatcgatatgacccataacccagaatttaccacttgtgaattctatcaagcttatgccgatgtttatgacttaatggatatgactgaattacttttctccgaaatggtcaagaaaattactggtgattacaaggttacttaccatccagaaggtccagaaggtaaagctttgactttagatttcaccagaccatggaagagagtcaatatgatcgaagaattagaaaaggttttcaatgttaccttcccagctggtgatcaattgcataccgaagaaacaggtaaatttttgaaacaaatcttaatcgaccacaaattagattgttctccaccattaaccaacgctagaatgttagataagttggttggtgaattagaagacgcttctattaacccaactttcattttcggtcatcctcaaatgatgtccccattagccaagaaagatagagataatgttggtttatgtgaaagatttgaggtttttgttgctactaaagaaatttgtaatgcttacacagaattaaacgatccatttgatcaaagacaaagattcgaagaacaagctagacaaaaggctcaaggtgatgacgaagcacaaatggttgatgaaaccttctgtaacgctttggaatacggtttaccaccaaccgctggttggggttgtggaattgatagattagccatgttcttaactgactctaatactatcagggaagttttgttattcccaactttaaagcctgatgcattagttaaaggtgaagagacatctgataattag

SEQ ID NO: 30098 - protein, 593 aa, Debaryomyces hansenii CBS767
MSEEVAKVAEQLQKTYLDDVTGEQVSKTELKKRQKQRANDAKKAEKAAKSAASAPKVAKKKDQLVDLNPNQYFEIRSRQIDELRQANLADGSAFNPYPHKFHVSIQLPAFAEKYKDLKKGESLKDVEVKVSGRIMGKRESGSKLKFYVLKGDGVQIQIMAQAQDVENAEEYEKMHEYLRRGDIIGVTGYPGRTSPAKGGEGEVSVFATSVQLLTPCLHMLPTEHYGFKDQEARYRKRYLDLIMNESTRDRFKVRSQIISFIRKFLDTRDFTEVETPMMNVIAGGATAKPFVTHHNDLNMDMFMRIAPELFLKELVVGGMDRVYEIGRQFRNEGIDMTHNPEFTTCEFYQAYADVYDLMDMTELLFSEMVKKITGDYKVTYHPEGPEGKALTLDFTRPWKRVNMIEELEKVFNVTFPAGDQLHTEETGKFLKQILIDHKLDCSPPLTNARMLDKLVGELEDASINPTFIFGHPQMMSPLAKKDRDNVGLCERFEVFVATKEICNAYTELNDPFDQRQRFEEQARQKAQGDDEAQMVDETFCNALEYGLPPTAGWGCGIDRLAMFLTDSNTIREVLLFPTLKPDALVKGEETSDN

SEQ ID NO: 30099 - DNA, 1749 bp, Yarrowia lipolytica CLIB122
  CDS (1)..(1749)
atgtctgatattaaggaaactaccgaggctctggccaagacctatctcgacgaggagaccggcgagcaggtctccaagtccgaactcaagaagcgacagaagcttcgagatctggcccgaaagaaggccgagaaggctgccgcccagcccaagaccgagaagaaggagaagggccccaacgaggaggagctgacccccaaccagtactttgagatccgatctcgacagattgatgctctgcgacagtccaagactcccaacccttacccccacaagttcaacgtcactaccaaggtggacgagtttgtggagaagtacaagggtcttgctcgaggagagatcaagaaggacgaggaggtttctgttgctggccgagtgcacaccctgcgagctgctggctctaagctgcgattctacgttctccaccaggagggcaagaccgtgcagatcatggcccagggccaggacaatgagggtgactggggtatccatgatctgatccgacgaggagatgtcattggtatccgaggttaccccggccgaaccgagcccaagaagggtggtgagggtgagctttccgtcttttgcaaggagctcgtgctgctgaccccctctctgcatatgctgcctacccaccagtctggctttaaggacgttgagacccgattccgacagcgataccttgatctgatcatgaacgactccacccgagagcgattcattgtgcgatccaagatcatccagtacatccgaaagttcctggacaacaaggacttcattgaggtcgagacccccatgatgaacatcattgccggaggagccaccgccaagcctttcgtcacccaccacaacgacctcaacctcgacatgtacatgcgaatcgcccccgagctgtacctgaagcagcttgtggttggaggtatggagcgagtctacgagattggccgacagttccgaaacgagggcattgatcagacccataaccccgagttcacaacctgtgagttctacgaggcctatgccgacgtctacgacctcatggagaccaccgagctgctcttctccgagatggtcaaggagatcaccggaggatacaaaattgagtaccagccccagggccccgagggcgagactctcaccattgacttctctcgaccctggaagcgactcgacattatcggcactcttgaggagaagctgggtgtcaagttccctcctggagatcagctgcacaccgctgagaccaaccagttcctgcaggagcagctcaagaaggtcggtcttgtctgcactcctcctcttaccaatgcccgaatgctggacaagctgattggcgactacctggaggacacctgtatcaaccccaccttcctgtacggccatcctgagatgatgtctcctctggccaagtactctcgagaccgacccggtatctgtgagcgattcgaggtctttgtggccaccaaggagatctgtaacgcctacaccgagttgaacgatccctttgaccagcgacagcgattcgaggagcaggctcgacagaaggacgccggtgacgatgaggctcagcttgttgacgagaccttctgcaccgcccttgagtacggtctgccccctactgccggatggggttgtggtgttgatcgactcaccatgttcctgaccaactccaacactatcaaggaggttcttctgttccccgccatgaagcctgaacagacctccgataagaaggagcagcaggagtag

SEQ ID NO: 30100 - protein, 582 aa, Yarrowia lipolytica CLIB122
MSDIKETTEALAKTYLDEETGEQVSKSELKKRQKLRDLARKKAEKAAAQPKTEKKEKGPNEEELTPNQYFEIRSRQIDALRQSKTPNPYPHKFNVTTKVDEFVEKYKGLARGEIKKDEEVSVAGRVHTLRAAGSKLRFYVLHQEGKTVQIMAQGQDNEGDWGIHDLIRRGDVIGIRGYPGRTEPKKGGEGELSVFCKELVLLTPSLHMLPTHQSGFKDVETRFRQRYLDLIMNDSTRERFIVRSKIIQYIRKFLDNKDFIEVETPMMNIIAGGATAKPFVTHHNDLNLDMYMRIAPELYLKQLVVGGMERVYEIGRQFRNEGIDQTHNPEFTTCEFYEAYADVYDLMETTELLFSEMVKEITGGYKIEYQPQGPEGETLTIDFSRPWKRLDIIGTLEEKLGVKFPPGDQLHTAETNQFLQEQLKKVGLVCTPPLTNARMLDKLIGDYLEDTCINPTFLYGHPEMMSPLAKYSRDRPGICERFEVFVATKEICNAYTELNDPFDQRQRFEEQARQKDAGDDEAQLVDETFCTALEYGLPPTAGWGCGVDRLTMFLTNSNTIKEVLLFPAMKPEQTSDKKEQQE

SEQ ID NO: 30101 - DNA, 1836 bp, Apis mellifera
  CDS (1)..(1836)
atgctatataacataaccaaaacttttgttgacgtggtattgccggtattttataaaacaaaaccaataaaattacgtcaaatatcagtatgtcatttttacacaaatgaattaaaaaggcgtttaaaagcagaacaaaaattgaaggaaaaagcagaaaaagaagcaaaagcatttgttgaaaaaccaataaaagataaagtcaaaactcaagacaaaaaggaaattaaagaagaggaaattagtccaaatgaatatattaaacttagaacacaagcaatcaatcatcttaaaaatacaaatgatattccatacccacataaatttcatgtatcaatttcattggaaaattttattgaaaaatttagtaataatttgaaacctggggaaatattaaacaatgaagtacatagtatagctggacgtgtacatgcaataagagaatcaggtgctaaacttattttttttgaccttagaggagaaggtgttaaaattcaagtaatggcaaatgcaaggcactataaaaatgaagaaaaatttactcctgatatttctaagataagaagaggtgatattattggtgtagttggaaatcctggaaaaactaagaagggtgaattttctattatgccacatagtattattcttttgagtccttgtttacatatgttgccaaatctttattttggattaaaagataaggaaacaagatttcgtcaacgttatttagatcttatattaaatgataaagtaagaaaaactttccatatacgtgcaaaaatagtcgcatatgttcgcaaatttcttgacgaacttggatttttagaagttgaaacaccaatgatgaatataattccgggtggtgcaacagctaagccttttattacacatcataatgaattaaatatggatctatatatgcgcattgctccagaattatatcttaaaatgttggtaataggaggattagatagagtatatgaaattggcagacaatttagaaatgagggtatcgatctaacacataatccagaattcacaacttgtgaattttatatggcttatgcagattataatgacttaatgtctattacggaagatatgatatcaggaatgataaaatctattcatggtagttataaaataacatatcatccagatggaccggaaggtgaagcagtagaaattgattttactccaccatttaaacgactttcaatgataaaaacattagaagaagttttaaaaattaaattaccttcagcagacaaattaaataattctgaaacaaatcaaatacttaatgatctttgtactaagtatgagattgaatgtcctccaccaagaacaacagctagattgttagataaacttgttggagaatttatagaagaaacttgtatcaatcctacatttattttggatcatcctcaaattatgtctccattggcaaaatggcatcgttctgaacagggattaacagaacgatttgaattatttattatgaagaaagaaatttgtaatgcatatacagaattgaatgatccaataattcaaagagaaagattcgaggaacaagcaaaagataaagcagctggagatgaggaagcacaagtcgttgatgaaactttctgtacagcattagaatatggtttaccaccaactgctggttggggaatgggaattgatcgtattactatgtttcttacagattcaaataatattaaggaagtattactattcccacaaatgaaaccagatgacccaaataaaaatcaaggaatatctgaagatgataaaacattaaatgataaaataaatcatgtggaaaagtga

SEQ ID NO: 30102 - protein, 611 aa, Apis mellifera
MLYNITKTFVDVVLPVFYKTKPIKLRQISVCHFYTNELKRRLKAEQKLKEKAEKEAKAFVEKPIKDKVKTQDKKEIKEEEISPNEYIKLRTQAINHLKNTNDIPYPHKFHVSISLENFIEKFSNNLKPGEILNNEVHSIAGRVHAIRESGAKLIFFDLRGEGVKIQVMANARHYKNEEKFTPDISKIRRGDIIGVVGNPGKTKKGEFSIMPHSIILLSPCLHMLPNLYFGLKDKETRFRQRYLDLILNDKVRKTFHIRAKIVAYVRKFLDELGFLEVETPMMNIIPGGATAKPFITHHNELNMDLYMRIAPELYLKMLVIGGLDRVYEIGRQFRNEGIDLTHNPEFTTCEFYMAYADYNDLMSITEDMISGMIKSIHGSYKITYHPDGPEGEAVEIDFTPPFKRLSMIKTLEEVLKIKLPSADKLNNSETNQILNDLCTKYEIECPPPRTTARLLDKLVGEFIEETCINPTFILDHPQIMSPLAKWHRSEQGLTERFELFIMKKEICNAYTELNDPIIQRERFEEQAKDKAAGDEEAQVVDETFCTALEYGLPPTAGWGMGIDRITMFLTDSNNIKEVLLFPQMKPDDPNKNQGISEDDKTLNDKINHVEK

SEQ ID NO: 30103 - DNA, 1584 bp, Aspergillus nidulans FGSC A4
  CDS (1)..(1584)
atgcgtattaggtcttgccgagtagcatgccggtcttttgtacctgggagatggtacagcaaggccacctcgtcgaaggaaggttcattgaagcaaactctctccaaagaagccctgtccaagaagcaggctttcgtgacgcggcttgctcaagtgacagaggcaacttcagacccgtatcctcgttttgagacacctgccaatccattcgctatttcggagttcatacatcgatacagctatttagccaacaaagaatttgtagattttgatcaagtcaccgtaaccggtagggttcatcctctgcaatttgagtcgcctggaacgggtaggggtctcaaagcagatattcaagagattctatcgtatgattcgccgcggcgatgccttttactgaaccagaacgcaacagctataacgggtaaaccgcaccgtacagaacggggtgagctctcgattgtggccacagacctgcctcaactcctctctccgtgtctgcatgatatcccgctcgatgcgcatggacacgaaaactctccatatccacgccatgttcagatgcttggtgacccggctacggtgaaagtcatcaagtccagatctctcattactcaacatatccgccagttcctactggataaatcatttatggaagtcagcactccaatactgaacgggattcctggcggtgcaagcgctcgtcctttttatacgtctgccaccgaattcccagatcggcagcttgcccttagaattgctcctgagctctggctgaaacgcctggtcgtgggcggtttcgatcgggtctttgagatcggcccgtcgttccggaatgaaggcctagacaaaacccacaacccggagttcacaacctgcgagttctaccaggcatactccaacctggaagagctgatgaacacaacagaagagctcctatgcgggctagcgcaggtcttcatcgcagagttcaacaaacgaaaggaaccgcccccaacagccatagatttcaccattccattccaccgtatcgattttataaccggaattgaactaggcattgaccgtcagttgcccgaccttacagcacctgactccttggaacaggtcacccaaatttttacggacctcaaactccaattacccgaacaccctaccctccctcgtctcctggatgagctctgcagcatctacgtcgagccacaatgcgttcagcccacatttatcatcaacccgcctgagtgtctctctccattatcgaagagtttcgttcaccctgataacaaccagcgcgttgctgcgcgtgcagaactcttcatcgaaggcaaagaaattgcgaacatgtatgaagaggaaaactcaccgtgggagcagcgtcgcaaattcgaggatcagctgaagtacagcaaggatgctaatgaacccggagaaattgatgaggagtatctcagggcgttggaatggggtttgccgcctacgggcggttgggggtgtggtatcgatcgtctggtcatgctgtttactaaggtgaagaagattgcagaggttttgccttttgggaatttgaggcatgtgacgagacgttga

SEQ ID NO: 30104 - protein, 527 aa, Aspergillus nidulans FGSC A4
MRIRSCRVACRSFVPGRWYSKATSSKEGSLKQTLSKEALSKKQAFVTRLAQVTEATSDPYPRFETPANPFAISEFIHRYSYLANKEFVDFDQVTVTGRVHPLQFESPGTGRGLKADIQEILSYDSPRRCLLLNQNATAITGKPHRTERGELSIVATDLPQLLSPCLHDIPLDAHGHENSPYPRHVQMLGDPATVKVIKSRSLITQHIRQFLLDKSFMEVSTPILNGIPGGASARPFYTSATEFPDRQLALRIAPELWLKRLVVGGFDRVFEIGPSFRNEGLDKTHNPEFTTCEFYQAYSNLEELMNTTEELLCGLAQVFIAEFNKRKEPPPTAIDFTIPFHRIDFITGIELGIDRQLPDLTAPDSLEQVTQIFTDLKLQLPEHPTLPRLLDELCSIYVEPQCVQPTFIINPPECLSPLSKSFVHPDNNQRVAARAELFIEGKEIANMYEEENSPWEQRRKFEDQLKYSKDANEPGEIDEEYLRALEWGLPPTGGWGCGIDRLVMLFTKVKKIAEVLPFGNLRHVTRR

SEQ ID NO: 30105 - DNA, 1821 bp, Aspergillus nidulans FGSC A4
  CDS (1)..(1821)
atgaccgactccaaccctgttcaggaggccgaggcctctatggccaaccttttgctcgatgaggtcactggcgagaaggtctcgaagtctgagctgaagagacgccagaagctgcgcgagaaggaagccaagaagaaggagaaggaggctgctgctcctcccaagcctgctgcgcaaaaaaaggtctccgctgaagacgaggaggcgaacttaactcctaaccaatactttgaaatccgcagcaagagaatcaacaagctccgagagaccaagcagccggacccctatccccacaagttccaagtcaccgatgacctccgcaaatacttgaaggagtatgagagcctcgcgaagggcgaacagaagccggatacgaccgttcggattgctggcagaatctacacaaagcgttcatctggtgcgaagctgattttttacgatatccgagctgagggtgtcaaggtgcaggtggtatgccaggctcagaacgcttcgggcgctgtttcgtttgaggaccagcacgagcacctccggagaggcgatatcgtcggtattgtcggtttccccggccgcagcaaccccaagaaccgaccggacggagagctgtccatttttgcgaccgaggtggttctgcttgctccctgccttcacgccattccttccgagcactacggcttccaagacaaggagcagcgctaccgccagcgttaccttgacttgatcatgaatgacaagtctcgcaacgttttcattacccgttccaagatggtcacgtacattcgcaacttcttcgaccagcgggactttgtcgaagtcgagactcctatgatgaacgccatcgccggtggtgcgacagccaagcctttcatcacccaccacaacgaacacgacatgaacctcttcatgcgtgtcgcccccgagctgtacctcaagatgctcattgtcggaggccttgagcgtgtttacgagcttggccgtcagttcagaaacgagggtgttgaccttacccacaaccctgaattcacaacctgcgagttctactgggcttatgctgatgtttacgacgtcatgaacctaacggaggagcttgtgtctggcctggtcaagcacatcactggtggctacgagaccaccttccacacacagactggcgaggaatacaaggtcaactggaaggccccttggaggcgagtggagatgattcccgctctagaggaagctactggcgagaagttcccacccggtgaccagctgcacactgctgaaactggcgagttcctcaagaaggtcctaaagaagactggagtcgagtgctcaccgcccctcaccaacgcccgtatgcttgacaagctcgttggcgagtttattgaagaaacatgcattaaccccaccttcatcactggccaccctcaaatgatgtctcctctggccaagtaccaccgccagaacgctggtctctgcgagcgttttgaggcattcgtctgcaaaaaggaaattgtcaatgcttacactgagttgaacgaccccttcgaccagcgtctccgcttcgaggagcaggctcgccagaaggaccagggtgacgacgaggctcagattatcgacgagaacttctgtactagcttggagtatggtctgcctcccacaggtggttggggtatgggcattgaccgcttggttatgttcttgacggataactacagcatcaaggaggttcttgccttccccttcatgaaggatgataagaccgcggctgagggcaagtcggcagccgaggttgttggcatccagccccagcccgaggagggaatccctcacaaatag

SEQ ID NO: 30106 - protein, 606 aa, Aspergillus nidulans FGSC A4
MTDSNPVQEAEASMANLLLDEVTGEKVSKSELKRRQKLREKEAKKKEKEAAAPPKPAAQKKVSAEDEEANLTPNQYFEIRSKRINKLRETKQPDPYPHKFQVTDDLRKYLKEYESLAKGEQKPDTTVRIAGRIYTKRSSGAKLIFYDIRAEGVKVQVVCQAQNASGAVSFEDQHEHLRRGDIVGIVGFPGRSNPKNRPDGELSIFATEVVLLAPCLHAIPSEHYGFQDKEQRYRQRYLDLIMNDKSRNVFITRSKMVTYIRNFFDQRDFVEVETPMMNAIAGGATAKPFITHHNEHDMNLFMRVAPELYLKMLIVGGLERVYELGRQFRNEGVDLTHNPEFTTCEFYWAYADVYDVMNLTEELVSGLVKHITGGYETTFHTQTGEEYKVNWKAPWRRVEMIPALEEATGEKFPPGDQLHTAETGEFLKKVLKKTGVECSPPLTNARMLDKLVGEFIEETCINPTFITGHPQMMSPLAKYHRQNAGLCERFEAFVCKKEIVNAYTELNDPFDQRLRFEEQARQKDQGDDEAQIIDENFCTSLEYGLPPTGGWGMGIDRLVMFLTDNYSIKEVLAFPFMKDDKTAAEGKSAAEVVGIQPQPEEGIPHK

SEQ ID NO: 30107 - DNA, 1785 bp, Candida albicans SC5314
  CDS (1)..(1785): transl_table=12
atgtctgaagaagttgataaagttgccgaacaagttcaaaaaacctatttggacgatgtcaccggtgaacaagtttccaaaaccgaattaaaaaaaagacaaaaacaaagagcaattgaagctaagaaagctgctaaagctgctgccactccagccaaaactaccactaaaaagaaagatgaattggctgatttgaatccaaatcaatttttcgaaatcagatctcgtcaaatttctgaattaagagagaaaaacaatgctgatccatcagctttcaacccataccctcacaaattcaatgttaccaccaaaattccagaatttgttgaaaaatacgcccatttgcaaagaggggaaactttgaaagatgtcactgtttccgttagtggtagaataatgaccaaaagagaatcaggatccaaattgaaattctacgttttaaaaggtgatggtgttgaagttcaaattatggcccaagctcaagatgctccaagtgttgaagctttcgaatcaatgcacgaaattttgagaagaggtgacattatcggtgttactggttatccaggtaaaactgctccagccaaaggtggtgaaggtgaattgtccgttttcgctaccaaagtccaattattgactccatgtttgcacatgttgccaactgaacattatgggttcaaagatcaagaagctagatacagaaaacgttacttggatttgattatgaacgattccagtagagaacgtttcagagttagatccaaaatcattcagtacatcagaaaattcttggacaacagagatttcgttgaagttgaaacaccaattttgaatgttattgccggtggggccactgccaaaccattcactactcaccataatgacttgaatatggaaatgttcatgagaattgctcctgaattgtttttgaaagaattggttgttggtggtatggacagagtttacgaaattggtcgtcaatttagaaacgaaggtatcgatatgacccataaccctgaattcaccacttgtgagttctatcaagcttatgctgatgtttacgacttaatggacatgaccgaattgatgttttccgaaatggttaaagaaatcactggtgattacgttatcaaataccacccagaaggtccatcaggtaaagaaatgactttggatttctccagaccatggaagagagtcaacatgattgaagaattggaaaaagtatacaatgttaaattcccagctggtgatcaattgcacactgctgaaactggggaattcttgaaaaaagtcttgaaagacaacaacttagaatgttctccaccattgaccaacgctagaatgttggataaattagttggtgaattagaagatgcatctatcaacccaacctttattttcggtcatccacaaatgatgtcgccattagccaagaaagatagaaacattcctggtttgtgtgaaagattcgaagtttttgtcgccactaaagaaatctgtaatgcttacacagaattgaatgatccatttgatcaaagagctagatttgaagaacaagccagacaaaaagcccaaggtgatgatgaagctcaaatggttgatgaaactttctgtaacgctttagaatatggtttaccaccaactgccggttggggttgtggtattgatagattggcaatgtttttgaccgactctaacaccattagagaagtattattgttcccaactttgaaaccagatgctttggtcttgaaaggtgaagaaccattaaaagatgaaaactaa

SEQ ID NO: 30108 - protein, 594 aa, Candida albicans SC5314
MSEEVDKVAEQVQKTYLDDVTGEQVSKTELKKRQKQRAIEAKKAAKAAATPAKTTTKKKDELADLNPNQFFEIRSRQISELREKNNADPSAFNPYPHKFNVTTKIPEFVEKYAHLQRGETLKDVTVSVSGRIMTKRESGSKLKFYVLKGDGVEVQIMAQAQDAPSVEAFESMHEILRRGDIIGVTGYPGKTAPAKGGEGELSVFATKVQLLTPCLHMLPTEHYGFKDQEARYRKRYLDLIMNDSSRERFRVRSKIIQYIRKFLDNRDFVEVETPILNVIAGGATAKPFTTHHNDLNMEMFMRIAPELFLKELVVGGMDRVYEIGRQFRNEGIDMTHNPEFTTCEFYQAYADVYDLMDMTELMFSEMVKEITGDYVIKYHPEGPSGKEMTLDFSRPWKRVNMIEELEKVYNVKFPAGDQLHTAETGEFLKKVLKDNNLECSPPLTNARMLDKLVGELEDASINPTFIFGHPQMMSPLAKKDRNIPGLCERFEVFVATKEICNAYTELNDPFDQRARFEEQARQKAQGDDEAQMVDETFCNALEYGLPPTAGWGCGIDRLAMFLTDSNTIREVLLFPTLKPDALVLKGEEPLKDEN

SEQ ID NO: 30109 - DNA, 1608 bp, Candida albicans SC5314
  CDS (1)..(1608): transl_table=12
atgctactgcaccgactaattcccagagtaataccgagagttggaaactttattaggccttttttggtttcacactatctgaccacgtcggatgccgacaatttaacatacgagaatagaaaagggatcatcaccaatgatggaaagaatcacgttgattccaagtattatcccctgctttcggtcgttcgtcaaagattagcaggaagtgaaaaattacgtgtcaaagaattttgtaaaaactttaaagacgttgttaaatttctggacatagataataaccgactgtgtgagatttatttgcttgaagggagaataactagtataagaaaatcaggcaaagctatgtattttattgacatagtccaagacgactgttcagtacagattatggcaacgaataaattaatggggatggatccgacggcttttaatgattgtcatagctttttcaaaattggcgattatattgctgttaggggttacgcttccagaacgaaaactggagaattgactttgaaattgaacaagcaaattgaaatgttgacgcctgttttgctgaaaatgccaaacagattagaggatcgtggcttgattaataataatagggttctaaactatctagtaaaccgagattccaaggatgcaataattgtcaagtcgaaagtcattcaagccattcgaaattttttactcgatagagattttttggaagtacagacaccaatattgagtggtcaaggcactggtgctaatgcaactccatttgtaacaaaattcaagggggaacccgtgcatttacgtgttgctccagaactatggttgaagaaattagtgattggtggatttgataaggtatttgaaattggcagtaactttaggaatgagggcattgatatgactcacaatcctgagtttgccacctgtgaattctatcaagcttacactagtttggatgaattaatgaaaatgacagaagatatgtttggttatgtttttgacaagttgggggttacagataaatttcctactggcaatttccccaaatacgagtttttgcctacgatcgaacaaaagaccggagtgtccattactgatttgactttggacggattggttaattatcataagagattggacttggcagtaccaccaaaccctaatccagttaaattgttgaataatttgtcagaaatatatttggaatcaatttgctcggaacatccaaataccccagtttttatatataaccagccagagattatgtcaccattggcaaaatcaattacagatgctgcgggcaatagaatttcatcgaggtttgaattatttataaatgccagagagatggccaatgcatatgaagaggaaaatgatccatgtaagcaattagagaaattcaaattgcaacaaaaaatgaaagctgattacaacgatcaagaaatgttgatcccagatcataattatgtttgggcaatggaatatggattgcccccaacaggtggttggggatgtggcatcgatagacttgcaatgttgattgcaggtgcaaatagaattgaggatgttctaacatttgggacattgctgtctgttttgaaaaattga

SEQ ID NO: 30110 - protein, 535 aa, Candida albicans SC5314
MLSHRLIPRVIPRVGNFIRPFLVSHYSTTSDADNLTYENRKGIITNDGKNHVDSKYYPSLSVVRQRLAGSEKLRVKEFCKNFKDVVKFSDIDNNRSCEIYLLEGRITSIRKSGKAMYFIDIVQDDCSVQIMATNKLMGMDPTAFNDCHSFFKIGDYIAVRGYASRTKTGELTLKLNKQIEMLTPVLSKMPNRLEDRGLINNNRVLNYLVNRDSKDAIIVKSKVIQAIRNFLLDRDFLEVQTPILSGQGTGANATPFVTKFKGEPVHLRVAPELWLKKLVIGGFDKVFEIGSNFRNEGIDMTHNPEFATCEFYQAYTSLDELMKMTEDMFGYVFDKLGVTDKFPTGNFPKYEFLPTIEQKTGVSITDLTLDGLVNYHKRLDLAVPPNPNPVKLLNNLSEIYLESICSEHPNTPVFIYNQPEIMSPLAKSITDAAGNRISSRFELFINAREMANAYEEENDPCKQLEKFKLQQKMKADYNDQEMLIPDHNYVWAMEYGLPPTGGWGCGIDRLAMLIAGANRIEDVLTFGTLSSVLKN

SEQ ID NO: 30111 - DNA, 2844 bp, Ustilago maydis 521
  CDS (1)..(2844)
atgaaagcacgtttgttcgctgctcggcccttttactcagtcgtgagtgcgacaatcacgaatgattcgctcggcgcgatacgccaagtgaagctaaaataccgcgggcgcgtttcgacgcttcacgattacgaatcacgaatcgcaaccacaatcacagattggcggcggataatttccaaggttgcgtcaggttgcgtcaagtgcgacgtcacagcgttacacattcgcgcatacgcattcacgattgatgcgctgttgggttcgagcccagaacgcaccgactaccaagtagagcggtcacagagtgtcgattttgcgccttcggattgcaacgctcgcgcccctcaaacgagaagacccgcatcgttggatcgtcctgccacgctcaggctcgtcgagaagcgtctggcgtcgcgtcgagtaggcatcaacgcatcaagcgtgcagcatatgggccttttgctttggcccattttcaatgagactcaccgcgttgatcctttcacgcaacccggtttggtcgcttggcctgatgctggtcacgatcaagtcacgagtcacgaccacgagcgtgtgactcgtgtgactagtgacgagtctgtgatgctgtcattcgagctcacactcatgactcgcacgtcaagtcaagtcgagtcaagcacaaagcacaaagcacaaagcacaaagcacaaagcacagagcacagagcacagagcacaagcgcgagagatacaaaatcagattccactcgtgactgtgactcgccgttgggagcggattctttttggtattcagacgtcggtcggaacgtctttctcgacaccatcatcacaccacgtcttagcttctctctcactgcacatcggtcgtgcgtgtcgtcttttggaaaacggaacgcaacattgcatgttcaagacgtttgcgcgttgtttgagcttcgttcccaaaaccgtacctttgactttctctcggtccgcacgtcgttggcctgcgcccacttacaagtgcttcgtgccaatctcgatccgcagtatgtcttccacggatgcccccaaccagcctggcgtcgaggctgtcaacctggtcaaggatgagctcacgggcgagatgatctccaagtcggagctcaagcgtcgactcaagctgcgcgaaaaggaggccaagaaagcggccaaggcggcagaagctcctgcgcagcctactactgcggcggtcaaatcggcggcggctgctgaagaagagctcaacccgaaccagtactacgagcgtcgattccgcaccatcagcgctctgcgcgagtccaagaatccggatccgtacccgcacaaattccacgtctcgatctcgctctccgagttcatctccaagtacgagggcaagctcgaggcagggcagcacctggaccaggaagaggtgagcattgcgggtcgtctgcacaacatgcgctcctccggccagaaacttcgcttctacgacctgcacggcgaaggcgtcaaggtgcaagtgacagctcagctgcaggaccatacggacggcgactttttcgcgatccacgagctgctccgtcgtggcgatgtggtgggtgttacgggcgtgcctggaaagacaaagaagggcgagctctcgatctttccgagctcgatcaagctgctctcgccgagtctcaagatgctgcccaaagcatctcaaggcgacaagggcggattcaccgacaccgagcagcgacaccgtaagcgatacttggatctcatcatgaacaatcacgtgcgcgatatctttgtgaagcgcgccaagatcatcaactacgtacgacgattcctggacaacctcggattcctcgaggtggagacgccgatgatgaaccagatcgcaggtggcgcgacagccaagccgtttgtgacgtaccataacgatctgaagctggatctgttcatgcggatcgcgccggagctcttcctcaaggagcttgtcgtcggcggtctagaccgcgtttacgagatcggacgtgtcttccgaaacgagtcgatcgaccagacgcacaatccggaattctcgatctgcgaattctacatggcgtacgccgacatgtacgacttgatggacattaccgagagcatgatctcgggtttggtcaaggcggtgacgggatcgtacaagatcaagtaccatccggatggaaaggacgtcgaggggggacgcgagtatgagatcgacttttcgacgccctggaagcgattcgacatgatcaaggaattggaagctgcgatgaacgtgagattccctccggcggatcagctgcataccgaagagacacgcaagtggctttcggatctagcggctaagcacaatgtggactgttcggagccacgcacgtcttcgcggctgatcgacaagatgacgggcgaattcatcgagacgcagtgcatcaatccgagctttatcgttggacatccgcaggtcatgtcgccgctcgccaagcgacatcgcgatatcccggggctctgtgaacgattcgaggtgtttgttgctacaaaggagatctgcaatgcctataccgagctcaacgatccttgggtacagcgcgcgaatttcgaggaacagagccgtcagaaggaccagggcgatgacgaggcacagggcatcgatcatgtctttatcgacgccctcgaacacggcctgcctccaaccggtggctggggcctcggcatcgacagactcgtcatgttcctcaccgactccaactcgatcaaggaggtcctcgctttccctgccaacaagccactccctacagacaacaagcctgcccccatccctgacactctcccccacccgaactcctaa

SEQ ID NO: 30112 - protein, 947 aa, Ustilago maydis 521
MKARLFAARPFYSVVSATITNDSLGAIRQVKLKYRGRVSTLHDYESRIATTITDWRRIISKVASGCVKCDVTALHIRAYAFTIDALLGSSPERTDYQVERSQSVDFAPSDCNARAPQTRRPASLDRPATLRLVEKRLASRRVGINASSVQHMGLLLWPIFNETHRVDPFTQPGLVAWPDAGHDQVTSHDHERVTRVTSDESVMLSFELTLMTRTSSQVESSTKHKAQSTKHKAQSTEHRAQAREIQNQIPLVTVTRRWERILFGIQTSVGTSFSTPSSHHVLASLSLHIGRACRLLENGTQHCMFKTFARCLSFVPKTVPLTFSRSARRWPAPTYKCFVPISIRSMSSTDAPNQPGVEAVNLVKDELTGEMISKSELKRRLKLREKEAKKAAKAAEAPAQPTTAAVKSAAAAEEELNPNQYYERRFRTISALRESKNPDPYPHKFHVSISLSEFISKYEGKLEAGQHLDQEEVSIAGRLHNMRSSGQKLRFYDLHGEGVKVQVTAQLQDHTDGDFFAIHELLRRGDVVGVTGVPGKTKKGELSIFPSSIKLLSPSLKMLPKASQGDKGGFTDTEQRHRKRYLDLIMNNHVRDIFVKRAKIINYVRRFLDNLGFLEVETPMMNQIAGGATAKPFVTYHNDLKLDLFMRIAPELFLKELVVGGLDRVYEIGRVFRNESIDQTHNPEFSICEFYMAYADMYDLMDITESMISGLVKAVTGSYKIKYHPDGKDVEGGREYEIDFSTPWKRFDMIKELEAAMNVRFPPADQLHTEETRKWLSDLAAKHNVDCSEPRTSSRLIDKMTGEFIETQCINPSFIVGHPQVMSPLAKRHRDIPGLCERFEVFVATKEICNAYTELNDPWVQRANFEEQSRQKDQGDDEAQGIDHVFIDALEHGLPPTGGWGLGIDRLVMFLTDSNSIKEVLAFPANKPLPTDNKPAPIPDTLPHPNS

SEQ ID NO: 30113 - DNA, 1893 bp, Cryptococcus neoformans var. neoformans B-3501A
  CDS (1)..(1893)
atgctcagagccgtaatccgcactgcaacctctaccagacaggccaccacctacgcccctaaattcaaaccccaaataccgctcagaagaacgttcataatgtctgcccctgccgctgaggccaacttgcacaaggacgaagttaccggagaaatgatctccaagtctgagctgaagcgaaggcaaaaagaacgacagagggccgctcagaaggctgagaaggctgctgctgctcctgccgcagctcagcctaagaagcaatctaaagccgacgccgaggctgagatggacgccactgctttccacgagatgcgatacaaggagattgccaagcttcgagagaccaagcagcccaacccttaccctcacaagttcaacgtcactcacgctgtccccaagtttgtcgaggagtggggcaaggaaggcaagttggaaaagggtgaaactgcccagcttaatgagcctatttccctcgctggtcgagtctacactatccgcgaatcctcttccaagttgaggttctacgacctcaaggccgacggtgttaaggttcagattatggctcaggcccaaaacgctgcttctctcgaagagtacctcgacactcacgaccggattcgacgcggtgacatcattggcgtcactggtattccctctcgaaccaagatgggagagctttccctttccatctcttctattcagctcctttccccctgtcttcacctcctgcccggtagggaaggtgttgtcgacctcgagacaagatacaggaagaggtatcttgacttgattatgaaccccagcacccgagacatctttgtcacacgttccaaggtcatcaactacatccgaaagtaccttgacgcccaaggtttcctcgaagttgagactcctatgatgtccatgattgctggcggtgccaccgccaagcccttcgtcacccatcacaacgacctcaagctcgacttgttcatgcgtatcgcccccgagctttacctcaaggagctcgtcgtcggtggtcttgaccgggtcttcgaaatcggccgtgtcttccgaaatgagcagatcgatatgacacataaccccgagttctccatctgtgaattctacatggcctacgctgacatgtacgacatcatggacatgaccgaggaattgattgagggcatggtcaagtccctcacaggtggtaccaaattgactttccaccctcaaggtaaaggtgaaggcaagaaggtttacgaggttgacttcgccaggccttggaagaggtttgacatgattggggagttggagaagcaattgaacgttaagttccccccgggagaaaccttgcacgatgacaataccaacaagttcctccgtgaactctgtgagaagcacaacgttgattgcgccgagcccaagaccaactctcgtctccttgacaagctcgttggtgagtatatcgaaaatcaatgtgtcaacccttccttcattgtcggccacccccaggtcatgtcccccttggccaagtacgaccgatctcgccctggactttgtgagcgattcgaggcgttcttatgtactaaggagatttgcaatgcctacactgagttgaacgaccccttcgatcaaagagagagattcatggagcaggtcaggcagaaggagcagggtgacgaggaagcccagggtgttgacgagactttcctcgatgctctcgagtacggtctcccacctacaggtggctggggtcttggtatcgaccgtcttgtcatgttcctcaccgactgctccaacatcaaggaagtccttcttttccccgctatgcgacctatcgttgccaactctgttgaggctgttgctcccagtgttaccgctacggaggccgccaaggaggccaaggcttaa

SEQ ID NO: 30114 - protein, 630 aa, Cryptococcus neoformans var. neoformans B-3501A
MLRAVIRTATSTRQATTYAPKFKPQIPLRRTFIMSAPAAEANLHKDEVTGEMISKSELKRRQKERQRAAQKAEKAAAAPAAAQPKKQSKADAEAEMDATAFHEMRYKEIAKLRETKQPNPYPHKFNVTHAVPKFVEEWGKEGKLEKGETAQLNEPISLAGRVYTIRESSSKLRFYDLKADGVKVQIMAQAQNAASLEEYLDTHDRIRRGDIIGVTGIPSRTKMGELSLSISSIQLLSPCLHLLPGREGVVDLETRYRKRYLDLIMNPSTRDIFVTRSKVINYIRKYLDAQGFLEVETPMMSMIAGGATAKPFVTHHNDLKLDLFMRIAPELYLKELVVGGLDRVFEIGRVFRNEQIDMTHNPEFSICEFYMAYADMYDIMDMTEELIEGMVKSLTGGTKLTFHPQGKGEGKKVYEVDFARPWKRFDMIGELEKQLNVKFPPGETLHDDNTNKFLRELCEKHNVDCAEPKTNSRLLDKLVGEYIENQCVNPSFIVGHPQVMSPLAKYDRSRPGLCERFEAFLCTKEICNAYTELNDPFDQRERFMEQVRQKEQGDEEAQGVDETFLDALEYGLPPTGGWGLGIDRLVMFLTDCSNIKEVLLFPAMRPIVANSVEAVAPSVTATEAAKEAKA

SEQ ID NO: 30115 - DNA, 1527 bp, Prochlorococcus marinus str. MIT 9303
  CDS (1)..(1527): transl_table=11
atggcgaggtcagtcctgagtgccttgtctgagctgcgtgagactcgcctggaaaaggcacaagccctcaaagagctggggaatgggccttatgccctgcgctttgagtcaagccatcgcaccgctaacttgcaggcggatcatgctgatttggccaagggggaggagaggcttctcagtgtgtctgtggctggtcgggtgatggcccgtcgtgtcatgggcaagttggctttctataccttggcggatgagaccggcacgattcagttgtatttggacaaggccaccattgatgcggctgcatcaaatgagctggcttcaggaacttttgttcagctcaccactcttgttgacgcgggcgactggattggggtcacaggcgtgcttcgtcgcactgatcgtggtgagctttcggtgaaggttcagcagtggcagatcttgagcaaatcattgcaacccttgccggataagtggcacggtttagctgatgtggagaagcgctatcggcaacgctatctggatctaatcgtgtcgcctcagtcgcgtgagacttttcgccgccgggcattgatggtgagtgcaatccgtcgatggctcgatgatcgcgccttcttggaaatcgaaacaccggtgcttcaggctgaggccggtggcgccgaagctaggccattcattactcaccacaacacactcgatcttcctctttatctgcgtattgctacagagctgcatctcaagaggcttgtggttggtggttttgagcgggtctatgagcttgggcgcatctttcgtaacgaggggatgagtacccgccacaaccctgaattcacttctgtagaggtctatcaggcctatgcggattacatcgacatgatggtccttactgagcagctgatttcctcagtttgtactcagatctgtgggtctacgaggatcacttatcaaggtatagaaatcgacctaacgcccccttggcggagagccagcatgcacgaactggtgcaagaggcgacggggcttgatttcatgggttttgctgaccgtgcggtagcggcttcggctatggcgcgggcaggtctagaggttccgtctaaggccgatagtgtgggccgcttgcttaatgaggcctttgaacaagcagtggaggtaagtctgatccagccaacatttgtgctcgattatccgattgagatctcgcctcttgcccgacaacatcgcagcaaaccaggattggtcgagcgctttgaattgttcattgtgggtcgggaaacagccaatgcttttagtgagttaatcgatccccttgatcagcgtcagcggcttgaggctcagcaagcacgtcgtcaggctggggacctggaggctcatggggttgatgaggattttcttcaggcgcttgaggtgggcatgccccctaccggcggcttgggtattggcatcgatcgcttagtgatgttgttcaccgatagcccgtcaatacgtgatgtgattgctttccctctgcttcgaccggagctcaaaacttaa

SEQ ID NO: 30116 - protein, 508 aa, Prochlorococcus marinus str. MIT 9303
MARSVLSALSELRETRLEKAQALKELGNGPYALRFESSHRTANLQADHADLAKGEERLLSVSVAGRVMARRVMGKLAFYTLADETGTIQLYLDKATIDAAASNELASGTFVQLTTLVDAGDWIGVTGVLRRTDRGELSVKVQQWQILSKSLQPLPDKWHGLADVEKRYRQRYLDLIVSPQSRETFRRRALMVSAIRRWLDDRAFLEIETPVLQAEAGGAEARPFITHHNTLDLPLYLRIATELHLKRLVVGGFERVYELGRIFRNEGMSTRHNPEFTSVEVYQAYADYIDMMVLTEQLISSVCTQICGSTRITYQGIEIDLTPPWRRASMHELVQEATGLDFMGFADRAVAASAMARAGLEVPSKADSVGRLLNEAFEQAVEVSLIQPTFVLDYPIEISPLARQHRSKPGLVERFELFIVGRETANAFSELIDPLDQRQRLEAQQARRQAGDLEAHGVDEDFLQALEVGMPPTGGLGIGIDRLVMLFTDSPSIRDVIAFPLLRPELKT

SEQ ID NO: 30117 - DNA, 1530 bp, Clostridium difficile 630
  CDS (1)..(1530): transl_table=11
atgaaaaataatcaacaaagcaatgaagaagcgcaaattcaagaagaccttagtgaagtacttcaagtaagaagagataaactaaaaaaattacaagagtcaggtagagatccttttaaagaaagtagatatgatagaacgcattattctatggatataaaagataactttgattctcttgagggtaaaactacaaaaatagcaggacgtataatgagcaagagaatacaagggaaagctggctttatagatattcaagaccaagagggaagaatccaatcttatgtaagactagatgctataggagaggaagaatatagtgtattttcaacatatgatattggagatatagttggaattgaaggagaaatctttaaaactaaaaaaggtgaaatatctgtaaaggctaaatctgtagtattactatgtaaatctttacaagttttaccagaaaaatatcatggattaaaagaccaagaactaagatatagacaaagatatgttgacttaatagtaaatccagaagtaaaaaatgcttttttaattagaacaaaagcattaaaagcattaagagcatacttagatgatagaggatttttagaagttgagactccaatattaaatactatagcaggtggggcaaatgctagaccatttataactaatcataatactttacatataccaatgtatttaagaatagcgaatgaattgtatttaaaaagacttattgttggtggatttgataaagtttatgaaatgggaagaatgtttagaaatgaaggtatggatttaaaacataatcctgaatatactgcaatagaattatatcaagcatatgcagactatactgatatgatggaaataacagaaaatgttattgcacatatggctgaagttgctacaggaagtatgatagttaactatcaaggaacagaaataaactttacaccaccttggaaaagaatgagtatggaagattgtgttaaagaatattctggtgtagatttttctactataaatacagatgaagaggcactagaagttgctagagaaaaaggtatagagataaaacctggaatgagaagaggagaagtaataaatgctttctttgaagaatttggagaagataaattaatccaaccaacatttataactcatcatccagttgaagtatctccattatctaagagaaatgttgaagacccaagaagaactgatagatttgaggcatttgctaataagtgggagttagctaatgcattttctgaacttaatgaccctattgaccaaaaaggaagatttatagaccaattaagaaaaagagaattaggtgatgatgaagcttttgaaatggatgaagatttcttaaaagcattagaggtaggtctacctcctacaggaggactaggaataggtatagatagagtaattatgttattaactaactctccatctataagagatgtattattattcccgactatgaaacttattgataacaattcaaataaagaagaagaaaactaa

SEQ ID NO: 30118 - protein, 509 aa, Clostridium difficile 630
MKNNQQSNEEAQIQEDLSEVLQVRRDKLKKLQESGRDPFKESRYDRTHYSMDIKDNFDSLEGKTTKIAGRIMSKRIQGKAGFIDIQDQEGRIQSYVRLDAIGEEEYSVFSTYDIGDIVGIEGEIFKTKKGEISVKAKSVVLLCKSLQVLPEKYHGLKDQELRYRQRYVDLIVNPEVKNAFLIRTKALKALRAYLDDRGFLEVETPILNTIAGGANARPFITNHNTLHIPMYLRIANELYLKRLIVGGFDKVYEMGRMFRNEGMDLKHNPEYTAIELYQAYADYTDMMEITENVIAHMAEVATGSMIVNYQGTEINFTPPWKRMSMEDCVKEYSGVDFSTINTDEEALEVAREKGIEIKPGMRRGEVINAFFEEFGEDKLIQPTFITHHPVEVSPLSKRNVEDPRRTDRFEAFANKWELANAFSELNDPIDQKGRFIDQLRKRELGDDEAFEMDEDFLKALEVGLPPTGGLGIGIDRVIMLLTNSPSIRDVLLFPTMKLIDNNSNKEEEN

SEQ ID NO: 30119 - DNA, 1536 bp, Herminiimonas arsenicoxydans
  CDS (1)..(1536): transl_table=11
atgactacgcacaacgacgacgctgcagcatcgctaccgatagacgaaaacaaaatcatcgccgagcgccgggccaagctgagcgccttgcgcgaacaaggcatcgccttccctaacgacttccgcccacagcacaaggcggcggatctgcaggaaaagtacggcagcaagacgcgcgaagaactggaagctgaacctgtcaccgtggtgctggcaggccgcatgatgttgaaacgtgaggcgggtaaaaaagctgcattcgctacattgcaggacgcatccggttcgaaggctgacggccgcatccagatctatgtaacgctgaatctgaccggcgaagcggcgatggctgcactgcatcactacgacctcggcgatatcctgggtgtcagcggcacgctgttcaaaaccaagaccgacgagttgacgatcaaggtgtccgaactgcgcctgatcacaaaatcgctgcgcccgctgccggacaaattccacggtctcgccgatcaggaaaccaaatatcgccagcgttacgtcgatctgatcatgaacgaagacacgcgccgcaccttcaaggcgcgtactgccgcgatctcgtcgatccgccgtttcatggaaaggaacgatttcatggaagtggaaacgccgatgctgcacacgattccaggcggtgctgcagccaagcctttcaccacccatcacaatgcgctcgacatggagatgttcctgcgtatcgcgcctgagctgtatctgaaacgtctggtagtcggcggcttcgatcgcgtgttcgagatcaatcgcaacttccgcaacgaaggcgtatcgatccgtcacaatccggaattcacgatgatggaattctatgcggcctacaccgattacaaatggctgatggacttcaccgaagccgtgattcgccaggcggcaatcgatgcgcacggtacggcaacgctgacctacggcggtcgtgagctggatctggcaaagccgttccaccgtctgaccatcgttggcgcaatcaataaatttgcaccgcaatacacgcatgaacaattgcacgatgccgaatacatcaaggcggaattgaagaagttcggcgtaaaaccgcacgcacattccggcctcggcgcactgcagctggcattgtttgaagaaaccgccgaagcgcagctgtgggaaccgacttacatcatcgattacccggttgaagtgtcccctttggcgcgcgcatcggataccgtcgccggtattaccgagcgtttcgagttgttcatggtcggccgcgaaatcgccaatggcttctccgaattgaacgatgcagaagatcaggccgcacgctttcaggcgcaggttgcagccaaggatgccggcgatgaagaagcaatgtattacgacgccgactacatacgcgcactggaatacggcatgcctccaaccggcggttgtggcatcggtatcgatcgtctgatgatgatcatcaccgactcgccgaatatccgtgacgtactgctgtttccgcatctgcgacgcgaagattaa

SEQ ID NO: 30120 - protein, 511 aa, Herminiimonas arsenicoxydans
MTTHNDDAAASLPIDENKIIAERRAKLSALREQGIAFPNDFRPQHKAADLQEKYGSKTREELEAEPVTVVLAGRMMLKREAGKKAAFATLQDASGSKADGRIQIYVTLNLTGEAAMAALHHYDLGDILGVSGTLFKTKTDELTIKVSELRLITKSLRPLPDKFHGLADQETKYRQRYVDLIMNEDTRRTFKARTAAISSIRRFMERNDFMEVETPMLHTIPGGAAAKPFTTHHNALDMEMFLRIAPELYLKRLVVGGFDRVFEINRNFRNEGVSIRHNPEFTMMEFYAAYTDYKWLMDFTEAVIRQAAIDAHGTATLTYGGRELDLAKPFHRLTIVGAINKFAPQYTHEQLHDAEYIKAELKKFGVKPHAHSGLGALQLALFEETAEAQLWEPTYIIDYPVEVSPLARASDTVAGITERFELFMVGREIANGFSELNDAEDQAARFQAQVAAKDAGDEEAMYYDADYIRALEYGMPPTGGCGIGIDRLMMIITDSPNIRDVLLFPHLRRED

SEQ ID NO: 30121 - DNA, 1527 bp, Burkholderia vietnamiensis G4
  CDS (1)..(1527): transl_table=11
atgaccgaaccgacccaaacgcagcccgccgtcgcggcggacgaaaaccagatcattgccgagcgccgcgacaagctgcgcgcgttgcgcgagcaaggcgtcgcgtatccgaacgatttccggccgacgcatcacgccgccgagctccagtcgacctacgccgactcggacaaggctgcgctcgaagcgaacccggtcgaggtgtcggtcgccggccgcatgatgctcaagcgcgtgatgggcaaggcgagcttcgcgacggtgcaggacggttcgggccagatccagttcttcgtgacgccgaacgacgtcggcgcggaaacctacgacgcgttcaagaagtgggacctcggcgacatcgtcgccgcgcgcggcgtgctgttccgcaccaacaagggcgagctgtcggtgcagtgcaaggagctgcgtttgctggcgaaggcgctgcgcccgctgccggacaagttccacggcctcgccgaccaggaaatgcgctatcgccagcgctacgtcgacctgatcgtcacgccggagacgcgcgacacgttccgcgcgcgcaccaagacgatctcgtcgatccgccgcttcatggagaacgccgacttcatggaagtcgaaacgccgatgctgcacccgatcccgggcggcgcggcggccaagccgttcatcacgcatcacaacgcgctcgacatgcagatgttcctgcgcatcgcgccggagctgtatctgaagcggctgatcgtcggcggcttcgagcgcgtgttcgagatcaaccgtaacttccggaacgaaggtgtgtcgccgcgccacaacccggaattcacgatgatggagttctacgccgcgtacaccgactaccgctggctgatggacttcaccgagcagctgatccgccaggcggcgatcgatgcgctcggcactgcgacgatccagtatcaaggccgcgagctcgatctcgcgaagccgttccatcgtctgacgatcacgcaggcgatccagaagtacgcgccgcagtacaccgacggccagctgtcggacgacgcattcctgcgcaccgaactgaagcgcctcggcgtcgacgtgtcgcagccggccttcctgaacgccggcatcggcgcgctgcagctcgcgctgttcgaggaaaccgccgagtcgcaactgtgggagccgacctacatcatcgactacccggtcgaagtgtcgccgctcgcgcgcgcgtccgatacggtgccgggcatcaccgagcgcttcgagctgttcatgacgggccgcgagatcgcaaacggcttctcggagctgaacgatccggaagatcaggctgcacgcttcaagaagcaggtcgagcaaaaggacgcgggcgacgaggaagcgatgttcttcgacgccgactacatccgcgcgctcgaacacgggatgccgccgaccggcggttgcgggatcggcatcgaccgtctcgtgatgctgctgaccgacagcccgacgatccgcgacgtgctgctgttcccccatctgcgccgcgaagactga

SEQ ID NO: 30122 - protein, 508 aa, Burkholderia vietnamiensis G4
MTEPTQTQPAVAADENQIIAERRDKLRALREQGVAYPNDFRPTHHAAELQSTYADSDKAALEANPVEVSVAGRMMLKRVMGKASFATVQDGSGQIQFFVTPNDVGAETYDAFKKWDLGDIVAARGVLFRTNKGELSVQCKELRLLAKALRPLPDKFHGLADQEMRYRQRYVDLIVTPETRDTFRARTKTISSIRRFMENADFMEVETPMLHPIPGGAAAKPFITHHNALDMQMFLRIAPELYLKRLIVGGFERVFEINRNFRNEGVSPRHNPEFTMMEFYAAYTDYRWLMDFTEQLIRQAAIDALGTATIQYQGRELDLAKPFHRLTITQAIQKYAPQYTDGQLSDDAFLRTELKRLGVDVSQPAFLNAGIGALQLALFEETAESQLWEPTYIIDYPVEVSPLARASDTVPGITERFELFMTGREIANGFSELNDPEDQAARFKKQVEQKDAGDEEAMFFDADYIRALEHGMPPTGGCGIGIDRLVMLLTDSPTIRDVLLFPHLRRED

SEQ ID NO: 30123 - DNA, 1497 bp, Dichelobacter nodosus VCS1703A
  CDS (1)..(1497): transl_table=11
atgagtcacaatgaaaaaatacaagatgaaaataagttgattgccgaacgccggcagaaattgcaaaaaatccgcgatacgcaaaaaattgcgtttcctaatgatgcgcgtcccacgcataaagccgcgcaattgcatcgcgattttgatcacggcgatgaagccgctttatcgcaagcaggaaccgttgccattgccggacgcatgatgggaaaacgggtgatgggaaaagccagttttgtgcatgttcaagatggatctggtgaacaaattcaattgtacgtttccagcgatgcgttaaccgaggaagtttatgaagaatttaaaacgtgggacgtcggcgacattatttttgcgtccggttctctttttcgcactaaaaccggcgagttaaccgtacaaacaaacgccattcgtttattaacaaaatcattgcgcccgttgccggataaattccacggtttaactgaccaagaaattcgttatcgtcaacgttatgtggatttaatggttaatgcgcaaagtcgcgatgtttttaaagcgcggtcaaaaattatcagttatatccgccatttctttgaagcgcgggactttttagaagtggaaacgccgatgatgcacccaattcccggtggcgccgcggcaaaaccgtttattacgcatcataatgctttagatatgccgctttatttgcgcattgcgccggaattgtatttaaaacggctggtggtaggcggttttgagcgcgtttttgaaattaaccgcaatttccgtaatgaaggcgtatccgcgcggcataatcccgagtttactatgttggagttttatcaagcttatgccgattacaacgatttgatggatttaagcgaagtattattccaaggtttggcgcaaaccattttgggcacgacgaaatttgattatcaaggaacggaaatcgatttttcacaattccgacgtttgccgatgcgcgatgccgtttgccaatacgttcccgaagcggcaaatattttagaagacgcgccgaaaatggtgcaattgttaaaagaaaaattccatattgacgcgggcaatgaaagcgattgcggcaaattgatgacgatgatttttgaagaaggcgtggaacatttattaattcaaccgacattcgtcatcgaatatccggcggtggtttcacctttatcacggcgcaatgatgaaaatccagacattaccgatcgttttgaactctttattggcggacgcgaaattgccaacggcttttccgaactcaacgatgccgaagatcaagccgaacgctttaaagaacaagctgctgcatttgaagccggcgatgaagaagcaatgcattatgacggtgatttcgtgcgcgcgttggaatacggtttgccgcccaccgcgggtcaaggcattggcattgatcgtttagtgatgttattgaccaatgcgccttcaattcgtgatgtgttgttattccctcatatgcgtcccgagtag

SEQ ID NO: 30124 - protein, 498 aa, Dichelobacter nodosus VCS1703A
MSHNEKIQDENKLIAERRQKLQKIRDTQKIAFPNDARPTHKAAQLHRDFDHGDEAALSQAGTVAIAGRMMGKRVMGKASFVHVQDGSGEQIQLYVSSDALTEEVYEEFKTWDVGDIIFASGSLFRTKTGELTVQTNAIRLLTKSLRPLPDKFHGLTDQEIRYRQRYVDLMVNAQSRDVFKARSKIISYIRHFFEARDFLEVETPMMHPIPGGAAAKPFITHHNALDMPLYLRIAPELYLKRLVVGGFERVFEINRNFRNEGVSARHNPEFTMLEFYQAYADYNDLMDLSEVLFQGLAQTILGTTKFDYQGTEIDFSQFRRLPMRDAVCQYVPEAANILEDAPKMVQLLKEKFHIDAGNESDCGKLMTMIFEEGVEHLLIQPTFVIEYPAVVSPLSRRNDENPDITDRFELFIGGREIANGFSELNDAEDQAERFKEQAAAFEAGDEEAMHYDGDFVRALEYGLPPTAGQGIGIDRLVMLLTNAPSIRDVLLFPHMRPE

SEQ ID NO: 30125 - DNA, 1470 bp, Synechococcus sp. WH 7803
  CDS (1)..(1470): transl_table=11
gtgtccgatctgcgtgagacccgcctcgagaaggtgtcagccctgcgcgaccagggccgggagccctacgccctcacctttgaccccagcgaccggatggctcggttgcagagcgaccatgccgatctgcccaagggtgaggagcgggattgtgcggtggctgtggccgggcgggtgatgacccggcgggtgatgggcaagcttgcgttcttcaccctggccgatgaaaccggcacgatccagctgtttctggagaaggcggcactcggcgaggccttcgctcagattacgtctctggtcgatgccggtgatctgatcggcgtgcgtggcacgttgcgccgcaccgaccggggggagttgtcggtgaaagtggcggagtggaccatgctcaccaagtctctgcagcccctgccggacaagtggcacgggctggcggacgtggagaagcgctatcgccagcgctatctcgatctgatcgtgaccccgcagtcgcgcgagacgttccgacgccgggcgctgaccgtgagtgcgatccgtcgctggctcgatgagcgcgagttcctcgagattgaaacgcccgtgctgcagtcggaggcaggaggagccgatgcgcgtccgttcatcacccaccacaacacgttggatctcccgctctacctgcgcatcgccaccgaattgcacctcaaacgcttggtggtgggcggttttgagcgggtctacgagctgggtcgcatcttccgcaacgagggggtgagcacccgccacaaccctgagttcacctcggtggaggtgtatcaggcctatgccgattacctggggatgatcgagctcaccgagtcgatgatcgcctcggtgtgcgagcaggtgtgcggcggcacgcggctcacctaccaaggcacggagatcgatctcaccccgccctggcgccgggcgacgatgcacgagctggtggaggaagccaccggcctcgacttcacggctttcgcggatcgggcggcggccgctgaagcgatgacggccaaggggttgccggtgccagacaaagccgattcggtgggccgtctgctcaatgaggcttttgagcatgccgtggaagccaatctgatccagcccaccttcgtgctcgactatcccgaggagatctctccgctcgcccgcaagcaccgcagcaagcctggcttggtggagcgcttcgagttgttcatcgttggtcgggaaacggccaatgccttcagcgagttgatcgatccagtggaccagcgcgggcgcctagaggctcagcaggcacgccgggccgccggtgatgaggaagcccagggggtggatgaggactttctgcaggccctggaagtgggcatgccccccactggaggcctgggcatcggcatcgaccgcctggtgatgctgctcacggacagtccctccatccgcgatgtgatcgccttcccgctgctgcgtcctgagggctga

SEQ ID NO: 30126 - protein, 489 aa, Synechococcus sp. WH 7803
MSDLRETRLEKVSALRDQGREPYALTFDPSDRMARLQSDHADLPKGEERDCAVAVAGRVMTRRVMGKLAFFTLADETGTIQLFLEKAALGEAFAQITSLVDAGDLIGVRGTLRRTDRGELSVKVAEWTMLTKSLQPLPDKWHGLADVEKRYRQRYLDLIVTPQSRETFRRRALTVSAIRRWLDEREFLEIETPVLQSEAGGADARPFITHHNTLDLPLYLRIATELHLKRLVVGGFERVYELGRIFRNEGVSTRHNPEFTSVEVYQAYADYLGMIELTESMIASVCEQVCGGTRLTYQGTEIDLTPPWRRATMHELVEEATGLDFTAFADRAAAAEAMTAKGLPVPDKADSVGRLLNEAFEHAVEANLIQPTFVLDYPEEISPLARKHRSKPGLVERFELFIVGRETANAFSELIDPVDQRGRLEAQQARRAAGDEEAQGVDEDFLQALEVGMPPTGGLGIGIDRLVMLLTDSPSIRDVIAFPLLRPEG

SEQ ID NO: 30127 - DNA, 1590 bp, Candidatus Protochlamydia amoebophila UWE25
  CDS (1)..(1590): transl_table=11
atgagttttatgacaaaaaaacctgattatcaccaacatgaagaataccaaaatcgcttacgtaaacttgttgaaatacgtcaatgcaagatagatccttatcccgctaaatatacaccaactcatacagcagaatctcttcatcaagaatacgatacaaaacaaattggacatagtgaagatgcagcttcaggatccacaccttttgtttgtttggctggccgtcttgtcctttttcgttccatgggaaaaaatgcctttggtcatctacaagatgaaacaggacgcatacaaatcatgtttaatcgggaccaaacgctagtcacgaactttgaacctagttctgaagaacccgaattatctccatataaatttatcgaaaaaaaaatcgatctcggagatatcattggagttgaaggctacttattccatactcaaaaaggagaactaactgtttttgtcaaacagctgactcttctttgtaaaactctacttccgcttgccgataaacatggtggactggctgataaagaattgcgttatcgtaaacgttggttagatttgatttcccatttagatgtagctaaagtttttcgtatccgtagtcatatcttgaaagaaatccgatcttactttgaccagtatcaattcctagaagtagaaacaccaatcctacaaagcatttatggaggagcagaagcccgcccctttatcacaaaattaaatgcgctggatcaagaaatgtttttacgcatttctttagaaattcctcttaaaaagttaattgtaggagggatgcataaagtttatgaaatggcacgtgtatttcgtaatgaaggcattgatcgcaatcataatcctgaatttaccttgttagaagcttatgcttcctattgggattatttcgatatgatgaactttgtggaaaatcttttcgaaaagcttgctctagacctctatggaaccacgaaagttccttatacagcacatgaaggagctgaaacaatttatatcgatatgaaagctccttggattcgattgactatgaaagaaagcattaaaaaatatgctaatctcgatcctaatgttttatctgatgaagagatgcgacatttattgctcgagagtgcacattgtgatcctaaaaaaattaaaggattgagtcgcggacttctgattgcggctttatttgaggtttttgtagaacctcatttaattcaaccccaccacatttacgaccatcccattgagacaacgcctctttgtaaaccacatcgtgatcttaaataccgcgaagaaggacttgttgaacgttttgaaagttttattttaacacaagaagtgtgcaattcttacagcgaattgaacgatcctgaaattcaacgtcatttgcttgagctacagtcagatcgccgtgaagctggtgatgaagaagctagtcccttggatgaagaatttattgaagcgatttgccaaggtatgcctcccacagggggaattggaattggaattgaccgactggtaatgatattaactaattctcattcgattcgggatgtcctttattttccttggatgaaaacaatttaa

SEQ ID NO: 30128 - protein, 529 aa, Candidatus Protochlamydia amoebophila UWE25
MSFMTKKPDYHQHEEYQNRLRKLVEIRQCKIDPYPAKYTPTHTAESLHQEYDTKQIGHSEDAASGSTPFVCLAGRLVLFRSMGKNAFGHLQDETGRIQIMFNRDQTLVTNFEPSSEEPELSPYKFIEKKIDLGDIIGVEGYLFHTQKGELTVFVKQLTLLCKTLLPLADKHGGLADKELRYRKRWLDLISHLDVAKVFRIRSHILKEIRSYFDQYQFLEVETPILQSIYGGAEARPFITKLNALDQEMFLRISLEIPLKKLIVGGMHKVYEMARVFRNEGIDRNHNPEFTLLEAYASYWDYFDMMNFVENLFEKLALDLYGTTKVPYTAHEGAETIYIDMKAPWIRLTMKESIKKYANLDPNVLSDEEMRHLLLESAHCDPKKIKGLSRGLLIAALFEVFVEPHLIQPHHIYDHPIETTPLCKPHRDLKYREEGLVERFESFILTQEVCNSYSELNDPEIQRHLLELQSDRREAGDEEASPLDEEFIEAICQGMPPTGGIGIGIDRLVMILTNSHSIRDVLYFPWMKTI

SEQ ID NO: 30129 - DNA, 1518 bp, Erwinia carotovora subsp. atroseptica SCRI1043
  CDS (1)..(1518): transl_table=11
atggctgaatcacaatcacagggtgccgatcaggcgcaagatctgaataatgaattaaaagcgcgtcgtgaaaagctggtgacgctgcgtgaaaacgggatcgcattcccgaatgatttccgccgtgacagcatctccgatcacttgcacgctgagttcgatgccaaagagaacgaagagctggaagaactgggtatcgaagtgaccgttgcgggccgtatgatgacccgtcgcatcatgggtaaagcctctttcgtaaccttgcaggacgtcggtggccgcattcagctgtatgtttcccgcgacgatctggcggaaggcatctataacgagcagttcaagaaatgggatctgggcgatatcctgggtgcgcgcggcaagctgttcaaaaccaaaacgggcgagctgtccattcactgtaccgagctgcgtctgctgaccaaagcgctgcgcccgctgccggataaattccacggtctggccgatcaggaaacccgctatcgtcagcgctatctggatctgatcgctaacgacgactctcgtaataccttccgcatccgttctaacgtgatggcggccattcgccgcttcatggtggataacggctttatggaagtggaaacgccgatgatgcaggtgatccccggcggcgcgtctgctcgtccgtttatcacgcaccataacgcgctggacattgacatgtacctgcgtattgcaccggaactgtatctgaagcgtctggttgtaggtggttttgagcgtgtgttcgagattaaccgtaacttccgtaacgaaggtgtttccccacgtcacaaccctgaattcaccatgatggaactttatatggcgtatgccgattataaagacctgattgtgttgacggaaaacctgttccgtacgctgacgcaggacgtgctgggctcgacgacggtggtgtacggcgatcagacattcgacttcggtaagccgtttgataagctgacgatgcgcgaagcgatctgtaaataccgtcctgaaaccaacgttgccgatctggacgatctggagaaagcgaccgcgatcgcactgtctctgggcatcaagatcgagaaaagctggggcttgggacgcatcgttaccgagatcttcgaagagacagcagaaagcagcctgatccaaccaaccttcatcaccgaatatccggctgaagtgtcgccgctggcgcgtcgtaacgatcagaactcggaaatcaccgatcgctttgagttcttcatcggcggtcgtgaaattggcaacggtttctccgagctgaatgatgccgaagatcaagcagagcgttttgctcagcaggtcaatgctaaagatgcgggcgatgacgaagcgatgttctacgacgaagactacgtgacggcgttggagcacggtttgccgccgacagcgggtctgggtattggtatcgaccgtatggtgatgttgttcacgaacagccacaccattcgcgacgtcatcctgttcccagcgatgcgtccgcagaaataa

SEQ ID NO: 30130 - protein, 505 aa, Erwinia carotovora subsp. atroseptica SCRI1043
MAESQSQGADQAQDLNNELKARREKLVTLRENGIAFPNDFRRDSISDHLHAEFDAKENEELEELGIEVTVAGRMMTRRIMGKASFVTLQDVGGRIQLYVSRDDLAEGIYNEQFKKWDLGDILGARGKLFKTKTGELSIHCTELRLLTKALRPLPDKFHGLADQETRYRQRYLDLIANDDSRNTFRIRSNVMAAIRRFMVDNGFMEVETPMMQVIPGGASARPFITHHNALDIDMYLRIAPELYLKRLVVGGFERVFEINRNFRNEGVSPRHNPEFTMMELYMAYADYKDLIVLTENLFRTLTQDVLGSTTVVYGDQTFDFGKPFDKLTMREAICKYRPETNVADLDDLEKATAIALSLGIKIEKSWGLGRIVTEIFEETAESSLIQPTFITEYPAEVSPLARRNDQNSEITDRFEFFIGGREIGNGFSELNDAEDQAERFAQQVNAKDAGDDEAMFYDEDYVTALEHGLPPTAGLGIGIDRMVMLFTNSHTIRDVILFPAMRPQK

SEQ ID NO: 30131 - DNA, 1500 bp, Mesoplasma florum L1
  CDS (1)..(1500): transl_table=4
atgtcagaaagaaaatttactgaacaagaattagttcgtagagctaaacttgaaaaattaattgaaaacaaatctaatccttatgaagttagcaagtatgtaagaacacattctttaaaagaattgattgaattatttggtggatatgaaaaagatgagttagcaactttacaacaaacagaaattagcattgcaggaagaattaaactttatcgtgaggctggtaataaagcagcattcttaaatattgaagatcaagattcagatattcaagtttatgtaagacaagacgaaattggtgatgcagcatttgctaacttcagagaactagatcttggagatattgttgggtttaaaggaattatgatgaaaacaaaccatggtgaactttcactaagagcaaaagaatatactttattatcaaaagctttaagacctttaccagataaacatgctggtattcaagacattgaagaaaaatacagaagaagatatgttgacttaatcacaaaccctgaatcaaaaagagtttttcaagcaagaactaaaattattagaacaatgcaacaaattcttgatgaacgtgggtatatggaagttgaaacacctattttgcacagtgtaaaaggtggagccgctgctaaaccttttattacacattacaatgctttagatgttgatgtatatttaagaattgcaacagagctacatttaaaaagattaattgttggtggatttgatggagtttatgaaattggaagaatctttagaaatgaaggaatgagcacaagacacaatccagaatttacttctttagaattgtatgttgcatatgaagatatgttcttcttaatggacttaactgaagaaatattcagaaaatgtaatgctgcagttaacgaatcatcagttatagaatatggtggacataaactagatttatcaaaaccatttaaacgcttacatatggttgatggaattaaacaagtgacaggagtagatttctgaaaagaaatgactgttgaagaagctctagagttagctaaaaaacataatgtgcatgttgaaaaacataattatacagttggacatattattaacttattctatgaagaatttgttgagtctacaattattgaaccaacttttgtttatggacatccaaaagaaatatcacctttatctaaatcgaatgctgaagattcaagattcactgatcgttttgagttgtttattgtcggaagagaatatgcaaatgcatttagtgaattaaatgatccaatcgatcaatatgatagatttaatgaacaaataaaagaagctgcggcgggaaatgatgaagcaactgaaatggacattgactttattgaagcgttggaacacgcaatgccaccaactgcaggtatcggatttggaattgatcgtttagttatgttattaacaaattctgaatcaattaaggatgtattattattcccacagttaaaaccaagagattaa

SEQ ID NO: 30132 - protein, 499 aa, Mesoplasma florum L1
MSERKFTEQELVRRAKLEKLIENKSNPYEVSKYVRTHSLKELIELFGGYEKDELATLQQTEISIAGRIKLYREAGNKAAFLNIEDQDSDIQVYVRQDEIGDAAFANFRELDLGDIVGFKGIMMKTNHGELSLRAKEYTLLSKALRPLPDKHAGIQDIEEKYRRRYVDLITNPESKRVFQARTKIIRTMQQILDERGYMEVETPILHSVKGGAAAKPFITHYNALDVDVYLRIATELHLKRLIVGGFDGVYEIGRIFRNEGMSTRHNPEFTSLELYVAYEDMFFLMDLTEEIFRKCNAAVNESSVIEYGGHKLDLSKPFKRLHMVDGIKQVTGVDFWKEMTVEEALELAKKHNVHVEKHNYTVGHIINLFYEEFVESTIIEPTFVYGHPKEISPLSKSNAEDSRFTDRFELFIVGREYANAFSELNDPIDQYDRFNEQIKEAAAGNDEATEMDIDFIEALEHAMPPTAGIGFGIDRLVMLLTNSESIKDVLLFPQLKPRD

SEQ ID NO: 30133 - DNA, 3363 bp, Propionibacterium acnes KPA171202
  CDS (1)..(3363): transl_table=11
gtgacatcgtccgaccccgtacctgagacacgagcggcatccgctgctcggccacgcaccggttctcgatcgacctcgaatccaaggtccactccggttgtcgtcatcccgcggcttatgaacatcgccgccctactcatcgtgttacgcctggtgtttagccgcaccacgtgggtggctatcgccaacaacgtgttctcgttgttcattttcccggttgacggtttcggttgggccggtgtcgtggtcctgttggtgctgtcggacgcgctgtcgcgacgtaaaaggttcgcctggtgggtgagcctcgtcgtgtttgggttgatgtggctggtggcggccgcgttctttatcatcgtggtcaccgaggttttcataggttggccgacagacacccttaacgacgttgatctggcggggtatctgttcaacgtgttttcggttggctggatcttggtggcattgttgactcatcgtcgcgactttgctgcgcacacggttcgcgccaatctcggacgagcggtcgtcgtactcgttggcggtctgttggctaccggatttattgggtggctattggtgtccctgaccggtggtgttggacggccacggaaccgcctggtgcacatcattactcgcatccttcaaggtagtggagcaggtatcgcccaggagccgacgtcgccgcactgggtgcaaggtgtggtctcattcctgctggccgtcgtgctggtggctgcgctcgtcgtcattttgcgttcccaacgcaatatcgcgatgatgagcctgtctgacgagctgagattacgccgccttcttgacgaaaatccggctgattcgctgggatattttgccctgcgccgtgacaaggctgtcgtcttttctcgcaacggtcatgccgccgtctgttatcgcacggaggctggggtggcgttggcgtcgggtgacccagttggcccggttgaccagtggcccggagccattgacgcatttcttgaggtcgcccacacctatggatgggttcctgccgtcgttggcacctcagaggaaggtgcgacgacatggaaccaggccggtttgagggcgatgcgcatcggcgacgaagccatcatctccccggctacgtttaatctcgatgatcctgatctcaagccggtgcgccatacggtcacgaaactgcgcgcgatgggatacacgactcgggttcgacgccatgaggacatcaatccgcaggagttgcacagcctgattgacctgactgataaatggcgtcaaaacggcgacgagcgcggcttctcaatggcgttgtctcggttgggggaccctctagatggtcgatgtgtcatggtggaggcgatctaccccgacgacggccctcgcgctggtcagacggccggtattctgtcctttacaccatggggtaatgacggcttgtccctcgacgtcatgaggcgagatctcgacggagcagataacggtgtgactgaacttatggtcgccggactcatggcggccgggccagaaattggcattcggcgggtgtccatgaatttcgcggtgttccgcgaggctattgaggaaggcgctcgagtgggtgcttccccggtgcgtcggcttaaccgctggttggtactggtggcatcgaagtggtttcagattgagcagttgtaccgttccaacgtcaagtacaagccgagctggcagacccgctaccttaatttcactgacacctctgatctggctcaggttggtctagcaatgggtattgctgagggtcagctcgatattcctaattggctttacccggtggaaccgccgccccagccgatatattcaattagcgggcatccagagattgccgaattcctggctgaagaacgcgcgccaattcttccgcagcgtcgtcttcccgaacaggttcgtactcgaatggcgacccgtgagcgtcttattgagtcgggggtggaggcctatccgcctgactgtaagcctgaccaccggctgggtgacgtcgccgtcgagctgactggccaggagatgaccgtttccggacgggtggatgcctgccgtgaccacggcggggtcatcttcgttgacctcttcgactggacaggtgcctgccagctagtcatggaacgtgacaccatgggcgtcgacagtctgcgcgacttccgtcatgcggtgtctttgggagatcacctcgttgcgactggaacagttggggcatcccgtaacgggacgctaagtctggagatgacgtcgtggcggctagcagcgaagtcgttgcgaccgctgccatcgagaagatcgggattcaatgacccagaggccaaggttcgtcagcgttatctcgacctcatcgtcaaccccagtgcgcgcgatcagctgcgtgctcgctcgaatgccatccgcgcggtgcgagaaaccctgctaagtcacgactacatcgaggttgagacgccgattctgcagacgatccacggcggggcgaatgcgcgtccattccacacccacatcaacgcctacgacctggacctttatctgcgcattgccccagagctgtacctcaagaggcttatggtcggcggggcgggacgagttttcgagattggtaggaacttccgcaacgagggtgccgacgctacccataatcccgaattcacgatgctcgaggcctaccaggcctatggcgattacgtccagatgcgtcacctcacgagggagatgatcctgtccgcagcccgcaacgccaccggtgggacggtcgtgcgcggacgtgaccgcaagggtgttgagcatgagatcgatttggctaacgaatggcatgtcatcactgtcaacgagggaatctcgcgcggtttgggggaggaagttactgccgatacccccaaagagacgctcatcgggtacgccaataagctcgggattgcgactttgccgaagtggagtcgaggcgatgtcgtcctggagttgcacgagcacttgagtgagcatgtcaccgtcgaaccgaccttcttctgcgacttcccgaccgacgtctccccgctgacacgacagcaccgcgatgacccgcgactggccgagaaatgggatctcatcatcttcggctccgaggtgggtactgcctatacggaactcgtcgatccggtgatccaacgggagcggtttacagcccagtccttgctcgctgcgggtggcgatccggaggcgatggagcttgatgaggacttcctggaggctctcgagtacgcgatgccgccttctggcggtatgggcatggggctggatcgtctggtcatgatgctgacgaatgcgtcaattcgcgagacgattagcttcccgctggtgcgtccgcgcaccttgtga

SEQ ID NO: 30134 - protein, 1120 aa, Propionibacterium acnes KPA171202
MTSSDPVPETRAASAARPRTGSRSTSNPRSTPVVVIPRLMNIAALLIVLRLVFSRTTWVAIANNVFSLFIFPVDGFGWAGVVVLLVLSDALSRRKRFAWWVSLVVFGLMWLVAAAFFIIVVTEVFIGWPTDTLNDVDLAGYLFNVFSVGWILVALLTHRRDFAAHTVRANLGRAVVVLVGGLLATGFIGWLLVSLTGGVGRPRNRLVHIITRILQGSGAGIAQEPTSPHWVQGVVSFLLAVVLVAALVVILRSQRNIAMMSLSDELRLRRLLDENPADSLGYFALRRDKAVVFSRNGHAAVCYRTEAGVALASGDPVGPVDQWPGAIDAFLEVAHTYGWVPAVVGTSEEGATTWNQAGLRAMRIGDEAIISPATFNLDDPDLKPVRHTVTKLRAMGYTTRVRRHEDINPQELHSLIDLTDKWRQNGDERGFSMALSRLGDPLDGRCVMVEAIYPDDGPRAGQTAGILSFTPWGNDGLSLDVMRRDLDGADNGVTELMVAGLMAAGPEIGIRRVSMNFAVFREAIEEGARVGASPVRRLNRWLVLVASKWFQIEQLYRSNVKYKPSWQTRYLNFTDTSDLAQVGLAMGIAEGQLDIPNWLYPVEPPPQPIYSISGHPEIAEFLAEERAPILPQRRLPEQVRTRMATRERLIESGVEAYPPDCKPDHRLGDVAVELTGQEMTVSGRVDACRDHGGVIFVDLFDWTGACQLVMERDTMGVDSLRDFRHAVSLGDHLVATGTVGASRNGTLSLEMTSWRLAAKSLRPLPSRRSGFNDPEAKVRQRYLDLIVNPSARDQLRARSNAIRAVRETLLSHDYIEVETPILQTIHGGANARPFHTHINAYDLDLYLRIAPELYLKRLMVGGAGRVFEIGRNFRNEGADATHNPEFTMLEAYQAYGDYVQMRHLTREMILSAARNATGGTVVRGRDRKGVEHEIDLANEWHVITVNEGISRGLGEEVTADTPKETLIGYANKLGIATLPKWSRGDVVLELHEHLSEHVTVEPTFFCDFPTDVSPLTRQHRDDPRLAEKWDLIIFGSEVGTAYTELVDPVIQRERFTAQSLLAAGGDPEAMELDEDFLEALEYAMPPSGGMGMGLDRLVMMLTNASIRETISFPLVRPRTL

SEQ ID NO: 30135 - DNA, 1515 bp, Leifsonia xyli subsp. xyli str. CTCB07
  CDS (1)..(1515): transl_table=11
atgaccgatacgccgacggaaacccctgagctcaccgacgaggagatcagcgagcagaaggccgtccggctcggcaagcgcgagcggctcatcgccggtgccggcgacctcggtggcggtgcgtacccggtacggctcccggtgacgacgacgattccggaggtacgcgagaagtgggggcacctcgccgcggacgaggtctctgcggagaccgtgggtgtcgcgggtcgcgtcgtcttcctccggaacaccggcaagctgtgcttcgctgtgcttcagtcgggagacggttcgcgcattcaggcgatggtgtcgctggccgaggtcggcgaggagtcgctggcgcgctggaaggagttcgtggacctgggcgatcatgtcttcgtctcgggcgaggtcatctccagccgtcgtggcgagctgtcgatcatggccgtgggctggcagatcgcctcgaaggcgatcctcccgctcccgaacctccacaatgagctgagcgaagagacgcgcgttcgctcccgttacctcgacctgatcgcgcgcgatcgagcccgccggaacgtcctcgatcgcgccgccgccgtggcgagcctccgcacgaccttcgccgacagcggttttatcgaggtcgagaccccgatgctgcaggtcatgcacggcggtgcctcggcccgtccgttcgtgacccactcgaacgccttcgacacggagctctttctccgcatcgcgccggagctctacctcaagcgcgccgtcgtcggcggcatcgaccgggtgttcgagatcaaccgtaacttccgcaacgagggagcggattccacgcacttgccggagttcgccatgcttgaggcgtaccaggcgtacggcgactacaacaccatcgccgacctgacgcaggcgctcatccagaacgcggcggtcgccgtctccggttcgcatgtcgtcacctgggcagacgggaccgagtacgacctcagcggcgactgggaccgcatccggatgtacgacagcctctcggaggcgctcggcgaggagatcaccccggagaccccgctgcagcggctgcgcgagcttgcggccgaggccggtgtcgagatcgagcacccactgcccggcaagtacgtggaggaactctgggagcatcatgtcaagagcgggctcgtccgcccgacgtttgtcatggacttccctgtggacaccagcccgctcgtgcgtgtacaccgttcgctcccgggcgttgtcgagaagtgggacctctacatgcgcggcttcgagctggctaccggctactcggaactggtggatccggtcgtccagcgcgaacgctttgtcgagcaggcgcgattggccgctgcgggcgacgacgaggcgatgcgcctggacgaggagttccttcgcgcgctcgagttcgggatgccgcccaccggcgggatgggaatgggcatcgaccgcttgctgatggccctgaccggcctcggcattcgtgagaccatcctgttcccgctcgtcaagtag

SEQ ID NO: 30136 - protein, 504 aa, Leifsonia xyli subsp. xyli str. CTCB07
MTDTPTETPELTDEEISEQKAVRLGKRERLIAGAGDLGGGAYPVRLPVTTTIPEVREKWGHLAADEVSAETVGVAGRVVFLRNTGKLCFAVLQSGDGSRIQAMVSLAEVGEESLARWKEFVDLGDHVFVSGEVISSRRGELSIMAVGWQIASKAILPLPNLHNELSEETRVRSRYLDLIARDRARRNVLDRAAAVASLRTTFADSGFIEVETPMLQVMHGGASARPFVTHSNAFDTELFLRIAPELYLKRAVVGGIDRVFEINRNFRNEGADSTHLPEFAMLEAYQAYGDYNTIADLTQALIQNAAVAVSGSHVVTWADGTEYDLSGDWDRIRMYDSLSEALGEEITPETPLQRLRELAAEAGVEIEHPLPGKYVEELWEHHVKSGLVRPTFVMDFPVDTSPLVRVHRSLPGVVEKWDLYMRGFELATGYSELVDPVVQRERFVEQARLAAAGDDEAMRLDEEFLRALEFGMPPTGGMGMGIDRLLMALTGLGIRETILFPLVK

SEQ ID NO: 30137 - DNA, 1512 bp, Desulfotalea psychrophila LSv54
  CDS (1)..(1512): transl_table=11
atgagcacagataataagacccttcaacaacgacgagaaaaagcagcagaacttgcagatctcggcgttaagctgtacgacaatacctttcatcccgcccacagtgtagcccaagttcttcccatgggagaatctctggtggcagagcagcacgacgaaagcacgacagagtattctgttgcgggccgggttatggccatgcgcaagtttggtaaggctgccttctttcaggtcatggacaagaccggccgtgttcagatctatatcaaaaaagatgtgatcggcgaagagatctttgctcaatttaaaaaatgggatatcggtgacattgttggtatcaagggtcacctctttaagaccaaggtgggcgaactctccatcgcagcgagtagcgtgcagatgatctccaaatccctccgccccctgcccgacaaatggcacggactgagcgatgtggagacccgttatcgtcaacgctatgttgacctcatcgttaccccggagagccgcgaagtcttccgcaaacgcggagagatcattcgtcatatccgtgatttcctcagcgaccgtggttttatggaagttgagactccgatgatgcaggctgttccaggtggtgccaccgccaagccctttaagacccatcacaatgcccttgatatggacctctacctacgggtagcacctgagctctatctcaagcgcctgcttgttggtggccttgagcgtgtatttgaaatcaatcgtaactttcgtaacgagggactctctacccgccataacccggaattcaccatgcttgaattctatcaggcctatgccacctacgaggatatgatggatatcaccgaagagatggtatctactgcctgtgaaaaggtgaatggttccatgcagatccaatatcaaggcaccgatgttaatctggcaccaccatggcaacgtatgaccatgcaggagtctctgaccaaggttgcaggcattgcccctgaaatcatggcagatgccgaggcaaccatcgccctggccaaagagaagggcatcagactcgaagagaccgcaggtcacggtaaggcgatgaccgaactcttcgaacttctggtggaagagaagcttatcgacccaacctttatcacctcctacccaacagaggtttctccacttgcccgccgtaacgacgaagacccaagcaccaccgatcgttttgagctcttcatcaccggtcgtgagttggccaatgccttcagtgagttgaacgatcccgtcgatcagtaccagcgttttgccaagcaaattgcagagcgtggcgatgacgaagagatccatccagagcttgatcacgactatatccgcgccctggaatacggcatgccttctgctgccggagagggtatcggcattgatcgcctgaccatgcttctgacagatagtccgtcaatcagagacgttatcttcttcccacatctcaaagccgagacaaagaagcaggacaaggaagtagaaaaaaaatag

SEQ ID NO: 30138 - protein, 503 aa, Desulfotalea psychrophila LSv54
MSTDNKTLQQRREKAAELADLGVKLYDNTFHPAHSVAQVLPMGESLVAEQHDESTTEYSVAGRVMAMRKFGKAAFFQVMDKTGRVQIYIKKDVIGEEIFAQFKKWDIGDIVGIKGHLFKTKVGELSIAASSVQMISKSLRPLPDKWHGLSDVETRYRQRYVDLIVTPESREVFRKRGEIIRHIRDFLSDRGFMEVETPMMQAVPGGATAKPFKTHHNALDMDLYLRVAPELYLKRLLVGGLERVFEINRNFRNEGLSTRHNPEFTMLEFYQAYATYEDMMDITEEMVSTACEKVNGSMQIQYQGTDVNLAPPWQRMTMQESLTKVAGIAPEIMADAEATIALAKEKGIRLEETAGHGKAMTELFELLVEEKLIDPTFITSYPTEVSPLARRNDEDPSTTDRFELFITGRELANAFSELNDPVDQYQRFAKQIAERGDDEEIHPELDHDYIRALEYGMPSAAGEGIGIDRLTMLLTDSPSIRDVIFFPHLKAETKKQDKEVEKK

SEQ ID NO: 30139 - DNA, 1488 bp, Symbiobacterium thermophilum IAM 14863
  CDS (1)..(1488): transl_table=11
atgctgtcccgagaggagcaactgcgggaggcgcgccgggccaagatgcgcaccctgcgggaagcgggggtcgatcccttcggcacccggttcggcgaccggcggctgatgggcgacctgcgccgccagtacggggaggcgtctgccgaggagctggacgccgcacggattcccgcgcgggtggcgggccgggtcgtcaccgtccggtcccacggcaagatcgggttcgcccacctgcaggatggctccggccggctgcagatctacctgcggcttccggagctgagcgaacgggagcgcctggtctgggagcacctcgacctgggcgacatcgtcggcgcggagggggtcctgatgcgcacccgcaccggcgagctgacggtgaaggtggagtcgctgaccatgctgaccaaggcgctcagaccgctgccggacaagcatgccgggttgcgggacgtggagctccgctaccgggagcgccacctggacctgctggtcaaccccgagagccgggccgtcttcgaggcgcggtcccgcatcgtcgccagcctgcgccgcacgctggacgagctgggcttcatcgaggtggagaccccggtgctggtgccgctggcgggcggagcggccgcccgccccttcctgacctaccacaacgccctggaccggcagctctccctccgcatcgccacggagctgcacctgaagcggctggtggtcggcggcatggagcgggtctacgagatcggccgggtcttccgcaatgaggggctctccacccggcacaacccggagttcacctcgctggaggcctatcaggcctacgcggactaccgggacatgatggacctcaccgagcggctggtgcagaacgcggcccgggccgtgaacggcagcctccgggccggggagatcgacctgaccggccccttccggcgcatcacgatggccgaggcggtgaaggaggccacgggcatcgacgtcatggccctcgggtcgtcgggggacgagcggagggacgcggaggcggtgcgggccgccgccgaggccgccggatacgaggtggaggctgcgacctggggcgggctgctggccgagctgttcgagcggtacgccgaggaccggctggttcagcccaccttcgtcctcgggcacccggtggagacgtccccgctggccaggcgcgacccccgcgatccacggctgaccgagcggttcgagctgtacgtgcaggggcgggagatcgccaacgcgttctcggagttgaacgacccggaggaccagcgccggcggttcgaggcgcagctggcgcagcggcaggcgggcgacgaggaggcgcacccgatggacgaggacttcctcgccgccctggaggtgggcctgccgccgacgggcggcctgggcatcggcgtggaccggctggtcatgctgctcaccggggcgccgtccattcgcgatgtcatcctgttcccgaccatgcggaaccggtag

SEQ ID NO: 30140 - protein, 495 aa, Symbiobacterium thermophilum IAM 14863
MLSREEQLREARRAKMRTLREAGVDPFGTRFGDRRLMGDLRRQYGEASAEELDAARIPARVAGRVVTVRSHGKIGFAHLQDGSGRLQIYLRLPELSERERLVWEHLDLGDIVGAEGVLMRTRTGELTVKVESLTMLTKALRPLPDKHAGLRDVELRYRERHLDLLVNPESRAVFEARSRIVASLRRTLDELGFIEVETPVLVPLAGGAAARPFLTYHNALDRQLSLRIATELHLKRLVVGGMERVYEIGRVFRNEGLSTRHNPEFTSLEAYQAYADYRDMMDLTERLVQNAARAVNGSLRAGEIDLTGPFRRITMAEAVKEATGIDVMALGSSGDERRDAEAVRAAAEAAGYEVEAATWGGLLAELFERYAEDRLVQPTFVLGHPVETSPLARRDPRDPRLTERFELYVQGREIANAFSELNDPEDQRRRFEAQLAQRQAGDEEAHPMDEDFLAALEVGLPPTGGLGIGVDRLVMLLTGAPSIRDVILFPTMRNR

SEQ ID NO: 30141 - DNA, 1512 bp, Mannheimia succiniciproducens MBEL55E
  CDS (1)..(1512): transl_table=11
atgtcagaacaacaaaatgcagaattagattttcacggtgaaatggcggtacgtcgcgaaaaattagcggccttacgtgcaaaaggtaacgcctttccgaacacatttcgccgtgatgcattagctcaggatttacataatcaatacgatgaaacggacggcgaacaattaaaagaaaaagatctgcatgttgccgttgccggtcgcattatgacccgtcgtaccatgggaaaagcgacttttataaccattcaggatatgagcggtaaaattcagctttatgtggctcgcgataaccttcctgaaggcgtctacggggaagatgtaaaaagctgggatttaggcgatattgtcgggatcaaaggtactttatttaaaaccaaaaccaacgaattaaccgtaaaagctcatgaagtgcaattattaaccaaagcgcttcgtccgttgccggataaattccacggtttgagcgatcaggaaacccgttatcgccaacgttatttagatttaatttctaacgaagaatcccgtcgtacttttgtgattcgctcaaaagttatcgccggtatccgcgaatacttcatcggtaaaggcttcatcgaagtagaaacaccgatgctgcaggtaattccgggcggcgcggcggcgcgtccgttcgtaactcaccacaacgctctggatatcgatatgtacctgcgtatcgcccccgaactttacttaaaacgcttagtggtgggcggctttgaacgggtattcgaattaaaccgtaacttccgcaacgaaggggtttccgtgcgccacaacccggaattcactatgatcgaatactatcaggcatacgcggattaccacgatttaatggataacaccgaagaattgttacgtaaattagcccttgatattttaggtaccaccattgtgccttacggcgaatatgaattcgatttcggcaaaccgttcgaacgtatcacaatgcatgatgcggtgattaaatacggcgcggaaaaaggtattgtaaaagaagatttatacgatttagaccgtgccaaagcggcagccgccaaattaggcattgaaatccaaaaatcctggggcttaggttcaatcgtcaatgccatttttgaagaagtggcggaacatcacctgattcaaccgacattcttaatggctcaccctgcggaaatttcgccgttggcgcgccgtaatgacgaaaacccggaagtaaccgatcgttttgaattattcatcggcggccgtgaaatcggtaacggtttctcggaattgaacgacgccgaagaccaagctgaacgtttcgacgcccaagtagcggcgaaagacgcaggcgacgatgaagccatgtttaaagatgacgacttcgtcaccgcactggaacacggcttaccgccgactgcgggcgaaggtttggggatcgaccgtttagcaatgctgttcgccaacgctccgtcaatccgcgatgtgattctattcccggcaatgaaacacaaagggtaa

SEQ ID NO: 30142 - protein, 503 aa, Mannheimia succiniciproducens MBEL55E
MSEQQNAELDFHGEMAVRREKLAALRAKGNAFPNTFRRDALAQDLHNQYDETDGEQLKEKDLHVAVAGRIMTRRTMGKATFITIQDMSGKIQLYVARDNLPEGVYGEDVKSWDLGDIVGIKGTLFKTKTNELTVKAHEVQLLTKALRPLPDKFHGLSDQETRYRQRYLDLISNEESRRTFVIRSKVIAGIREYFIGKGFIEVETPMLQVIPGGAAARPFVTHHNALDIDMYLRIAPELYLKRLVVGGFERVFELNRNFRNEGVSVRHNPEFTMIEYYQAYADYHDLMDNTEELLRKLALDILGTTIVPYGEYEFDFGKPFERITMHDAVIKYGAEKGIVKEDLYDLDRAKAAAAKLGIEIQKSWGLGSIVNAIFEEVAEHHLIQPTFLMAHPAEISPLARRNDENPEVTDRFELFIGGREIGNGFSELNDAEDQAERFDAQVAAKDAGDDEAMFKDDDFVTALEHGLPPTAGEGLGIDRLAMLFANAPSIRDVILFPAMKHKG

SEQ ID NO: 30143 - DNA, 1500 bp, Bacillus licheniformis ATCC 14580
  CDS (1)..(1500): transl_table=11
atgagccatgaagagcataaccatgaagaattaaacgaccagctgcaagtcagacgcgataaaatgaatcagttgagagaaagcggaaaagatcctttcggacagcgttttgatcgcacccatcaatcaactgatctcattgagtcgtataatgaattctcaaaagaagaattagaggaaaaagcaattgaagtaacgattgccggccggatgatgacaaagcgcggaaaagggaaagcgggattcgcgcatattcaggatttaaagggccagattcagatctatgtcagaaaagacagtgtcggtgaagagcagtacgaatggtttaaaagctctgacctcggggacatcgtcggcgttacaggcgtcatgtttaaaacgaatgtaggcgaattgtctgtaaaagcaacatcttttgatttattgacaaaagctcttcgtccgcttccggacaaatatcatggattaaaggacatcgagcagcgctaccgtcagcgttatttggatttgatcgtaaatccggaaagcaaaaatacgtttattacacgaagcaaaatcattcaatccatgagaagatacttagatgaccacggatacttagaagttgaaacgcctacgatgcacgcgattccgggtggcgcatctgcccgtccgttcattacacatcataatgcgctggatatgccgctttacatgaggatcgctatcgagctccatttgaaaaggctgatcgtcggcgggttggaaaaagtctatgaaatcggacgtgtattccgaaatgaaggggtctccacacggcacaatcctgaatttacgatgatcgaactttacgaagcttatgctgactataaggatattatgagattgacggaaaatctcattgctcatattgcacaagaagtgctcggcactacgaccgttcaatatggagattatgaagtcgacctcaagcctgaatggaagagactccatatggtcgatgctgttaaagaagccaccggtgtagacttctggaaagaagtatcggtagaagaagcaagagcatatgccaaagaacacggaattgaaatttctgaaggcatgtcagttggacatatcattaatgaattcttcgagcaaaaagttgaagaaacgttgattcagcctacttttatatacggacaccctgtggagatttctcctctggctaagaaaaatcctgaagaccctcgatttacggaccgttttgagctgtttatcgtgggccgtgagcacgcgaatgcatttactgaattaaatgatcctatcgaccaaaaagaacgctttgaagcgcaattaaaagaacgtgaagaaggaaacgatgaagcgcatatgatggatgaagactttgtcgaagcgctggagtacggaatgcctcctaccggcggccttggaatcggcatcgacagactgattatgcttttgacgaattctccttcaatcagggacgttttactattcccgcaaatgagacatcgttag

SEQ ID NO: 30144 - protein, 499 aa, Bacillus licheniformis ATCC 14580
MSHEEHNHEELNDQLQVRRDKMNQLRESGKDPFGQRFDRTHQSTDLIESYNEFSKEELEEKAIEVTIAGRMMTKRGKGKAGFAHIQDLKGQIQIYVRKDSVGEEQYEWFKSSDLGDIVGVTGVMFKTNVGELSVKATSFDLLTKALRPLPDKYHGLKDIEQRYRQRYLDLIVNPESKNTFITRSKIIQSMRRYLDDHGYLEVETPTMHAIPGGASARPFITHHNALDMPLYMRIAIELHLKRLIVGGLEKVYEIGRVFRNEGVSTRHNPEFTMIELYEAYADYKDIMRLTENLIAHIAQEVLGTTTVQYGDYEVDLKPEWKRLHMVDAVKEATGVDFWKEVSVEEARAYAKEHGIEISEGMSVGHIINEFFEQKVEETLIQPTFIYGHPVEISPLAKKNPEDPRFTDRFELFIVGREHANAFTELNDPIDQKERFEAQLKEREEGNDEAHMMDEDFVEALEYGMPPTGGLGIGIDRLIMLLTNSPSIRDVLLFPQMRHR

SEQ ID NO: 30145 - DNA, 1491 bp, Legionella pneumophila subsp. pneumophila str. Philadelphia 1
  CDS (1)..(1491): transl_table=11
atgagtgaagaacatgtacatttagatgaaagtgaagtttatcatattcgcaagcaaaaattagcggaattgcgcacaggtgggtttaattttccaaacacttttcgccgcgaacatttagccgatgctttgctgaagcaatactctgaaactgagaaacaaacattagaacaaaagcatgtgaaagtatctgttgcaggccgaatcgttctgagaagaattatgggtaaagccagtttttttcatattcaggatgtatcaggtcggatacaagtttatcttcgttcaaatgatcttcctgacatttatgaacagtttaaacattgggatttaggagatattgttggtgtacagggtgagttgtttaaaacaaacactggtgaactgaccattaatgcagaacatgttgagttgttaaccaaatctttaaggccacttcctgataaattccatggtttggctgatcaggaattgaaatatcgaaaacgttatgttgacttgattgcaaatgaagacagtcgaaaaacttttctaatacggtcacatttaatcaaagccttcagagaatttatggatgataatcattttctggaagtagaaacaccaatgatgcatccaattcctggaggtgctttggctcgccctttcgtaactcatcacaatacattggatatgaccatgtatttgaggatagcccccgaattgtacttaaaacgcttggttgttggtggttttgagagagtatatgaaattaatagaaatttccgtaacgaaggaatttctactcgtcataatccagagttcacgatgctggaattttaccaggcttatgccgattacaatgatttgatgaattttactgaacaattgtttcattatctatgcgataaagtattagctactcggcaaatagaatatcaaggccaggtcattgatttcaataaaccttttgaacggttgagcgtaaaagaagctatattaaaatatcatcctgatattaaggcgcagcagttagaaacggtagagggatgcagaacacttctgaatgatttaggtctgccttataaagaaactgatggcctgggtaaactacaaattattctttttgaggagacagtagagcaccaattatttcagcccacttttattacggaataccctacagaaatatctcctttagcgagacgttctgataccaatccggaagtcaccgatcgatttgagttttttattgctggtcgtgagattgcgaatggattttctgaattaaacgatgcggaggatcaagctgagcgctttcgaaagcaagttgaagaaaaggatgcgggtgatttagaagcaatgcattttgatagtgattatattgaagcattggaatatggcttgccgcctacagctggtgaagggattggaatcgatcgcttggtgatgttatttactaattcgcaatcaatcagagacgttattctatttccgcatttgagacagtaa

SEQ ID NO: 30146 - protein, 496 aa, Legionella pneumophila subsp. pneumophila str. Philadelphia 1
MSEEHVHLDESEVYHIRKQKLAELRTGGFNFPNTFRREHLADALLKQYSETEKQTLEQKHVKVSVAGRIVLRRIMGKASFFHIQDVSGRIQVYLRSNDLPDIYEQFKHWDLGDIVGVQGELFKTNTGELTINAEHVELLTKSLRPLPDKFHGLADQELKYRKRYVDLIANEDSRKTFLIRSHLIKAFREFMDDNHFLEVETPMMHPIPGGALARPFVTHHNTLDMTMYLRIAPELYLKRLVVGGFERVYEINRNFRNEGISTRHNPEFTMLEFYQAYADYNDLMNFTEQLFHYLCDKVLATRQIEYQGQVIDFNKPFERLSVKEAILKYHPDIKAQQLETVEGCRTLLNDLGLPYKETDGLGKLQIILFEETVEHQLFQPTFITEYPTEISPLARRSDTNPEVTDRFEFFIAGREIANGFSELNDAEDQAERFRKQVEEKDAGDLEAMHFDSDYIEALEYGLPPTAGEGIGIDRLVMLFTNSQSIRDVILFPHLRQ

SEQ ID NO: 30147 - DNA, 1527 bp, Burkholderia pseudomallei K96243
  CDS (1)..(1527): transl_table=11
atgaccgaaccgacccaaccgcaggccgctgtcgcagcggacgaaaaccagatcgtcgcggagcgccgcggcaagctgcgcgcgctgcgcgaccaaggcatcgcctatccgaacgacttccagccgacgcaccacgcggccggtctgcagaccgaatacgcggacgccgacaaggaagcgctcgacgcgaaggcgctcgacgtcgcggtcgccggccggatgatgctcaagcgcgtgatgggcaaggcgagcttcgcgacggtgcaggacggttcgggtcaaatccagttcttcgtgacgcccgccgatgtcggcgccgaaacgtacgacgcgttcaagaagtgggacctgggcgacatcgtcgccgcgcgcggcgtgctgtttcgcacgaacaagggcgagctgtcggtgaagtgcacggagctgcggctgctcgcgaaggcgctgcgtccgctgcccgacaagttccacggcctcgccgaccaggaaacgcgctatcgccagcgctacgtcgatctgatcgtcacgcccgagacgcgcgcgacgttccgcgcgcgcacgaaggcgatcgcgtcgatccgcaagttcatgagcgacgccgatttcatggaagtcgagacgccgatgctgcacccgatcccgggcggcgcggccgcgaagccgttcgtcacgcatcacaatgcgctcgacatgcaaatgttcctgcgcatcgcgcccgagctttacctgaagcgcctgatcgtcggcggcttcgagcgcgtgttcgagatcaaccgcaacttccggaacgaaggcgtgtcgccgcgccacaatccggaattcacgatgatggagttctacgccgcgtacaccgattaccgctggctgatggacttcaccgagcggctgatccgccaggcggccgtcgacgcgctcggcaccgcgacgatccggtaccagggccgcgagctcgatctcgccaagccgttccatcgcctgacgatcacgcaggcgatccagaaatacgcaccgaactacacggacggtcagttgtcggacgacgctttcctgcgcggcgaactcaagcggctgggcgtcgacgtcacgcagccggcgttcctgaacgccggcatcggcgcgctgcagctcgcgctcttcgaggaaaccgctgaagcgcagctgtgggaaccgaccttcatcatcgactacccgatcgaggtgtcgccgctcgcgcgcgaatcggacacggtggcgggcatcaccgagcgcttcgagctgttcgtcaccggccgcgaaatcgcgaacggcttctcggaactgaacgaccccgaagaccaggccgcgcgcttcaggaagcaggtcgagcagaaggacgcgggcgacgaagaggcgatgttcttcgacgccgactacatccgcgcgctcgaatacggaatgccgccgacaggcggctgcgggatcggcatcgaccggctcgtgatgctgctgaccgacagcccgacgattcgcgacgtgctgctgttcccgcacctgcgccgcgaagactga

SEQ ID NO: 30148 - protein, 508 aa, Burkholderia pseudomallei K96243
MTEPTQPQAAVAADENQIVAERRGKLRALRDQGIAYPNDFQPTHHAAGLQTEYADADKEALDAKALDVAVAGRMMLKRVMGKASFATVQDGSGQIQFFVTPADVGAETYDAFKKWDLGDIVAARGVLFRTNKGELSVKCTELRLLAKALRPLPDKFHGLADQETRYRQRYVDLIVTPETRATFRARTKAIASIRKFMSDADFMEVETPMLHPIPGGAAAKPFVTHHNALDMQMFLRIAPELYLKRLIVGGFERVFEINRNFRNEGVSPRHNPEFTMMEFYAAYTDYRWLMDFTERLIRQAAVDALGTATIRYQGRELDLAKPFHRLTITQAIQKYAPNYTDGQLSDDAFLRGELKRLGVDVTQPAFLNAGIGALQLALFEETAEAQLWEPTFIIDYPIEVSPLARESDTVAGITERFELFVTGREIANGFSELNDPEDQAARFRKQVEQKDAGDEEAMFFDADYIRALEYGMPPTGGCGIGIDRLVMLLTDSPTIRDVLLFPHLRRED

SEQ ID NO: 30149 - DNA, 1491 bp, Methylococcus capsulatus str. Bath
  CDS (1)..(1491): transl_table=11
atgagtgaactgcaagacgaaaacaaactggtcgcgctgcgccgcgaaaagctcggcaagctgcggcaaacaggggtcgctttcccaaatgacttccgccgcgacgccctcgccgccgaactacgggcacgctacggggacgaaacggccgaggcactggaagaaaccgccgtatcggtcaagctggccgggcggctgatgggcaagcgtatcatgggcaaagccagctttgcccatatccaggacatgtccggccgtatccagattttcctgcagcgcgatggactggccgaaggcgtgtacgaggagttcaagagttgggacatcggcgatgtgatcggcgtggaaggcacggtgttccgcaccaagaccggcgagctgtcggtgaaggcatcgaacatccgcctgctcaccaaatcactgcgtccgctgcccgagaaattccacggcctgaccgacgccgagacccgctaccgccagcgctacctcgacctcctcatgaacgaggagtcgcgccgggtattccagctccgcagcgccatcgtgcgctacatccgcgacttcttgagcgagcgtggcttcatcgaggcagagacgccgatgatgcaggtgatccccggcggcgcccgggccaaaccgttcgtcacccatcataatgcgctggggctggatctgtatctgcgcatcgctcccgagctctacctgaagcggctggtggtgggcggcttcgaaaaagtattcgagatcaaccgcagcttccgcaacgagggcttgtccactcggcacaatcccgaattcacgatgatcgagttctatcaggcctatgccgattaccgcgacctgatggatctgaccgaaacgctgatgcggggaatcgcgcagaacctgctgggcggcaccgtcgtcacccatcagggcaaggattacgatctgggccggccgttccggcgcatgacggtgctggaatcgatcatccactacaacccggacatccgggccgaagacttggccgagcgcgaaagcgccgcggccatcgcggccgggctgggcattccggttgccgccggcgacggactcggcaagatccagaccgaaatcttcgaaaagaccgtggaagaccggctggatgaaccaaccttcatcaccgcctatccggccgaagtctcgccgctggcgcggcgcaacgacgaaaaccccttcatcacagaccgcttcgagtttttcgtgggcgggcgcgagctggcgaacggcttttccgagctcaacgacccggaagaccaggcggaacggttcagaaagcaggtggaagacaaggccgcgggcgacgaggaggccatgcactacgatgccgactacatccgcgcgctcgaatacggcctaccgcccaccgcgggcgagggcatcggcatcgaccgcctggtgatgttcttcaccgactctccctcgatccgcgacgtcatcctgttcccgcacatgcggcccgaaagctga

SEQ ID NO: 30150 - protein, 496 aa, Methylococcus capsulatus str. Bath
MSELQDENKLVALRREKLGKLRQTGVAFPNDFRRDALAAELRARYGDETAEALEETAVSVKLAGRLMGKRIMGKASFAHIQDMSGRIQIFLQRDGLAEGVYEEFKSWDIGDVIGVEGTVFRTKTGELSVKASNIRLLTKSLRPLPEKFHGLTDAETRYRQRYLDLLMNEESRRVFQLRSAIVRYIRDFLSERGFIEAETPMMQVIPGGARAKPFVTHHNALGLDLYLRIAPELYLKRLVVGGFEKVFEINRSFRNEGLSTRHNPEFTMIEFYQAYADYRDLMDLTETLMRGIAQNLLGGTVVTHQGKDYDLGRPFRRMTVLESIIHYNPDIRAEDLAERESAAAIAAGLGIPVAAGDGLGKIQTEIFEKTVEDRLDEPTFITAYPAEVSPLARRNDENPFITDRFEFFVGGRELANGFSELNDPEDQAERFRKQVEDKAAGDEEAMHYDADYIRALEYGLPPTAGEGIGIDRLVMFFTDSPSIRDVILFPHMRPES

SEQ ID NO: 30151 - DNA, 1509 bp, Azoarcus sp. EbN1
  CDS (1)..(1509): transl_table=11
atgagcgaccagaacaacactcccgccgcctcgcaggacgagaatcacatcatttccgagcggcgtgaaaagctggccgcgtggcgtgccggcggccgagctttcccgaacgatttctcgcgcgagaacatcgccggcaaactcgatgagatctacggagaaaaggagtcgcaggagctcgacgcgacgccggtcgaagtgaaagtggccgggcgcatcatgctcaaacgcgtgatgggcaaggcgagcttcatgacgatccaggatctctccggacagatccagctgtacgtcacgcgcgacgcggtcggcgaggacgtctacgccgacttcaagcactgggacatcggcgacatcgtcggcgccgtcggcacgctgttcaagacgcgcaccggcgagctgtcggtgaaatgcactgacatccgcctgctgacgaaaagcctgcgcccgctccccgacaagttccacggcctgaccgacgtcgagcagaaataccgccagcgccacctcgacctgatcatgaacgagcagacgcgcttcacgttcgtcgcgcgcagccgcatggtgcagtcgatccgcaactacatggtcagccacggcttcctcgaagtcgagacgccgatgatgcacccgatcccggggggggccgcggcgaagcccttcacgacgcaccacaacgcgctcgacatggagctgttcctgcgcatcgcgccggagctgtatctcaagcgcctcgtcgtcggcggcttcgagaaagtcttcgaggtgaaccgcaacttccgcaacgaaggcctctccccgcgccacaatcccgaattcacgatgatggagttctacgaggcctacgcgaactacaagagcctgatgaacttcaccgaagggctgctgcgccaggccgctcgcgaagcgctcggcaccgaagtgttcgtctaccagggtcgcgagctcgacctgtcgaagccgttcgcgcggctgacgatcgtcgaggcgatccaccagttccacccaggcttttcgatcgcgcagttgaacgacgaagcctggctgcgcgcgaagctgaccgacctcaaggcgaagctgcgcgacgacgcgggcctcggcacgctgcagctgatgctgttcgaggagaccaccgaagccgagctgtgggagccgacgttcatcatcgactaccccgccgaagtgtcgccgctcgcgcgccgcaacgacgcgaacccggagatcaccgaacgtttcgaactcttcatcgtcgggcgcgagatcgccaacggcttctccgagctgaacgacccggaagaccaggccgcgcgcttcctcgagcaggtcaaggcgaaggaagccggcgacgaggaggcgatgttctacgacgccgactacatccgcgcgctcgaatatggcctgcccccgaccggcggctgcggcatcggcatcgaccgcctcgtgatgctgctgaccgacagcccgagcatccgcgacgtgatcctgttcccgcagatgcggacggagtga

SEQ ID NO: 30152 - protein, 502 aa, Azoarcus sp. EbN1
MSDQNNTPAASQDENHIISERREKLAAWRAGGRAFPNDFSRENIAGKLDEIYGEKESQELDATPVEVKVAGRIMLKRVMGKASFMTIQDLSGQIQLYVTRDAVGEDVYADFKHWDIGDIVGAVGTLFKTRTGELSVKCTDIRLLTKSLRPLPDKFHGLTDVEQKYRQRHLDLIMNEQTRFTFVARSRMVQSIRNYMVSHGFLEVETPMMHPIPGGAAAKPFTTHHNALDMELFLRIAPELYLKRLVVGGFEKVFEVNRNFRNEGLSPRHNPEFTMMEFYEAYANYKSLMNFTEGLLRQAAREALGTEVFVYQGRELDLSKPFARLTIVEAIHQFHPGFSIAQLNDEAWLRAKLTDLKAKLRDDAGLGTLQLMLFEETTEAELWEPTFIIDYPAEVSPLARRNDANPEITERFELFIVGREIANGFSELNDPEDQAARFLEQVKAKEAGDEEAMFYDADYIRALEYGLPPTGGCGIGIDRLVMLLTDSPSIRDVILFPQMRTE

SEQ ID NO: 30153 - DNA, 1509 bp, Bacillus clausii KSM-K16
  CDS (1)..(1509): transl_table=11
ttgagagcgatgacggaaggattggaaatgcatgatttgcttgccgtgcgccgagacaagttaaatcaattgtatgatgaagggattaacccatttggcggaaagtttgaacggacgcatacatcaaatgaagtgattgagcaatttgctgcgtttacgaaagaagagcttgaagaaaaagacgatcatgtcgtccttgcagggcgattaatgacaaaacgcggcaaaggaaaggccgggtttgcccacattcaagatataggagggcagattcaaatatacgttcgtcaggatgccgtaggggaagaagcgtatggtttattcaaatcattagatattggcgacatggttggtgtcggcgggcgtccatttaagacgaaggtaggagaaatgtctgtgaaagtgacggagctggtgatactagggaaatcattgcgtccgttgccagacaaatatcacggtttaaaagacgttgagcaacgttaccgccagcgttatcttgatctaattacgagtcctgaatcaagaaccgcgtttataacaagaagtaaaatcattcaagtcatgcgccgttatttagatgaaaaaggctttcttgaagtggaaacgccgatgatgcatagcatccctggtggagcttctgctaggccatttgtcactcaccataatacgctcgatatggaattatacatgcgtattgcgattgagcttcatttaaagcgtttgatcgttggcggcttggaaaaagtatacgaaataggccgtgtgttccgaaatgaagggatatcaactcgccataacccagaatttacaatgattgaactttatgaagcgtatgctgattaccatgacattatggaactgacagaaggtgtaatcgcgcacattgctaaggaagtcttaggcacgaccacggtccagtacggagaacacaccgttgaactggcacctagttggaagcgagtccatatggttgatgcgattaaagaaaagactggcgtcgatttttggcagcagatgagcgatggagaagcgcgggcacttgcaaaagaacatggagtgccagtaaaagaaacaatgacatttggccatgttgtaaacgagttttttgagcactttatagaagaaacgcttattcagcctacatttgtatatggccatcctttggcgatctccccgcttgcaaagaaaaatgaggaagacccgcgctttactgatcgctttgagctgtttattgttgggcgtgaacatgccaatgcattctctgaacttaatgatccgattgaccagagaaaacgctttgaagcacaattaattgaacgtgagcaaggtgacgatgaggcccaccgaatggatgaagattttattgaagcacttgaatacggcatgcctccaacaggcggtctcggtattggcattgatagacttgtgatgttgttgacaaattcaccttccatccgggacgtcattctcttcccgcaaatgcgtaaccgcgagcaaggcgaataa

SEQ ID NO: 30154 - protein, 502 aa, Bacillus clausii KSM-K16
MRAMTEGLEMHDLLAVRRDKLNQLYDEGINPFGGKFERTHTSNEVIEQFAAFTKEELEEKDDHVVLAGRLMTKRGKGKAGFAHIQDIGGQIQIYVRQDAVGEEAYGLFKSLDIGDMVGVGGRPFKTKVGEMSVKVTELVILGKSLRPLPDKYHGLKDVEQRYRQRYLDLITSPESRTAFITRSKIIQVMRRYLDEKGFLEVETPMMHSIPGGASARPFVTHHNTLDMELYMRIAIELHLKRLIVGGLEKVYEIGRVFRNEGISTRHNPEFTMIELYEAYADYHDIMELTEGVIAHIAKEVLGTTTVQYGEHTVELAPSWKRVHMVDAIKEKTGVDFWQQMSDGEARALAKEHGVPVKETMTFGHVVNEFFEHFIEETLIQPTFVYGHPLAISPLAKKNEEDPRFTDRFELFIVGREHANAFSELNDPIDQRKRFEAQLIEREQGDDEAHRMDEDFIEALEYGMPPTGGLGIGIDRLVMLLTNSPSIRDVILFPQMRNREQGE

SEQ ID NO: 30155 - DNA, 1497 bp, Dehalococcoides ethenogenes 195
  CDS (1)..(1497): transl_table=11
atgccggaagaatatctgaacgcccaaaagatggaaaaactggaacggataaagagccggggtataaacccctatccagccactttccaccccagccataccagtgtccaggcagttgccttgctggccgaactggaaaaacaggagaacccgccaaaggaaattctgaggattgccgggcggattatgaccctgcgcgacatgggcaagatttctttcatggatatacgtgacggcagcggcaaaatacaggttttctgccgccagaatgaccttgacgaagccagtatagagctgcttaaagatttggatttgggtgattttataggtgcggagggaagccttatgcgtacccgcaccggtgaacccagtctggcagccaccaaaataagcctgctttccaaatccctgctgcccctgcctgagaaatggcacggcctgcaggatgtggaaaaacgctaccgccagcgttacctggaccttatttccaatgcggacgcccgccagaccttccttacccgcagccaggttatcagtgccatccgcagctttatgagcagcaaaggttttctggaggtagaaaccccggttcttcagcctgaggcaggcggggcactcgcccgcccctttattacccatcatcaggctttggactgtgatttttatatgcggatagctttggaactgcacctgaaaaggctgattgtgggcggctttgaccgggtatatgagatagggcggatattccgcaacgaaggggtttccacccgccacaaccccgaatttaccatgatggaaagctaccaggcttatgctgactataaagacgttatggatttccttgaggaaatggtttcaagtgtggttaaagaaataagcggcggatacaccgtgccattcggggatactacactggattttacccctccctggccccgcctgagcatgcgtgatgccgtaaagcaatatgccggtatagatttctttgatttccccaccaaagaggctttagccgcagagatgattcgccgcaaactgaaggtagaccccgccaaagactggggcaaactggttgatgagctggtgggtgaatttgtagaaccccgtttgattcaacccactttccttactgaccacccggtggccatgtccccgcttgccaaacagaagccggaagacccccgcctgacagagcggtttgaagccatttgtgccaatatggaaatagccaatgccttttccgaactgaatgacccggtagagcaaagggcgcgttttaaggaacagctggaaaagcgcaatcaactgcgtacggaagagtccgaaagtatagacgaggactttttggccgctctggcatatggtatgccgcccaccggcggtctgggtgtaggtattgaccgtctggtaatgctgcttaccaaccatgactctatccgtgaggttattttgttccctgccctgaaagaccgggaagacaagggcgaacaggaataa

SEQ ID NO: 30156 - protein, 498 aa, Dehalococcoides ethenogenes 195
MPEEYLNAQKMEKLERIKSRGINPYPATFHPSHTSVQAVALLAELEKQENPPKEILRIAGRIMTLRDMGKISFMDIRDGSGKIQVFCRQNDLDEASIELLKDLDLGDFIGAEGSLMRTRTGEPSLAATKISLLSKSLLPLPEKWHGLQDVEKRYRQRYLDLISNADARQTFLTRSQVISAIRSFMSSKGFLEVETPVLQPEAGGALARPFITHHQALDCDFYMRIALELHLKRLIVGGFDRVYEIGRIFRNEGVSTRHNPEFTMMESYQAYADYKDVMDFLEEMVSSVVKEISGGYTVPFGDTTLDFTPPWPRLSMRDAVKQYAGIDFFDFPTKEALAAEMIRRKLKVDPAKDWGKLVDELVGEFVEPRLIQPTFLTDHPVAMSPLAKQKPEDPRLTERFEAICANMEIANAFSELNDPVEQRARFKEQLEKRNQLRTEESESIDEDFLAALAYGMPPTGGLGVGIDRLVMLLTNHDSIREVILFPALKDREDKGEQE

SEQ ID NO: 30157 - DNA, 1512 bp, Neisseria gonorrhoeae FA 1090
  CDS (1)..(1512): transl_table=11
atgagcgaacaaaaccatccgcaaaccgagccgcagttggacgaaaaccaaatcatcgccctgcgccgcgaaaaactgaacaacatccgccaacagcgcaacgcttatcccaacgatttcaagcgcgacagctttgccgccgatttgcaggcgcaatacggcgaaatcggcaaagaagaactcgacccgcaggccgttcccgttaaaattgccggccgcatgatgctcaaacgtcaaatgggcaaagccagcttcgccaccattcaagacgttaccggtcaaatccagctttatctgaacaacaaaggcgtgagccaagaagttttggacgacttcaaccactgggacttgggcgacatcgtcggtgcggaaggcactttgttcaaaaccaaccacggcgaactaaccgtgcgtgtgtccgacatccgcctgctgtccaaatccctgcgtccgctgcccgacaaacacaaaggcttgagcgatcaggaaaccaaataccgccaacgctacgtcgatttgattgccaatgaagaatcgcgcaatacctttatcaaacgcagccaaatcatccaatctgtgcgtaattttatggtgggcgagcattatctcgaagtcgaaaccccgatgatgcacccgattcccggcggcgcgacagcgaaacccttcgttacccaccacaatgccttggacattccgctctacctgcgcatcgcgcccgagctgtatctgaaacgcttggtggtcggcggcttggaacgcgtgtttgaaatcaaccgcagcttccgtaacgagggcatgtccgtgcgccacaaccccgaatttacgatgattgaattttacgaagccttctccgactacgaacgtatgatgcagatggcggaagacatcatccgcaacgcatcgcgcacggtaaacggcacggcaaacatcacttacaacggcaaagaagtcgatttggaaagcccgttcgaacgtctgaccatcctcgaagccatcaaaaaatacaatccgcactacaccgacgagcagttgaacgatgcggaatggctgaaaaaagaaatcgtcaaacacggcgaaagcctgccgccgtccccgggcatcggcagcctgcaactcgccctgtttgaaggttgcgccgagggcaaactgtggaatccgacctttattgtcgattacccggtcgaagtttccccgttggcgcgcgcttcggatacgaaacaaggtctgaccgaacgcttcgagcttttcgttgtcgggcgcgaactggcaaacggctattccgagttgaacgaccccgaagaccaagccgaacgcttcaaatcgcaagtggcgcaaaaagatgcgggcgacgacgaagccatgcactacgatgccgactacatccgcgcgatggaattcggtttgccgccgaccggcggttgcggcatcggcatcgaccgcttagtgatgctgctgaccgatttgcaaaccatccgcgatgtgattctgtttccgcagatgcgtcccgagtaa

SEQ ID NO: 30158 - protein, 503 aa, Neisseria gonorrhoeae FA 1090
MSEQNHPQTEPQLDENQIIALRREKLNNIRQQRNAYPNDFKRDSFAADLQAQYGEIGKEELDPQAVPVKIAGRMMLKRQMGKASFATIQDVTGQIQLYLNNKGVSQEVLDDFNHWDLGDIVGAEGTLFKTNHGELTVRVSDIRLLSKSLRPLPDKHKGLSDQETKYRQRYVDLIANEESRNTFIKRSQIIQSVRNFMVGEHYLEVETPMMHPIPGGATAKPFVTHHNALDIPLYLRIAPELYLKRLVVGGLERVFEINRSFRNEGMSVRHNPEFTMIEFYEAFSDYERMMQMAEDIIRNASRTVNGTANITYNGKEVDLESPFERLTILEAIKKYNPHYTDEQLNDAEWLKKEIVKHGESLPPSPGIGSLQLALFEGCAEGKLWNPTFIVDYPVEVSPLARASDTKQGLTERFELFVVGRELANGYSELNDPEDQAERFKSQVAQKDAGDDEAMHYDADYIRAMEFGLPPTGGCGIGIDRLVMLLTDLQTIRDVILFPQMRPE

SEQ ID NO: 30159 - DNA, 1728 bp, Bacteroides fragilis NCTC 9343
  CDS (1)..(1728): transl_table=11
atgaacatattagaactaagtgaacaggaaatcatccgacgtaacagtctgaatgaacttcgcgcgatgggcatcgaaccctatcccgcagcagagtatgtaaccaatgctttctcaactgatattaaagccgaattcaaagatgacgagacaccccgccaggtatccgtagccggtcgcatgatgagccgccgcataatgggtaaagcctctttcattgaattgcaggactctaaaggccgcatccaggtatatatcacccgtgatgacatctgcccgggagaagacaaggaaatgtacaacactgtgttcaaacgcctgctcgacttaggcgacttcatcggaatcgaaggcttcgtattccgcacacagatgggcgaaatcagtatccatgcacaaaagctgacggtgctcgccaaatcgatcaaaccactgcctattgttaaatacaaagacggcgtaacttacgactcttttgaagatcctgaattgcgttaccgccagcgctatgtcgacctggctgtcaacgaaggtgttaaagatattttcatcaaacgcagcaaagtatacagttccatgcgcgaatacttcaactcaaagggatacatggaagtggaaactccgatcctgcaggccattgccggaggagcagccgcgcgtccgttcatgactcaccacaatgctttggatattcctttatacatgcgaatcgccagtgagctttacctgaaacgccttattgtcggcggttttgaaggtgtatacgagatcggtaaaaacttccgtaacgaaggtatggaccgtacacacaatccagaattcacctgtatggagatatatgtagcctacaaagactacaattggatgatggaatttactgaaaaaatgatcgaaaagatctgtctggacgtaaacggtactaccgaagtaaaagtaggcgacaacatcatcaatttcaaagcgccctataagcgtgtcactatgctgggagccatcaaagagcacaccggttacgatctgacaggaatgaatgaagagcagattcgcgaagtttgcaagaaactgaacatggaaatcgatgatacgatgggtaaaggtaaactgatcgatgagatcttcggtgagttctgcgaaggcacttatatacagcctacattcatcacggattacccgatcgagatgtctcctctgaccaagaagcatcgtgacaaccctgaactgacagaacgtttcgagttgatggtaaacggtaaagagttgtgtaacgcatattctgagttgaacgatccgatcgaccagttggaacgtttcgaagaccagatgaagctgagcgaaaagggagatgatgaagcgatgatcatcgataaggacttcgtccgtgcattggaatatggtatgcctcctacttcgggtatgggtattggtatggaccgtctgactatgctgatgaccggtcagtcgaccattcaggaagtattgttcttcccgcagatgcgtccggagaaagtcgtaccgaaagacagtgcttccaaatttatggaactgggcattgccgaagagtgggtacctgtcatccagaaagcaggatacaatcaggtggccgacatgaaagaggttaatccgcagaaattccaccaggatatttgtggcatcaacaagaaatacaaattggaactgaccaatccgtcagttaacgatgtagccgagtggatacagaaaattaaataa

SEQ ID NO: 30160 - protein, 575 aa, Bacteroides fragilis NCTC 9343
MNILELSEQEIIRRNSLNELRAMGIEPYPAAEYVTNAFSTDIKAEFKDDETPRQVSVAGRMMSRRIMGKASFIELQDSKGRIQVYITRDDICPGEDKEMYNTVFKRLLDLGDFIGIEGFVFRTQMGEISIHAQKLTVLAKSIKPLPIVKYKDGVTYDSFEDPELRYRQRYVDLAVNEGVKDIFIKRSKVYSSMREYFNSKGYMEVETPILQAIAGGAAARPFMTHHNALDIPLYMRIASELYLKRLIVGGFEGVYEIGKNFRNEGMDRTHNPEFTCMEIYVAYKDYNWMMEFTEKMIEKICLDVNGTTEVKVGDNIINFKAPYKRVTMLGAIKEHTGYDLTGMNEEQIREVCKKLNMEIDDTMGKGKLIDEIFGEFCEGTYIQPTFITDYPIEMSPLTKKHRDNPELTERFELMVNGKELCNAYSELNDPIDQLERFEDQMKLSEKGDDEAMIIDKDFVRALEYGMPPTSGMGIGMDRLTMLMTGQSTIQEVLFFPQMRPEKVVPKDSASKFMELGIAEEWVPVIQKAGYNQVADMKEVNPQKFHQDICGINKKYKLELTNPSVNDVAEWIQKIK

SEQ ID NO: 30161 - DNA, 1581 bp, Chlamydophila abortus S26/3
  CDS (1)..(1581): transl_table=11
atgtctacagaagctgagtacctaaaacaagaagattttctccacagaagtaacaagcttcgagagatagttgatttaggtatgaatccctatccttatgaattccccggaaccacgagtgttgaggacataaaaaaagaatatatctcccaacctctcgggaatagcgaagacgctactaataaagaaacccctaaggtaaaaatctcagggcgtatggtgcttttccgctctatgggaaagaacgcttttgcgcagattttagataatgatcaaaagatccaggtgatgtttaatagggatttttcttcagttgcaggtctccctgtagatgcagagatttccccaataaaatttatagagaaaaagcttgatctcggtgatattttaggaatcgaagggtatctatttttcacacattccggagagttaaccattcttgtggaaaccgtctcactattgtgtaaatccttaatttctcttcccgataaacacgccggcctaagtgataaagaaacccgttatagaaagcgttggttggatctcattgcctccgatgaagtgcggcaaactttcttaaaaagaagtcgaatcatcaaattaatccgtcactatatggatgctcagggattcatagaggtagaaactcctatactccaaaatgtgtatggtggcgctgaagccacaccttttatcaccatgttgaatgctttgcactcagaagtatttctacggatttctccagagatttctttaaagaaaatccttgttggaggcaccccacgtatttacgaaatcggaaaagtatttaggaacgaagggatcgatagaacccataatcctgaatttaccataatcgaagcttatgcaacgaatatagactatcacagtgtcatgacctatgtggagaatctcgttgaacatctcgtctgtgagttgaacgatgggagtacagtcttgacctatacacatttaaaacaagggccagtatccattgattttaaagctccttggattcgcatgactatgaaagatagtatcaagacatatggaggcgtcgatgtggatcttcatggagatcatgagttgcgaaaaattttaaaagaatgttcttcattacctgaagaatcgtacatgacagctcccagaggctcattaatcgcagcattatttgacgagttagtctgcgataaattaattgcgcctcatcatattacagatcatcctgtagagacgacgcctttatgtaaatctttgcgctcaggagatgcggattttgtcgagcgctttgaaagtttttgcttgggtaaagagctttgtaatgcctattcagagttgaatgatcctttgcgtcagagagtacttttagaacaacaacaggcaaaaaaggctttagatccagatagtgaataccatcctatagatgaagaatttttagaagccctgtgccaaggtttgcctcccacagggggatttggtatcggtatcgatcgtttggtcatgattcttacaaatgctgcctctatacgtgatgtattgtatttcccagctatgcgtcgtttagaatcagaaaaggactag

SEQ ID NO: 30162 - protein, 526 aa, Chlamydophila abortus S26/3
MSTEAEYLKQEDFLHRSNKLREIVDLGMNPYPYEFPGTTSVEDIKKEYISQPLGNSEDATNKETPKVKISGRMVLFRSMGKNAFAQILDNDQKIQVMFNRDFSSVAGLPVDAEISPIKFIEKKLDLGDILGIEGYLFFTHSGELTILVETVSLLCKSLISLPDKHAGLSDKETRYRKRWLDLIASDEVRQTFLKRSRIIKLIRHYMDAQGFIEVETPILQNVYGGAEATPFITMLNALHSEVFLRISPEISLKKILVGGTPRIYEIGKVFRNEGIDRTHNPEFTIIEAYATNIDYHSVMTYVENLVEHLVCELNDGSTVLTYTHLKQGPVSIDFKAPWIRMTMKDSIKTYGGVDVDLHGDHELRKILKECSSLPEESYMTAPRGSLIAALFDELVCDKLIAPHHITDHPVETTPLCKSLRSGDADFVERFESFCLGKELCNAYSELNDPLRQRVLLEQQQAKKALDPDSEYHPIDEEFLEALCQGLPPTGGFGIGIDRLVMILTNAASIRDVLYFPAMRRLESEKD

SEQ ID NO: 30163 - DNA, 1503 bp, Pseudomonas fluorescens Pf-5
  CDS (1)..(1503): transl_table=11
atgagcgaccaacaactcgacccgcaagccctgcaacaggaagaaaactccctgatcgccctgcgcaaggaaaagcttgctgccgagcgcgccaagggcaatgccttcccgaacgacttccgccgcgaaaactactgcgaagatctgcagaagaaatacgcggacaagaccaaggaagagctcgcagaggctgcaatcccggtcaaggttgccggtcgcatcatgctcaaccgtggctcgttcatggtgatccaggacatgaccggtcgcattcaggtctacgtcaaccgtaaaaccctgtccgaagaaaccctggcctccgtcaagacctgggacatgggcgacatcatcgctgccgaaggcactctggcccgttccggcaagggtgacctgtacgttgaaatgaccaatgtgcgcctgctgaccaagtcgctgcgcccgctgccggacaagcaccacggcctgaccgacaccgagcagcgctaccgtcagcgctacgtcgacctgatcgtcaacgaagaagtacgccagactttccgcgtgcgttcgcaagtgatcgcccacatccgcagcttcctgatgaagcgcgacttcctcgaagtcgaaacgccgatgctgcagaccatccctggcggcgctgcggccaagccgtttgaaacccaccacaacgcgctggacatggaaatgttcctgcgtatcgcccctgagctgtatctgaagcgcctggtggttggcggtttcgagaaagtgttcgagatcaaccgcaacttccgtaacgaaggcgtttcgacccgtcacaaccctgaattcaccatgttggagttctaccaggcttacgccgactacgaagacaacatggacctgaccgaagaactgttccgcgaactggcgcagttggtcctgggcagcaccgacgtgccgtacggcgacaaggtgttccacttcggcgagccgttcgcgcgcctgtcggtgttcgactcgatcctcaagtacaaccccgaactgaccgctgatgacctgaacgacatcgacaaggctcgcgccatcgccaagaaggccggtgccaaggtgctgggcttcgaaggcctgggcaagttgcaggtgatgattttcgaggaactggtggagcacaagctggagcagccgcacttcattacccagtacccgttcgaagtgtcgccgctggcccgtcgcaacgacgataaccccaacgtcaccgaccgtttcgagctgttcattggtggtcgcgaaatcgccaacgcctactccgagttgaacgacgcggaagaccaggcagagcgcttcatggcccaggtggcggacaaggacgccggtgatgacgaagccatgcactacgacgccgacttcgtccgtgccctggaatacggcatgccgcccaccgccggcgagggcatcggtatcgaccgcctggtgatgttgctgaccaactcgccgtcgattcgcgacgtgatcctgttcccgcacatgcggccgcaagcttaa

SEQ ID NO: 30164 - protein, 500 aa, Pseudomonas fluorescens Pf-5
MSDQQLDPQALQQEENSLIALRKEKLAAERAKGNAFPNDFRRENYCEDLQKKYADKTKEELAEAAIPVKVAGRIMLNRGSFMVIQDMTGRIQVYVNRKTLSEETLASVKTWDMGDIIAAEGTLARSGKGDLYVEMTNVRLLTKSLRPLPDKHHGLTDTEQRYRQRYVDLIVNEEVRQTFRVRSQVIAHIRSFLMKRDFLEVETPMLQTIPGGAAAKPFETHHNALDMEMFLRIAPELYLKRLVVGGFEKVFEINRNFRNEGVSTRHNPEFTMLEFYQAYADYEDNMDLTEELFRELAQLVLGSTDVPYGDKVFHFGEPFARLSVFDSILKYNPELTADDLNDIDKARAIAKKAGAKVLGFEGLGKLQVMIFEELVEHKLEQPHFITQYPFEVSPLARRNDDNPNVTDRFELFIGGREIANAYSELNDAEDQAERFMAQVADKDAGDDEAMHYDADFVRALEYGMPPTAGEGIGIDRLVMLLTNSPSIRDVILFPHMRPQA

SEQ ID NO: 30165 - DNA, 1545 bp, Psychrobacter arcticus 273-4
  CDS (1)..(1545): transl_table=11
atgtcaaagcccaacaatcaaaatcagcaaaataaccaagagcaaatcccagaagacgccaacgaactgattgctcagcttcaagccaagctggaggatatcgttgcttcaggcaaacaaccgtatccgaatacgtttaaacgtacggattatgcgcaagacttgcagacggcttttgagggtatctcaaaacaagaaattgctgataatgatgctaaaggcgaaaaaacacaggtgaatgtcgccggtcgcgtcatgctcaaccgtggtgcatttattgtcatccaagacatgacaggtcgtatccaattatatgtggcacgcaaagagctagatgaagagacgttagccgacatcaaatcgctagatttgggtgatatcgttggcgtatcaggttacatcggtcgctctggtaaaggtgatttgtacgtacatatcgaagagatgcaattattgaccaaagcattacgcccaatgccaaataagtttcatggtttagcagatgtggaagcccgctatcgcaaccgtcatcttgatttgatgaccaatgagacgacccgtgatacttttatggtacgcagccaagtcatcagcggtattcgcaaatttatgttgaatgagcgttttatggaagtggaaacgcctatgatgcatcccattccaggtggtgcggtggcgcgtccgtttgtgactcatcataatgcgttagacatgccattatatctgcgtattgctcctgagctttatcttaaacgcttagtcgttggtggctttgagaaagtatttgagattaaccgcagcttccgtaatgagggcgtgtcaacccgtcataatcctgaatttaccatgattgagttttatcaggcgtatgctgattatcatgatttgatggatttgactgagcgcttatttaacgaattggcgacagatatcttgggtaccactgagattacctatcaagaagaagatatcagcctaaaagcgcctttcgagcgtctatctatgtctaatgcgattgccaaatatgccgaaaacttcgatatggcacgtatcaatgatcgtgattatctcgcagagtacgcatcgacaacgcttaagcagcaggtaaaagatgtctttggtgtgggtaaattgcagaccattatctttgaagaaaccgctgagcatcaattacgtcagccaacattcatcactgaataccctgctgaaacctcaccactagcacgccgcagtgatgacaatcctgagattactgaccgcttcgagctgtttgttggtggtcgtgaattggcgaatggctttagtgagctgaatgatcctgcggatcaggctgagcgtttccttggtcaagtggctgaaaaagacgctggcgatgatgaagcgatgcactttgatgcagaatatatcgaggcattgtcttatggcttaccgccgactgctggtgaaggtattggtattgatcgcttggtaatgctattgacagactctgccagtattcgtgatgtgattttattcccacatatgcgccgtaagcttgagggttaa

SEQ ID NO: 30166 - protein, 514 aa, Psychrobacter arcticus 273-4
MSKPNNQNQQNNQEQIPEDANELIAQLQAKLEDIVASGKQPYPNTFKRTDYAQDLQTAFEGISKQEIADNDAKGEKTQVNVAGRVMLNRGAFIVIQDMTGRIQLYVARKELDEETLADIKSLDLGDIVGVSGYIGRSGKGDLYVHIEEMQLLTKALRPMPNKFHGLADVEARYRNRHLDLMTNETTRDTFMVRSQVISGIRKFMLNERFMEVETPMMHPIPGGAVARPFVTHHNALDMPLYLRIAPELYLKRLVVGGFEKVFEINRSFRNEGVSTRHNPEFTMIEFYQAYADYHDLMDLTERLFNELATDILGTTEITYQEEDISLKAPFERLSMSNAIAKYAENFDMARINDRDYLAEYASTTLKQQVKDVFGVGKLQTIIFEETAEHQLRQPTFITEYPAETSPLARRSDDNPEITDRFELFVGGRELANGFSELNDPADQAERFLGQVAEKDAGDDEAMHFDAEYIEALSYGLPPTAGEGIGIDRLVMLLTDSASIRDVILFPHMRRKLEG

SEQ ID NO: 30167 - DNA, 1575 bp, Colwellia psychrerythraea 34H
  CDS (1)..(1575): transl_table=11
atgacagataaagccaataatacacccgtagcacaagatgaaaataaactgattgctgagcgtcgtgtaaaacttgaaaaaattcgctctaattgttcagctaatggttttcctaacgattttaatcgtgaacatttagccgctgatattcaagctgaacatggtgaaaaaaccaaagaagaacttgaagagctacaagtaacttatgctattgccggtcgtgttatggcgaagcgtggaccatttttagtgatacaagactcgtctggtcgtattcaaggttatgctgaaaaaacagtgcaaaaagagatacgtgctaaatggggttcattagatattggtgatattgttggtattaaaggtattttacataaatcaggtaaaggtgatctttacgtgaacatggatcattactcattattaactaagtcacttcgtccattacctgaaaagtttcatggtttatccgatcaagaaactaagtatcgtcagcgttatattgatttaattattaatgaagatacccgtaatacctttaaaatgcgttcaaaaattgttgcgggcatacgtaacttcttaacgcagcgtgactttatggaagttgaaacgccgatgttgcaaatcataccgggcggcgcaacggctaaaccttttatgacgcatcataatacttttgatcttgatatgtacctacgtatagcaccagagcttaacttaaagcgtttagtcgttggtggttttgaccgtgtgtttgaaattaaccgtagtttccgtaacgaaggtatttcaacgcgtcataatccagaattcaccatgattgaattctatcaagcttacgctgattaccatgacctgatgaacactacagaagaaatgttacgtactattgcacaagatgtattaggtactaccactattcgtaataccgttaaaaattctgaaggtgaagtagtagaagagaaattctacgacctaggtaagccgtttgtacgcttatctatggttgatgctattttacaatacggcaaagatcatcgtggcgctgagcaacttgatgaagcggctttacgtgaccctgaaaataattttgatgcaatcaaagccatggctaaagctgttggtgttaaagaaaacagtgcttctaaagtttggggcccaggtaaatacatttgtgaaatatttgaagaagttgcagaacatttattagatcaacctacctttatcacggaatacccttgggaagtttcaccactggcgcgtcgtaacgatgaaaactcattcataaccgatagatttgaattctttgttggtggtcgtgaactagctaatggtttctctgagctgaacgatgcagaagatcaagctgaacgtttccaaaaacaagtagcagaaaaagatgctggcgatgatgaagctatgcattatgatgccgactatatcaacgccttagagtatggtttaccaccaacagcaggtgaaggtattggtattgaccgtttggtgatgttatttactgattcgccaactatcaaagatgtaattttattcccacatatgcgcccagaagcggaataa

SEQ ID NO: 30168 - protein, 524 aa, Colwellia psychrerythraea 34H
MTDKANNTPVAQDENKLIAERRVKLEKIRSNCSANGFPNDFNREHLAADIQAEHGEKTKEELEELQVTYAIAGRVMAKRGPFLVIQDSSGRIQGYAEKTVQKEIRAKWGSLDIGDIVGIKGILHKSGKGDLYVNMDHYSLLTKSLRPLPEKFHGLSDQETKYRQRYIDLIINEDTRNTFKMRSKIVAGIRNFLTQRDFMEVETPMLQIIPGGATAKPFMTHHNTFDLDMYLRIAPELNLKRLVVGGFDRVFEINRSFRNEGISTRHNPEFTMIEFYQAYADYHDLMNTTEEMLRTIAQDVLGTTTIRNTVKNSEGEVVEEKFYDLGKPFVRLSMVDAILQYGKDHRGAEQLDEAALRDPENNFDAIKAMAKAVGVKENSASKVWGPGKYICEIFEEVAEHLLDQPTFITEYPWEVSPLARRNDENSFITDRFEFFVGGRELANGFSELNDAEDQAERFQKQVAEKDAGDDEAMHYDADYINALEYGLPPTAGEGIGIDRLVMLFTDSPTIKDVILFPHMRPEAE

SEQ ID NO: 30169 - DNA, 1503 bp, Pseudomonas syringae pv. phaseolicola 1448A
  CDS (1)..(1503): transl_table=11
atgagcgaccaacaactcgacccgcaagccctgcaacaggaagaaaacaccctgatcgccctgcgcaaggaaaagcttgctgcaggccgtgccaagggtcaggccttccccaacgacttccgccgcgacagctactgcaacgacttgcagaaacagtacgtcgacaagaccaaggaagaactggcagaggcagcgattccggtcaaggtcgccggtcgcatcatgctcaaccgtggctctttcatggtgatccaggacatgaccgggcgtatccaggtctatgtcaaccgcaagaccctggctgaagaaaccctggccgaggtgaaaacctgggacctgggcgacatcattgctgccgaaggcaccctggcacgctccggcaagggcgacctgtacgtcgagatgaccaccgttcgcctgctgaccaagtcgctgcgtccgctgcccgacaagcaccatggcctgaccgacaccgagcagcgctatcgccagcgttacgtcgacctgatcgtcaacgaagacgtgcgtgagaccttccgcgtgcgctcgcaggttatcgctcacatccgcagcttcctgatgaagcgtgacttccttgaagtcgaaacgccgatgttgcagaccatccccggcggtgcggcagccaagccgttcgaaacccatcacaacgcgctggacatggaaatgttcctgcgcattgcgccggagctgtacctcaagcgtctggtggtcggtggtttcgagaaagtcttcgagatcaaccgcaacttccgtaacgagggcgtttcgacccggcacaaccccgagttcaccatgctcgagttctaccaggcctacgccgattacgaagacaacatggacctgaccgaggagctgttccgcgaactggctcaactggttctgggcaccaccgacgtgccttacggcgacaaggtgttccacttcggcgaaccgtttgtgcgcctttcggtgttcgactcgatcctcaagtacaacccggatctgaccgctgccgatctgcaggacgtcgacaaggctcgtgccattgccaaaaaggccggtgccaaggtgctcggcttcgaaggcctgggcaaattgcaggtgatgattttcgaagagctggtcgagcacaagctgaaacagccgcacttcattactcagtacccgttcgaagtgtctccgctggctcgtcgcaatgacgaaaacccgagcgtaaccgaccgtttcgagttgttcatcggcggccgtgaaatcgccaacgcctattccgagctcaacgacgccgaagatcaggccgaacgcttccaggctcaggtagccgacaaggatgccggtgacgacgaagccatgcactacgacgccgactttgtgcgtgcgctggaatacggcatgccacctactgcgggtgaggggatcggcatcgatcggttggtgatgctgctcaccgactcgccttcgatccgcgatgtcattctgttcccgcacatgcgcccgcaagcgtaa

SEQ ID NO: 30170 - protein, 500 aa, Pseudomonas syringae pv. phaseolicola 1448A
MSDQQLDPQALQQEENTLIALRKEKLAAGRAKGQAFPNDFRRDSYCNDLQKQYVDKTKEELAEAAIPVKVAGRIMLNRGSFMVIQDMTGRIQVYVNRKTLAEETLAEVKTWDLGDIIAAEGTLARSGKGDLYVEMTTVRLLTKSLRPLPDKHHGLTDTEQRYRQRYVDLIVNEDVRETFRVRSQVIAHIRSFLMKRDFLEVETPMLQTIPGGAAAKPFETHHNALDMEMFLRIAPELYLKRLVVGGFEKVFEINRNFRNEGVSTRHNPEFTMLEFYQAYADYEDNMDLTEELFRELAQLVLGTTDVPYGDKVFHFGEPFVRLSVFDSILKYNPDLTAADLQDVDKARAIAKKAGAKVLGFEGLGKLQVMIFEELVEHKLKQPHFITQYPFEVSPLARRNDENPSVTDRFELFIGGREIANAYSELNDAEDQAERFQAQVADKDAGDDEAMHYDADFVRALEYGMPPTAGEGIGIDRLVMLLTDSPSIRDVILFPHMRPQA

SEQ ID NO: 30171 - DNA, 1506 bp, Dechloromonas aromatica RCB
  CDS (1)..(1506): transl_table=11
atgtccaacgccgaacagcaagccccggtccagcaagacgaaaaccaactcatcgcagagcgccgtgccaaactggccgagtggcgcaagaccgggaaggctttcccgaatgatttccagcgtgagaacaccgctgccaaggtcctcgaaggctatggcgagaaaacggcggaagagcttgaaggcctgccgattgaagtcaaggttgccggccgcctgatgctcaagcgcgtcatgggcaaggcttcctttgccaccattcaggatctgtcgggccgtatccagatctacatcacccgggaccgcgttggtgaagaggtctatgccgacttcaagacctgggacttgggcgacatcattggcgtcaccggtagcctgatgaagaccaagaccggcgagctgtcgattcaggccgccgaaatccgcctgctgaccaagtcgctgcgcccgctgccggacaagttccacggcctggccgatcaggaaatgaagtatcgccagcgctatgtcgacctgatcatgaacgaggaaacgcgcttcaccttccgcgcccgttcggccatcgttgcctctatccgcaactacatgaccggccatggcttcatggaagtcgaaacgccgatgatgcacccgatcccgggcggtgcctcggccaagccgtttgtcacgcaccacaacgcgctcgacatgcagcagttcctgcgcatcgcgccggagctgtacctgaagcgcctggtcgtcggcggtttcgagaaggttttcgaaatcaaccgcaatttccgcaatgaaggtctctcgccgcgccacaaccccgaattcacgatgatggagttctacgaggcctacgcgaactaccacacgctgatggacttcaccgaaggcctgctccgccacgccgcccgcgaggcactgggcaaggaagtcttcgtctatcagggccgcgaactggacctctccaagcctttccatcgccttaccatcaaccaggccatccagcgccagcatccggaatttagtgatgccgagctggccgatccggaattcctgaaagccaagatcaaacacttcggtgagccgctcaagccgggcggtctgggcagcctgcaactgcaactgttcgaagcctgcgccgaagcccactgctgggagccgactttcatcatcgactacccggtcgaagtgtccccgctggcccgtgcctcggacaccaacccggaaatcaccgagcgttttgagctgttcatcgttgggcgtgaaatcgccaacgggttctcggagttgaatgatgccgaagatcaggcagcgcgcttccaggaacagatgaaagcgaaggatgccggcgacgaggaagcgatgtattacgacgccgatttcattcgcgcgctggaatatggcctgccgccgaccggtggctgtggcatcggcattgatcgcctgatcatgctgctgaccgacgccgccgcgattcgggatgtcatcctattcccctccatgcgccccgaatga

SEQ ID NO: 30172 - protein, 501 aa, Dechloromonas aromatica RCB
MSNAEQQAPVQQDENQLIAERRAKLAEWRKTGKAFPNDFQRENTAAKVLEGYGEKTAEELEGLPIEVKVAGRLMLKRVMGKASFATIQDLSGRIQIYITRDRVGEEVYADFKTWDLGDIIGVTGSLMKTKTGELSIQAAEIRLLTKSLRPLPDKFHGLADQEMKYRQRYVDLIMNEETRFTFRARSAIVASIRNYMTGHGFMEVETPMMHPIPGGASAKPFVTHHNALDMQQFLRIAPELYLKRLVVGGFEKVFEINRNFRNEGLSPRHNPEFTMMEFYEAYANYHTLMDFTEGLLRHAAREALGKEVFVYQGRELDLSKPFHRLTINQAIQRQHPEFSDAELADPEFLKAKIKHFGEPLKPGGLGSLQLQLFEACAEAHCWEPTFIIDYPVEVSPLARASDTNPEITERFELFIVGREIANGFSELNDAEDQAARFQEQMKAKDAGDEEAMYYDADFIRALEYGLPPTGGCGIGIDRLIMLLTDAAAIRDVILFPSMRPE

SEQ ID NO: 30173 - DNA, 1491 bp, Thermobifida fusca YX
  CDS (1)..(1491): transl_table=11
gtgagtgaagtactggatgatctgccggaacagatgcgggttcgccgcgagaagctggaccgactgcgtcgggagggtgtcgacccctacccggtgaccttcccgcgcacgacgacgatcgcagaggtccgggcgaaacacggcgatctcgctccggacgtctacaccggggaacgcgtggccctgaccgggcgggtcatgctgtatcggaccggcggcaaactctgcttcgccacgatccgggacgcgtccggggacatccaggtcatgctctccctggacagggtgggcgccgagcgtttggcggcgtggaagagcgacgtcgacctgggcgaccacatcggtgtcgaaggggaagtgatcacttctcggcgaggcgagttgtcgatcctcgcggacacctggacgctgacctccaagtgcctgcgcccgctgccggacaagcacaaggggctgaccgaccctgaggcacgggtgcgccagcgctacgtggaccttatcgtcaaccccgagtcgcgggagatggtgatgcgccgcgcccgcacggtgcgtgcgctgcgcgacgggctgcacaaccgcggctacatcgaggttgagacgccgatgctgcagcaggtgcacggcggggcgacggcacgccccttcgtcacccacatcaacgcctacgacctcgacctctacctgcgcatcgcccccgaactgtacttgaagcggatggtggtcggcggggttgagaaggtcttcgaaatcaaccggaacttccggaacgagggcgcggactccacgcacaaccccgagttcacgatgctggagttctaccaggcctacgcggactacaacgtgatggccgacatcacccgcgaactcatccaggaagccgccgtcgcagtgttcggcagcacggtggtccagcggggcgacacagaggtcgacttgggcggcgagtggccgcagatcaccttgtacggcgcggtctctgaagcgctgggcgaagaagtcactccgcggaccccggtggagacgctgcggaagctggcggatgcgcgcggtgtcgaatggaacccggagtggggtccgggcaagctcgtcgagcaccttttcgaggagttggtccaagacagcctggtgcagccgacttttgtccgggactacccgcttgaaaccagcccgctgacccgccagcaccgtgaagacccgctgctcaccgagaagtgggatctcatcggattcggtatggagttgggcaccggatattccgagttgattgatccggtggagcagcgccgccgcttgactgagcagtctctgctggctgccgggggcgatcccgaggcaatgcagttggacgaggattttctgcgcgccttggagtacgccatgccgcctaccggcggtgtcggtgtgggcgtcgaccggctgttgatggcctttaccggaaagaacattcgcgagacgatcctgttcccattggtccgacaggaacagagataa

SEQ ID NO: 30174 - protein, 496 aa, Thermobifida fusca YX
MSEVLDDLPEQMRVRREKLDRLRREGVDPYPVTFPRTTTIAEVRAKHGDLAPDVYTGERVALTGRVMLYRTGGKLCFATIRDASGDIQVMLSLDRVGAERLAAWKSDVDLGDHIGVEGEVITSRRGELSILADTWTLTSKCLRPLPDKHKGLTDPEARVRQRYVDLIVNPESREMVMRRARTVRALRDGLHNRGYIEVETPMLQQVHGGATARPFVTHINAYDLDLYLRIAPELYLKRMVVGGVEKVFEINRNFRNEGADSTHNPEFTMLEFYQAYADYNVMADITRELIQEAAVAVFGSTVVQRGDTEVDLGGEWPQITLYGAVSEALGEEVTPRTPVETLRKLADARGVEWNPEWGPGKLVEHLFEELVQDSLVQPTFVRDYPLETSPLTRQHREDPLLTEKWDLIGFGMELGTGYSELIDPVEQRRRLTEQSLLAAGGDPEAMQLDEDFLRALEYAMPPTGGVGVGVDRLLMAFTGKNIRETILFPLVRQEQR

SEQ ID NO: 30175 - DNA, 1551 bp, Ralstonia eutropha JMP134
  CDS (1)..(1551): transl_table=11
atgactgaacccaaccgcgcccaggccgcaccggcctctccgaccgcagagctgcccgccgcagacgagaacaagatcatcgccgagcgtcgcgagaaactggcggccctgcgccggcaaggcgtggccttccccaacgatttccgcccgacccaccaggccgccgcgctgcacgagcagtacggcgagaccgaccagcccgcgctggaagcgaccccggtggaagtcgccattgccggccgcatgatgctcaagcgcgtcatgggcaaggcaagcttcgccaccgtgcaggatggcagcggccagatccagttctacatcacgcgcgacaaggttggtgaagacgtctacgccgccttcaagcactgggaccttggcgacatcatcagcgcgcgcggcgtgctgttccgcaccaacaagggcgagctgtccgtgcaggtgcaggaactgcgcctgctgtccaagtcgctgcgcccgctgccggacaagttccacggcctggccgaccaggaaatgaagtaccgccagcgctatgtcgacctgatcgtctcgccggaaacccgcaacaccttccgcgcgcgcaccaaggccatgtcatcgctgcgccgccatatgtccgacgccggcttcatggaagtcgaaacgccgatgctgcacccgatcccgggcggcgccgcggccaagccgttcatcacgcaccacaatgcgctggacatgcagatgttcatgcgcatcgcgccggagttgtacctgaagcgcctgatcgtcggcggcttcgagcgcgtgttcgagatcaaccgcaacttccgcaatgaaggggtgagcccgcgccacaaccccgagttcacgatgatggagttctacgcggcctacacggactaccgctggctgatggactttaccgagaacctgatccgccaggccgccatcgacgccagcggtaccgcggtgctgacctaccagggccgcgagctggacttgtcgaagccgttccaccgcctgaccatctgccaggcgatccaaaagttcgcgccgcaatacaccgacgcgcaactggccgatgccgatttcctgcgcaccgagctgaagaaatttggcgtgaacaccagcgcgccgcagttcctcaatgcaggcatcggtacgctgcaactcgtgctgttcgaggagaccgcggaaagccagctgtgggagccgactttcatcgtcgattacccggtggaagtctcgccgctggcacgtgcatcggacacagtgccgggcatcaccgaacgcttcgagctgttcatcacgggccgcgagatcgccaacggcttctcggagctcaacgacgcagaagaccaggccgatcgtttccgcaagcaggtcgagcagaaggacgccggcgatgaagaggcaatgtactacgacgccgactacattcgcgcgctggaatacggcatgcccccgacgggcggctgcggtatcggtatcgaccgactggtgatgctgctgacggacagcccgaacatccgcgacgtcattctgttcccgcacctgcgccgcgaagactga

SEQ ID NO: 30176 - protein, 516 aa, Ralstonia eutropha JMP134
MTEPNRAQAAPASPTAELPAADENKIIAERREKLAALRRQGVAFPNDFRPTHQAAALHEQYGETDQPALEATPVEVAIAGRMMLKRVMGKASFATVQDGSGQIQFYITRDKVGEDVYAAFKHWDLGDIISARGVLFRTNKGELSVQVQELRLLSKSLRPLPDKFHGLADQEMKYRQRYVDLIVSPETRNTFRARTKAMSSLRRHMSDAGFMEVETPMLHPIPGGAAAKPFITHHNALDMQMFMRIAPELYLKRLIVGGFERVFEINRNFRNEGVSPRHNPEFTMMEFYAAYTDYRWLMDFTENLIRQAAIDASGTAVLTYQGRELDLSKPFHRLTICQAIQKFAPQYTDAQLADADFLRTELKKFGVNTSAPQFLNAGIGTLQLVLFEETAESQLWEPTFIVDYPVEVSPLARASDTVPGITERFELFITGREIANGFSELNDAEDQADRFRKQVEQKDAGDEEAMYYDADYIRALEYGMPPTGGCGIGIDRLVMLLTDSPNIRDVILFPHLRRED

SEQ ID NO: 30177 - DNA, 1548 bp, Methanosarcina barkeri str. Fusaro
  CDS (1)..(1548): transl_table=11
atgagcatggaaattaacaatgaaaaaatgtcagatagccttgtaccgtctgacaatgaatctgacaataatgatatttcagatagcagggtctttgatgattctaaacttgcaaaactaaacggcatcaaaagccagggacttaatccgtacccctataaatttgaaaagaatggggatatctgtgatatccagaaaaagttcgaggactttgaaaagaatgaagggctaacggttagaaccgcaggaaggctttacaatattcgcaggcttggaaaaatgatatttgccgatcttggagaccaggggggcagaattcaggttactttaaggaaaggaaatcttcctgatgaggatttcaagacttttaaaaccctggtagattcaggagatatcgtaggtgttcagggcacacttttcaggacaaaacggggtgagaactctatcagcgtgtccgaattctcccttctctcaaaatctctctgtgcccttcccgaaaaattccacggcttaaaagacgttgaaaccaggtacagaaaaaggtatcttgaccttatagtcaatgctgataagagagagattttcgtcatgaggagcaaactcatctctgagatcagacgatacctttctgacagggaatttctggaatttgaaactccaatactccagaatgtgtacggaggcgcaaatgcaaggcctttcacgactttccataactgtctcggtcagaaactcttccttagaattgctcctgaactttatcttaagaggcttgttgttggcggttacgagaaggtctttgagatctccaagaatttcaggaatgaagatatcgacacaactcataaccctgagttcaccatgatcgaagtctatgaagcttacagggattacaatgacatgatggatttaaccgaaggcctaatttcggaacttgtgttcaagctgactggcagctatgaagttaaaattggcgaaaacacacttaatcttcataccccctggaaaagaatttccatggaagatgccttaaaagaatatgctggacttgatgtttttgcacactcgcttgaagaattgaaacaaatcgcaatcgaaaacagaatcgaggactacgaaaaagcaaaaacttacggagagttccttgccttgctctttgaaggcctggtagaggacaagctgataaatccgactttcatttatgatttccctgtggaaaactcccctcttgccaaaaatcacaggtcaaaagaaggctttgtcgagagattcgagctcttcttaaatggctgggaattggcaaatggttattccgaactgaacgatcctattgaacagcaaaaaaggttcgaagaacaggacaagaaaagaaagttaggagaccttgaagcccagaccattgattacgatttcgtaaatgccctcggatacggaatgccccctacaggcggcatgggacttggaatcgacaggcttaccatgattctagcgggcctggactctatcaaagaagtaatccttttcccacagatgaaaagggaagactga

SEQ ID NO: 30178 - protein, 515 aa, Methanosarcina barkeri str. Fusaro
MSMEINNEKMSDSLVPSDNESDNNDISDSRVFDDSKLAKLNGIKSQGLNPYPYKFEKNGDICDIQKKFEDFEKNEGLTVRTAGRLYNIRRLGKMIFADLGDQGGRIQVTLRKGNLPDEDFKTFKTLVDSGDIVGVQGTLFRTKRGENSISVSEFSLLSKSLCALPEKFHGLKDVETRYRKRYLDLIVNADKREIFVMRSKLISEIRRYLSDREFLEFETPILQNVYGGANARPFTTFHNCLGQKLFLRIAPELYLKRLVVGGYEKVFEISKNFRNEDIDTTHNPEFTMIEVYEAYRDYNDMMDLTEGLISELVFKLTGSYEVKIGENTLNLHTPWKRISMEDALKEYAGLDVFAHSLEELKQIAIENRIEDYEKAKTYGEFLALLFEGLVEDKLINPTFIYDFPVENSPLAKNHRSKEGFVERFELFLNGWELANGYSELNDPIEQQKRFEEQDKKRKLGDLEAQTIDYDFVNALGYGMPPTGGMGLGIDRLTMILAGLDSIKEVILFPQMKRED

SEQ ID NO: 30179 - DNA, 1506 bp, Thiobacillus denitrificans ATCC 25259
  CDS (1)..(1506): transl_table=11
atgaccgaccccaccaacgcccccgccctcgacgaaaaccagatcatcgccgagcgccgcgccaagctcgccgcgatccgcgaggcgggcgtcgccttccccaacgacttcgagcgccgcgactacgccggcaggctcgcgcacgaacacggcgacaaatccaaggaagcgctcgaagccgaggccgtcgacgtgcagctggcgggccgcatgatgctcaagcgcgtgatgggcaaggcgagcttcgcgacgctgcaggacatgagcggccgcatccaggtctacgtctcgaacgacctgaccgggctcgacgcgcacgaggcgttcaagcgctgggacctcggcgacttcgtcggcgtgagcggcacgctgttcaagaccaacaagggcgaactgacgatccaggcaaaatcggtccgcttgctgtcgaaggcgctgcgtccgctgccggaaaaattccacgggctcgcggaccaggaacagaagtaccgccagcgctatctcgacctcatcaccaacgacgacgcgcggtcgaccttcgtgcgccgctcgaagatcatccaggcgatccgcgaattcatgaccggccacggctttctcgaagtcgagacgccgatgatgcacccgatccccggcggcgccgcggccaagcccttcgtcacccaccacaacgcgctcgacatggagctcttcctgcgcatcgcgcccgagctctatctcaagcggctcgtcgtcggcggcttcgagaaggtgttcgagatcaaccgcaacttccgcaacgagggcttgagcacgcgccacaaccccgagttcacgatgatggagttctacgaggcctaccgcgaatatcgctacctcatggacttcaccgaggcgctgatccgccacaccgcggtcgccgcgaccggctcgacgacgatttcctaccagggaagcacgatcgaactcggcacgcccttcgaccgcctgaccatcgtcgaggcggtgcgcaaataccaccccgagtacaccgtcgagcaactcaacgatcgcgactggctgaccgcgcaattcacggcgatgaaggccaagtaccgcgagcacgacgggctcggcggcctgcagctgaccttcttcgaggagacgaccgaggcgctgctcgtgcagccgaccttcattgtcgactacccggccgaagtctcgccgctggcgcgtcgctccgacacgcagcccgagatcaccgagcgcttcgaactcttcatcaccggccgtgaaatggcgaacggcttttccgaattgaacgacgccgaggaccaggccgaacgcttcatggagcaggtgcgcgccaaggaagccggcgacgaggaggcgatgcactacgacgccgacttcatccgcgcgctcgaacacggcctgccgccgaccggcggctgcggcatcggcatcgaccgcctcgtgatgctgctcaccgattcgccgtcgatccgcgacgtcatcctcttcccgcagatgcggcgcgaggcctga

SEQ ID NO: 30180 - protein, 501 aa, Thiobacillus denitrificans ATCC 25259
MTDPTNAPALDENQIIAERRAKLAAIREAGVAFPNDFERRDYAGRLAHEHGDKSKEALEAEAVDVQLAGRMMLKRVMGKASFATLQDMSGRIQVYVSNDLTGLDAHEAFKRWDLGDFVGVSGTLFKTNKGELTIQAKSVRLLSKALRPLPEKFHGLADQEQKYRQRYLDLITNDDARSTFVRRSKIIQAIREFMTGHGFLEVETPMMHPIPGGAAAKPFVTHHNALDMELFLRIAPELYLKRLVVGGFEKVFEINRNFRNEGLSTRHNPEFTMMEFYEAYREYRYLMDFTEALIRHTAVAATGSTTISYQGSTIELGTPFDRLTIVEAVRKYHPEYTVEQLNDRDWLTAQFTAMKAKYREHDGLGGLQLTFFEETTEALLVQPTFIVDYPAEVSPLARRSDTQPEITERFELFITGREMANGFSELNDAEDQAERFMEQVRAKEAGDEEAMHYDADFIRALEHGLPPTGGCGIGIDRLVMLLTDSPSIRDVILFPQMRREA

SEQ ID NO: 30181 - DNA, 1686 bp, Anabaena variabilis ATCC 29413
  CDS (1)..(1686): transl_table=11
atgtcggaagaagatatccgtgccgctaggctggagaaagtagaacaactcaagcagctaggaactaacccctacgcttaccgttgggagtctacccatcacgccgcccaattgcaagaaaaatttgctgatttaaccagtggtgaagaagtcgatacagaagttgccattgccggacgcattatggcgcgtcgcgttttcggtaaattggctttcttcaccttggaagatgaaacaggcactattcagctttatttagagaaaaatcgtatccaagaaagcatggcagaaactgatgccgatgcttttaatcatctcaaacaactcacagatgtaggagatattctgggagccaagggaaccataaaacggactgaaaagggcgagttatcgatttacgtcaaagaatataccatcctcaccaaatccctactgccgctacccgacaagtggcatgggttaacggatgttgccaagcgctaccgtcaacgctacgttgatttaattgttaaccccgaagtccgccaaactttccgccgtcgcgcccaaattacggctgggattcgccgctatttggaacaaagggattttctagagattgaaaccccagttttgcaaagtgaaactggtggtgctgatgcgcgtcccttcatcacttaccacaacaccttagaaatggagttgtatctgcggattgccacagaactccacctcaaacggttgattgtcggtggttttgaaaaagtatttgagttggggcgcgttttccgcaatgagggaatttctaccagacacaaccctgaatttacctcaattgaaatttaccaagcctacgccgactacaacgatatgatggcgctaacagaaggtattatcaccactgttgcccaagatgtactcggtacgctgcaaattacctaccaaggcgaaacggtagatttgacaccaccttggcgacgggtgacaatgcacgatttagtgaaagaatatacgggcttggatttccattctttccaaacactagaagaagcgaaatcagcaagtaaaaatgctggaattcctggtgtagatgaagcccaaactataggaaaaatcctgaatttagcatttgaagaaaaggtagaagctaacttaattcagccgacctttgtcattgattatcctgtagaaatttcgccattagctaaacctcaccgttctcaacctgggttagtagaaagatttgaattattcatagtcgggcgggagactgcgaatagtttctcagaattaacagaccccatcgaccaaagagaacgtttggaagcccaagcagccaaaaaagccgccggtgacttagaagcccaaggtgtagatgaagatttcttaactgcgttggaatatggtatgccacccacaggcggtttaggtattgggattgatcggttagtcatgttattaactgattctgccagcattcgagatgtaattgctttccctctactcaaacccgaaggcagctttattaaggaatatcgctatgagtcaacaactcaaacactgactatggagtttgatagtggaagtgtttacgaatatttcaaagtaccgcttactgtcaaggaagaattagataatgcaccgtctaagggtcaatatttccataagtttattaaagggaaattcaagtatgaacaattgagttga

SEQ ID NO: 30182 - protein, 561 aa, Anabaena variabilis ATCC 29413
MSEEDIRAARLEKVEQLKQLGTNPYAYRWESTHHAAQLQEKFADLTSGEEVDTEVAIAGRIMARRVFGKLAFFTLEDETGTIQLYLEKNRIQESMAETDADAFNHLKQLTDVGDILGAKGTIKRTEKGELSIYVKEYTILTKSLLPLPDKWHGLTDVAKRYRQRYVDLIVNPEVRQTFRRRAQITAGIRRYLEQRDFLEIETPVLQSETGGADARPFITYHNTLEMELYLRIATELHLKRLIVGGFEKVFELGRVFRNEGISTRHNPEFTSIEIYQAYADYNDMMALTEGIITTVAQDVLGTLQITYQGETVDLTPPWRRVTMHDLVKEYTGLDFHSFQTLEEAKSASKNAGIPGVDEAQTIGKILNLAFEEKVEANLIQPTFVIDYPVEISPLAKPHRSQPGLVERFELFIVGRETANSFSELTDPIDQRERLEAQAAKKAAGDLEAQGVDEDFLTALEYGMPPTGGLGIGIDRLVMLLTDSASIRDVIAFPLLKPEGSFIKEYRYESTTQTLTMEFDSGSVYEYFKVPLTVKEELDNAPSKGQYFHKFIKGKFKYEQLS

SEQ ID NO: 30183 - DNA, 1500 bp, Pseudomonas fluorescens PfO-1
  CDS (1)..(1500): transl_table=11
atgagcgaccaacaactcgaccaggccctgcaacaggaagaaaactccctgatcgccctgcgcaaggaaaagcttgctgccgagcgcgccaagggcaatgccttcccgaacgacttccgccgcgacaactactgcgatgcgctgcagaaacagtacgcggacaagaccaaggaagagctggcagaggcggcgatcccggtcaaggttgcaggtcgcatcatgctcaaccgtggctcgttcatggtgatccaggacatgaccggtcgcatccaggtctacgtcaaccgcaagaccctgtccgaagaaaccctggccgcggtgaaaacctgggacatgggcgacatcatcgccgccgaaggcaccctggcccgttccggcaagggcgacctgtacgtcgagatgaccagcgtgcgcctgctgaccaaatccctgcgcccgctgccggacaagcaccacggcctgaccgacaccgaacagcgctaccgtcagcgctacgttgacctgatcgtcaacgaagacgtgcgtcagactttccgcgtgcgttcgcaagtgatcgcgcacatccgcagcttcctgatgaagcgtgacttcctcgaagtcgaaacgccgatgctgcagaccattcctggcggcgccgcggccaaaccgttcgaaacccaccacaacgcgctggacatggaaatgttcctgcgcatcgcgccagagctgtacctcaagcgcctggtggttggcggtttcgagaaagtattcgagatcaaccgcaacttccgtaacgaaggtgtttcgacgcgtcacaaccctgagttcaccatgttggagttctaccaggcttacgccgactacgaagacaacatggacctgaccgaagaactgttccgtgaactggcgcagttggttctgggcagcaccgacgtgccgtacggcgacaaggtgttccacttcggcgagccgttcgtgcgtctgtcggtgttcgactcgatcctcaagtacaaccctgagctgaccgccgatgacctgaacgacatcgacaaggcgcgcgccatcgccaagaaggccggcgccaaggtgctgggcttcgaaggtctgggcaagctgcaggtgatgattttcgaagagctggtcgagcacaagctggaacagccgcacttcattacccagtatccgttcgaagtgtcgccgctggcccgtcgcaacgacgacaacccgaacgtcaccgaccgcttcgagctgttcatcggcggccgtgaaatcgccaacgcctactccgagctgaacgacgcggaagaccaggccgagcgcttcatggcccaggtggccgacaaggacgccggcgacgacgaagccatgcactacgacgccgacttcgttcgtgcgctggagtacggcatgccgccaacggccggtgaaggcatcggcattgaccgtctggtgatgctgctgaccaactccccgtcgatccgcgacgtgatcctgttcccgcacatgcggccacaagcgtaa

SEQ ID NO: 30184 - protein, 499 aa, Pseudomonas fluorescens PfO-1
MSDQQLDQALQQEENSLIALRKEKLAAERAKGNAFPNDFRRDNYCDALQKQYADKTKEELAEAAIPVKVAGRIMLNRGSFMVIQDMTGRIQVYVNRKTLSEETLAAVKTWDMGDIIAAEGTLARSGKGDLYVEMTSVRLLTKSLRPLPDKHHGLTDTEQRYRQRYVDLIVNEDVRQTFRVRSQVIAHIRSFLMKRDFLEVETPMLQTIPGGAAAKPFETHHNALDMEMFLRIAPELYLKRLVVGGFEKVFEINRNFRNEGVSTRHNPEFTMLEFYQAYADYEDNMDLTEELFRELAQLVLGSTDVPYGDKVFHFGEPFVRLSVFDSILKYNPELTADDLNDIDKARAIAKKAGAKVLGFEGLGKLQVMIFEELVEHKLEQPHFITQYPFEVSPLARRNDDNPNVTDRFELFIGGREIANAYSELNDAEDQAERFMAQVADKDAGDDEAMHYDADFVRALEYGMPPTAGEGIGIDRLVMLLTNSPSIRDVILFPHMRPQA

SEQ ID NO: 30185 - DNA, 1467 bp, Carboxydothermus hydrogenoformans Z-2901
  CDS (1)..(1467): transl_table=11
ttggagcaccaggaactaaacgaacttgttaaagtgcggttagaaaaactttctgagttacggaaaatgggtattgaaccgtacggcggcaagtttgagcgaacccatactgctaaagaaattctcgataactttgaacaattggttgataaaacggtgaaaatagccgggcgcattatggctaaaaggggccacgggaaagcttcttttgctcatatccaggatatgtccggtaaaattcaaatttatgcccgacagaacgaattaggtatcgatgcttataaattatttgaaaaactggatataggtgatatcattggcgttaccggccatgtttttaaaactcaaaagggtgaaatcaccgtctggctctccagttttgaaatattagccaaatccttaagaccactcccggaaaagtggcatgggcttaccgatgtggaacttcgctaccggcaacgctacgttgatttaattgtcaaccctgaagtccgggaaacatttatcttaagaagccgtattgtcaagactattcgggagtttttggaccagaaaggtttcttagaagtggaaaccccaatgatgcatcctattgccggaggggcagcggcaaggccgtttattacccaccacaatgccttagatatgaagttatacttacgtattgccccggaattgtatttaaagcgccttttggttggtggctttgagaaggtttatgagattaacagaaactttagaaatgaaggtatttctaccaaacataatcccgagtttacaatgttagaattatatcaggcctatgccgactaccatgatatgatggatatcaccgaagaattaataacccatgttgctgaaaaggtactgggaaccttagagataacttaccaggggacaccaattaatttacatagaccctggaagcggattcccatgttaaaggcaattgaagaagctaccggagtggattttgccggtgttaaagacccggttcaagcctatgctaaggccaaagagctgggagttccggtggaagaaggcatgggctggggtgaaatcattacagcagtttttgaggaaaaggtggaacctacccttattaatccgacttttgtgattgattatccagtagaagtatcacctttggctaaacgccagaaggaaaatcctgatttaacttaccggtttgagctgtttatctatgggcgggaaatggccaatgctttttccgaactaaacgaccccattgatcaaaaagaacgctttttaaaacagttagaagctcgggcaaaaggaaatgaagaagcgcacatgatggatgaagattatatcactgctttagagtacggaatgccgcctgccggaggactgggaatcggtattgaccgtttggttatgcttttaactgaccaagcttcgattcgggatgttattttattccctttgatgcgtccccgggattaa

SEQ ID NO: 30186 - protein, 488 aa, Carboxydothermus hydrogenoformans Z-2901
MEHQELNELVKVRLEKLSELRKMGIEPYGGKFERTHTAKEILDNFEQLVDKTVKIAGRIMAKRGHGKASFAHIQDMSGKIQIYARQNELGIDAYKLFEKLDIGDIIGVTGHVFKTQKGEITVWLSSFEILAKSLRPLPEKWHGLTDVELRYRQRYVDLIVNPEVRETFILRSRIVKTIREFLDQKGFLEVETPMMHPIAGGAAARPFITHHNALDMKLYLRIAPELYLKRLLVGGFEKVYEINRNFRNEGISTKHNPEFTMLELYQAYADYHDMMDITEELITHVAEKVLGTLEITYQGTPINLHRPWKRIPMLKAIEEATGVDFAGVKDPVQAYAKAKELGVPVEEGMGWGEIITAVFEEKVEPTLINPTFVIDYPVEVSPLAKRQKENPDLTYRFELFIYGREMANAFSELNDPIDQKERFLKQLEARAKGNEEAHMMDEDYITALEYGMPPAGGLGIGIDRLVMLLTDQASIRDVILFPLMRPRD

SEQ ID NO: 30187 - DNA, 1575 bp, Burkholderia sp. 383
  CDS (1)..(1575): transl_table=11
ttgcccttcccgtttgcgttgccgcacccactccgaattccgaccatcatgaccgaaccgacccaaacgcagcccgccgtcaccgcggacgaaaaccagatcatcgccgagcgccgcgagaagctgcgcgccctgcgcgagcaaggcgtcgcctacccgaacgatttccgcccgacgcatcacgcagccgatctgcagacgaccttcgccgactcggacaaggccgcgctggaagcgaacccggtcgaggtgtcggttgccggccggatgatgctcaagcgcgtgatgggcaaggcaagcttcgcgacggtgcaggacggttcgggccagatccagttcttcgtgacgccgaacgacgtcggcgcggaaacctacgacgcattcaagaagtgggacctcggcgacatcgtcgccgcgcgcggcgtgctgttccgcaccaacaagggcgagctgtcggtccagtgcaaggaactgcgcctgctgtcgaaggcgctgcgtccgctgccggacaagttccacggcctgtcggaccaggaaatgcgctaccgccagcgctacgtcgacctgatcgtcacgccggaaacgcgtgatacgttccgcgcccgcaccaagacgatcgcgtcgatccgcaagttcatggacaacgccgagttcatggaagtcgagacgccgatgctgcacccgatcccgggcggcgcggccgcgaagccgttcgtcacgcatcacaacgcgctcgacatgcagatgttcctgcgcatcgcaccggagctgtacctgaagcgcctgatcgtcggcggcttcgaacgcgtgttcgaaatcaaccgcaacttccggaatgaaggcgtgtcgccgcgtcacaacccggaattcacgatgatggagttctacgccgcgtacaccgactatcgctggctgatggacttcaccgagcaactgatccgccaggcggcgatcgatgcgctcggcaccgcgacgatccagtaccagggccgcgagctcgacctcgcgaagccgttccaccgcctgacgatcacgcaggcgatccagaagtacgcgccggactacaccgccggccagctgtcggacgacgcgttcctgcgcaccgaactgaagcgcttcggcgtcgacgtatcgcagccggcgttcctgaacgcgggcatcggcgcgctgcaactcgcgctgttcgaggaaacggccgaagcgcagctgtgggagccgaccttcatcatcgactacccggtcgaagtgtcgccgctcgcacgtgcatcggatacggtgccgggcatcaccgagcgtttcgagctgttcatgaccggccgcgaaatcgcgaacggcttctcggagctgaacgatccggaagaccaggctgcgcgcttcaagaagcaggtcgagcagaaggatgcgggcgacgaggaagcgatgttcttcgacgccgactacatccgcgcactcgaatacgggatgcctccgaccggcggctgcgggatcggcatcgaccgtctcgtgatgctgctgaccgacagcccgacgatccgcgacgtgctgctgttcccgcatctgcgccgcgaagactga

SEQ ID NO: 30188 - protein, 524 aa, Burkholderia sp. 383
MPFPFALPHPLRIPTIMTEPTQTQPAVTADENQIIAERREKLRALREQGVAYPNDFRPTHHAADLQTTFADSDKAALEANPVEVSVAGRMMLKRVMGKASFATVQDGSGQIQFFVTPNDVGAETYDAFKKWDLGDIVAARGVLFRTNKGELSVQCKELRLLSKALRPLPDKFHGLSDQEMRYRQRYVDLIVTPETRDTFRARTKTIASIRKFMDNAEFMEVETPMLHPIPGGAAAKPFVTHHNALDMQMFLRIAPELYLKRLIVGGFERVFEINRNFRNEGVSPRHNPEFTMMEFYAAYTDYRWLMDFTEQLIRQAAIDALGTATIQYQGRELDLAKPFHRLTITQAIQKYAPDYTAGQLSDDAFLRTELKRFGVDVSQPAFLNAGIGALQLALFEETAEAQLWEPTFIIDYPVEVSPLARASDTVPGITERFELFMTGREIANGFSELNDPEDQAARFKKQVEQKDAGDEEAMFFDADYIRALEYGMPPTGGCGIGIDRLVMLLTDSPTIRDVLLFPHLRRED

SEQ ID NO: 30189 - DNA, 1476 bp, Geobacter metallireducens GS-15
  CDS (1)..(1476): transl_table=11
atggaagaactgagcgaattgctgcttcaaaggcggcgcaaggtcgatgccctctgggaggcagggatcaacccctaccccaatgactataaaccccggcacacatcggcggacgtggtggctgcgtatggaaagtgcgagattatagaagagggggcagacccctttgtggtggccggtcggatcattgctcgccgctccttcggcaaggccgccttcgtccagctccaggaccgcaaggggcgcatacagctctacgtgcgcaaggacactctcggtgacgaggcctatgaagcctttgagtccttcgatatcggcgacattatcggcgccaccggcacccccttccgcaccaagaccggcgagctctcccttaacgcgagcgaggtcaggctcctcaccaaatcgttccttcctcttccggagaaattccacggtctcaccgatgtcgagacccgatatcgccagcgctacgttgacctgatcgtgaatcccgaggtgcgggaggtcttcatcaagcgctcccggatcgtcaacctgatccgcgaattcatggtgcgtcacgacttcctcgaagtggaaacgcccatgatgcagccgattcccggaggagccacggcccgtcccttcgttacccaccacaacgccctcgacatggagctttttctccgcatcgcgccggagctctatctcaagcgtctggtggtcggagggttcgaacgggtcttcgagattaaccgcaacttccgcaatgagggaatttcggtccgtcacaacccggagtttaccatgatggagttctaccaggcctacgccaccttcgaggacctgatggatttcaccgaggagcttctctgtcacgtgacccaggaggtgctcggaaccctcgacttcacctatcagggggtggagatcagcttccagcgtccctggaagcggcttaccgtgaaggaggcgatcctcgagtacggcgacatcgacgcaaaatccctcgaagatcgcgacctggcctatgcctacgcccggagcatcgggctcgacctgccgaccgacgtgggctacggcaagcttatcaccgagattttcgaggaggtggcggaggtaaagctgatccagcccaccttcatcaccgcgtatcccacggaggtgtcgcccctttcacgcaagagcgacaaggatcccgatatcgtcgaccgtttcgagttcttttgcgccggccgcgagatggccaatgccttctcggagctcaacgaccccgtggaccagaaggagcgcttcctgggtcaggttgcccagaaagccaagggtgacgaagaggcccactacatggacgaggactacatacgcgcccttgagtacgggatgcctccgacggccggagaagggatcggcatcgaccgcctcgtcatgctcctgaccgactccccgtccatccgggacgtcattctcttcccgcaacttcgcaaggagaaataa

SEQ ID NO: 30190 - protein, 491 aa, Geobacter metallireducens GS-15
MEELSELLLQRRRKVDALWEAGINPYPNDYKPRHTSADVVAAYGKCEIIEEGADPFVVAGRIIARRSFGKAAFVQLQDRKGRIQLYVRKDTLGDEAYEAFESFDIGDIIGATGTPFRTKTGELSLNASEVRLLTKSFLPLPEKFHGLTDVETRYRQRYVDLIVNPEVREVFIKRSRIVNLIREFMVRHDFLEVETPMMQPIPGGATARPFVTHHNALDMELFLRIAPELYLKRLVVGGFERVFEINRNFRNEGISVRHNPEFTMMEFYQAYATFEDLMDFTEELLCHVTQEVLGTLDFTYQGVEISFQRPWKRLTVKEAILEYGDIDAKSLEDRDLAYAYARSIGLDLPTDVGYGKLITEIFEEVAEVKLIQPTFITAYPTEVSPLSRKSDKDPDIVDRFEFFCAGREMANAFSELNDPVDQKERFLGQVAQKAKGDEEAHYMDEDYIRALEYGMPPTAGEGIGIDRLVMLLTDSPSIRDVILFPQLRKEK

SEQ ID NO: 30191 - DNA, 1515 bp, Synechococcus elongatus PCC 7942
  CDS (1)..(1515): transl_table=11
atgtctgatttgcgcgccacccgcctcgaaaaagccctgcaattgcgagagctgggatttgagccctacgcctaccgttgggactgtagccatagtgccgcgcagctccaagcgctctatgctgacttgccagccggggaggaagtggcggttgaggtcgcgatcgcgggccgaattatggcgcggcgcgtcttcgggaagctggccttcttcacgctgcaggatgaaagcggccaaattcagctctacctcgagaagcagcggctcagtgaatcgatggccgcgatcgatgccgaagctttcagtcacctcaaagccctgacagatgtgggcgacattcttggtgtcaaaggtagtgtgcgccgcacggagaaaggcgaactctcgatcgcagtggatcagtacgccattctcactaagtccctgcaacccctgccggataaatggcatggactgacggatgtggagaagcgctaccgccagcgctacgtggacctgatcgtcaacccagaagtacgggagacgtttcggcgtcgcgccaaaatcaccgctgccattcgtcgccacctcgaagatcagggcttcatcgaaatcgaaacgccagtgctgcaagcggaggcaggcggtgcagaagctcggcctttcatcacttaccacaacaccttagaactcgacctttatctgcgaattgcaaccgagttgcacctcaagcgcctaattgtcggcggcttcgagaaagtgtttgaactagggcgcattttccgcaacgagggcatttcaacccgccacaaccctgagttcacctcgatcgaggtctatcaggcctatgccgactacgaagacatgatgcggctaacggaaaccttgattgcccaagttgctgagcaggtggtggggtcgctgcaagtgccctaccaaggtcagacgatcgatctggcgccaccgtggaaacgggcaacgatggcggaactggtgttggcagcgacggggatcgacttcgagtccctgaaagacctagaagcaggaattgcagccgtgaaagcagcaggtattccggtgcctgaggactgccccaacctcggcaaactgctcaaccactgcttcgaagaaaaagtggaagcaacgctgattcagccgacgtttgtgatcgactatccggtggagatttcgccgctggcgaagccgcaccgcagcaaaccagggttagtggaacgctttgagctatttattgtcggccgagaaactgctaacagcttctcggagttaaccgatccggtggatcagcgacaacggttggaagcgcaagcggcagacaaagcagcaggcaatgtcgaagcgaacgacgtcgacgaagacttcttgctggcgctggagcatggcatgccaccgaccggtggcctcggaattggcatcgatcgcctcgtgatgttgctgaccgatagccccagcatccgtgacgtgattgccttcccactgctacgccccgaagcgagctcggaagaggccgaagcctaa

SEQ ID NO: 30192 - protein, 504 aa, Synechococcus elongatus PCC 7942
MSDLRATRLEKALQLRELGFEPYAYRWDCSHSAAQLQALYADLPAGEEVAVEVAIAGRIMARRVFGKLAFFTLQDESGQIQLYLEKQRLSESMAAIDAEAFSHLKALTDVGDILGVKGSVRRTEKGELSIAVDQYAILTKSLQPLPDKWHGLTDVEKRYRQRYVDLIVNPEVRETFRRRAKITAAIRRHLEDQGFIEIETPVLQAEAGGAEARPFITYHNTLELDLYLRIATELHLKRLIVGGFEKVFELGRIFRNEGISTRHNPEFTSIEVYQAYADYEDMMRLTETLIAQVAEQVVGSLQVPYQGQTIDLAPPWKRATMAELVLAATGIDFESLKDLEAGIAAVKAAGIPVPEDCPNLGKLLNHCFEEKVEATLIQPTFVIDYPVEISPLAKPHRSKPGLVERFELFIVGRETANSFSELTDPVDQRQRLEAQAADKAAGNVEANDVDEDFLLALEHGMPPTGGLGIGIDRLVMLLTDSPSIRDVIAFPLLRPEASSEEAEA

SEQ ID NO: 30193 - DNA, 1470 bp, Moorella thermoacetica ATCC 39073
  CDS (1)..(1470): transl_table=11
atgaagttggaagctgaaaatgatttaatggccgtaaggctggaaaagctgcaccagctgcaggaagccggcatcgaaccctacggcggccccttcgaagtcacccacagcactaccgccatccgggagcgcttcgatgaactcgaaggtcaggaggtagccctggccggtcgcctcctggctatcaggagccacggcaaggcttcctttgctgatctgcaggaccgggagggccgcttgcaactttacattcgcctcgataatgtaggtcccgggatttatgaactgttccaaaaactcgatatcggcgatatcgtcggcgtccgcggcaaggtttttcgtacccatcgcggcgaaatatcagtagaagtccgtcaactgacactcctgtgcaagagtttacgccccctgccggagaaatggcatggcttgaaggatgtcgacctgcgctaccggcagcgttacctggatctgattgtcaacccggaggtcaaacaggtatttatcacccgggcccggatcatccgcgccatccggtccttcctggacaaccgaggctttttggaagtagagacaccgaccatgcatcccattgccggcggcgccgctgccaggccctttatcacccatcacaacgccctggatattgacctctacctgcgcattgccctggaactgcatttaaaacggctgctggtgggcggcctggaaaaggtctacgaaatgggccgcattttccgcaatgaaggcatctccaccaaacacaaccccgagtttaccatgctggagctctaccaggcctatgccgattattatgtcatgatggatctgctggaggaaatggtagcctatgtcgcccgggaggctctgggtaccactgttgttacctaccagggggacaggctggatctcacccctccctggccgcggttaaccatgctggaagctattaagaaatactacggcgtggactttgatcagttgcccacggccgaggacgcccggcgggcagccatcagcctgggcctggagatagagccgggcatggagcgggggaaaataatcaacgaggtctttgaagccacagtcgaaccccatcttattcagccgaccttcatcctggattacccggtggccatatccccgctggccaagcgaaaaaaagaaaacccggactttacctaccgctttgaagcctttatagccggcagggaattggccaacgctttctccgagctcaatgaccccatcgaccagcgacggcgctttgaagcccagatggctgaaagggcggccggcgacgaagaggcccacatgatggacgaagacttcttgcaggccctggagtacggcatgccgcctgcaggggggatgggcatcggcatcgaccgcctggtcatggttcttacggattcgccctccatcagggacgttatcctcttccccactatgcggccgaaggaagaatga

SEQ ID NO: 30194 - protein, 489 aa, Moorella thermoacetica ATCC 39073
MKLEAENDLMAVRLEKLHQLQEAGIEPYGGPFEVTHSTTAIRERFDELEGQEVALAGRLLAIRSHGKASFADLQDREGRLQLYIRLDNVGPGIYELFQKLDIGDIVGVRGKVFRTHRGEISVEVRQLTLLCKSLRPLPEKWHGLKDVDLRYRQRYLDLIVNPEVKQVFITRARIIRAIRSFLDNRGFLEVETPTMHPIAGGAAARPFITHHNALDIDLYLRIALELHLKRLLVGGLEKVYEMGRIFRNEGISTKHNPEFTMLELYQAYADYYVMMDLLEEMVAYVAREALGTTVVTYQGDRLDLTPPWPRLTMLEAIKKYYGVDFDQLPTAEDARRAAISLGLEIEPGMERGKIINEVFEATVEPHLIQPTFILDYPVAISPLAKRKKENPDFTYRFEAFIAGRELANAFSELNDPIDQRRRFEAQMAERAAGDEEAHMMDEDFLQALEYGMPPAGGMGIGIDRLVMVLTDSPSIRDVILFPTMRPKEE

SEQ ID NO: 30195 - DNA, 1527 bp, Burkholderia thailandensis E264
  CDS (1)..(1527): transl_table=11
atgaccgaaccgatccaaccgcaggccgctgtcgcagcggacgaaaaccagatcgtcgcggaacgccgcgacaagctgcgcgcgctgcgcgaccaaggcatcgcctatccgaacgacttccagccgacgcaccacgcggccgatctgcagaccgcatacgcggacgccgacaaggaagcgctcgaggcgaagtcgctcgaggtcgcgatcgccggccggatgatgctcaagcgcgtgatgggcaaggcgagcttcgcgacggtgcaggacggctcgggtcagatccagttcttcgtgacgcccgccgacgtcggcgcggaaacgtacgatgcgttcaagaagtgggacctgggcgacatcgtcgccgcgcgcggcgtgctgtttcgcacgaacaagggcgagctgtcggtgaagtgcacgcagctgcggctgctcgcgaaggcgctgcgcccgctgcccgacaagttccacggcctcgctgaccaggaaacgcgctatcgccagcgctacgtcgacctgatcgtcacgcccgagacgcgcacgacgtttcgcgcgcgcacgaaggcgatcgcgtcgatccgcaagttcatgggcgacgccgatttcatggaagtcgagacgccgatgctgcacccgatcccgggcggcgcggccgcgaagccgttcgtcacgcatcacaacgcgctcgacatggaaatgttcctgcgcatcgcgcccgagctgtacctgaagcgcctcatcgtcggcggcttcgagcgcgtgttcgagatcaaccggaatttccgcaacgagggcgtgtcgccgcgccacaatccggaattcacgatgatggagttctacgccgcgtacaccgactaccgctggctgatggacttcaccgagcggctgatccgccaggcggccgtggacgcgctcggcaccgcgacgatccagtaccagggccgcgagctcgatctcgcgcaaccgtttcatcgcctgacgatcacgcaggcgatccagaagtacgcgcccagctacacggatggccaactgtcggacgacgcgttcctgcgcagcgaactgaagcgcctcggcgtcgacgtcacgcagcccgcgttcctgaacgccggcatcggcgcgctgcagctcgccctcttcgaggaaaccgcggaagcgcaactgtgggagccgaccttcatcatcgactacccgatcgaagtgtcgccgctcgcgcgcgaatcggacacggtggccggcatcaccgagcgtttcgagctcttcatcaccggccgcgaaatcgcgaacgggttctcggagctgaacgatcccgaagaccaggccgcgcgcttcaagaagcaggtcgaacagaaggacgcgggcgacgaggaagcgatgttcttcgatgcggactacatccgcgcgctcgaatacgggatgcctccgacaggcggctgcgggatcggcatcgaccgtctcgtgatgctgctgaccgacagcccgacgatccgcgacgtgctgctgttcccgcacctgcgtcgcgaggactga

SEQ ID NO: 30196 - protein, 508 aa, Burkholderia thailandensis E264
MTEPIQPQAAVAADENQIVAERRDKLRALRDQGIAYPNDFQPTHHAADLQTAYADADKEALEAKSLEVAIAGRMMLKRVMGKASFATVQDGSGQIQFFVTPADVGAETYDAFKKWDLGDIVAARGVLFRTNKGELSVKCTQLRLLAKALRPLPDKFHGLADQETRYRQRYVDLIVTPETRTTFRARTKAIASIRKFMGDADFMEVETPMLHPIPGGAAAKPFVTHHNALDMEMFLRIAPELYLKRLIVGGFERVFEINRNFRNEGVSPRHNPEFTMMEFYAAYTDYRWLMDFTERLIRQAAVDALGTATIQYQGRELDLAQPFHRLTITQAIQKYAPSYTDGQLSDDAFLRSELKRLGVDVTQPAFLNAGIGALQLALFEETAEAQLWEPTFIIDYPIEVSPLARESDTVAGITERFELFITGREIANGFSELNDPEDQAARFKKQVEQKDAGDEEAMFFDADYIRALEYGMPPTGGCGIGIDRLVMLLTDSPTIRDVLLFPHLRRED

SEQ ID NO: 30197 - DNA, 1629 bp, Syntrophus aciditrophicus SB
  CDS (1)..(1629): transl_table=11
ttggcaatctcggaaagggattttcgttggaagaagaccggggccaccggacattcagggttttccaaaaccctcttgactaatggggaaaaaaaagatagtgaagttcgccttctaaaaagcgtaagggtggaaattatggaagaaagtgaacttttacggaaacggattgaaaagataagcgccctgaaagcagagggggttgatctgtatcccaatggcgtctgtgtcggcgttacaaccgagtcgattctggaacgcttcaaggatgccgataatgaggctctggcggggctcaacgaacggtttactctggcgggaagaatgatggccatccggaatttcggaaaagcggccttcatcaatattcaggacagaaagggacgaatccaggcctatcttcaccggaacagcatcggggatgcgagttacgcgcttttcaagcgcctggacgtgggggacatcgtcttcataggcggcaggcccatccggaccaaaaccggggaactgaccattgaggctgatgaattcatgcttctgtccaaggccatccggcctctgccggaaaaatggcacggtctgacggatgtcgaaacccggtatcggcagcgtcatgtggatctcatcgtcaatccgaaggtgcgggaggtctttattacccggagcaggatcatcaatgccatccgtcagttcatggatgagcgggattttctggaagtggagacgcccatgatgcagcccaaggctggcggcgccacggcgcgccctttcgagacgcatcacaacgccctggggatggatctttatctccgtatcgcccccgaactgtatctgaaacgtctcattaccggcgggatggaacgggtttacgaaataaaccggaacttccgtaatgaagggatatccacattccacaatcccgaatttacgatgatggaattctatcaggcctatgcgacttatgaggacctgatggatatgacagaagaactgtttgcttctgttgcaatgaaaattttcggcggcctgaaattccagtatcagggaatggatatcgacctgaccccgccgtggccccgtatatcggtcaaggagtcgattctgcggcatcatgacatcgatcccgacgtgctggaggatcaggagaaggcctatgcctatgcctgcaaactgggacttgaagttcgaaagacggaaccgctgggaaaactcgtaaccgccatcttcgaagaggtcgtggaaaaagagcttgtgcaacccacgttcgttactctttatccggtcgaggtttctccgctttcccggcgcaacgggaaagatccttccctgaccgaccgcttcgaactttacatagccggcagagaaatcgccaatgccttttccgagttgaatgatcctcaggatcaacgggagcgtttcctgatgcaggccagggaaagggaagaggggaatgaggaaacgcacgtcatggatgaggattatgtccgcgtccttgaatacgccatgccgccgacggccggcgaggggatcgggattgaccggctggtcatgctgttcacggattcaccgtccatcagggatgtcatcctgttcccccacatgcggaagcgggataaggaaacggactga

SEQ ID NO: 30198 - protein, 542 aa, Syntrophus aciditrophicus SB
MAISERDFRWKKTGATGHSGFSKTLLTNGEKKDSEVRLLKSVRVEIMEESELLRKRIEKISALKAEGVDLYPNGVCVGVTTESILERFKDADNEALAGLNERFTLAGRMMAIRNFGKAAFINIQDRKGRIQAYLHRNSIGDASYALFKRLDVGDIVFIGGRPIRTKTGELTIEADEFMLLSKAIRPLPEKWHGLTDVETRYRQRHVDLIVNPKVREVFITRSRIINAIRQFMDERDFLEVETPMMQPKAGGATARPFETHHNALGMDLYLRIAPELYLKRLITGGMERVYEINRNFRNEGISTFHNPEFTMMEFYQAYATYEDLMDMTEELFASVAMKIFGGLKFQYQGMDIDLTPPWPRISVKESILRHHDIDPDVLEDQEKAYAYACKLGLEVRKTEPLGKLVTAIFEEVVEKELVQPTFVTLYPVEVSPLSRRNGKDPSLTDRFELYIAGREIANAFSELNDPQDQRERFLMQAREREEGNEETHVMDEDYVRVLEYAMPPTAGEGIGIDRLVMLFTDSPSIRDVILFPHMRKRDKETD

SEQ ID NO: 30199 - DNA, 1683 bp, Francisella tularensis subsp. holarctica
  CDS (1)..(1683): transl_table=11
atgagtagtaaattaaaagatttgataaaaacaacgataaaagaatatttagaagctaatgatatcacagttaaagatgctattagaggcaagattagagagcagattagtgagtttttaggcgaggtaagcgagataaatgagcaggttaaagaacaaatttcagcgcttgtgaaaaagcatgtaacagaattacaagaaagctcacaaattgctttaagaaaagaaaagctaaaaactttagctcagcaaaataatggcataagccatccaaatagtttccgaagaaatgctgttgctatagagttacaggctcgctatactgataagactaagcaagaattagaagagctagataataaacaacaatatagtttgacaggtagagtagttctacgccgtgtcatgggtaaagcatcttttataacactacaagattatactggtagaatccaagtttatctaaaaaagagtgacttgccagatgggcaatatgaaacttttaagaatctatgtgacttgggtgatatagttggtattactggtactatgtttaagacaaatactggtgaactttctgttgaagcaaatcactttgagattttgacaaaggcaattcgtcctttgcctgataaattccatggtttggcagatcaagaaatgagatatcgtcaaagatatgttgatttaattacaaatgaaaaggcaagagaagtctttaaagtacgctcaaaagttgtgagctttatccgtaactactttgatagactagattttatggaagtagagacgccgatgatgcatgttttgcaaggtggtgctgctgctaagccatttaaaactcatcacaatgctttggatatgcctttatatttgcgtattgctccagaactttatctaaaaagactagttgttggtggttttgagcgagtttatgagataaaccgtaattttagaaacgaaggtatatcttcacgccataatccagaatttacaatgctagagttctatatggcgtatgctgattataatgaccttatggatctaacagaagatatgctatctaaacttgtacaggaagtaattggtagcgagatacttgagtatggtgagtataaaatcaactttggtggtaagtacgaacgaatctccatggttgactcaattgttaagtataatgatgatattaccaaagaagatttagtaacatttgaatctgctaaaaagattgctgagaaactaaaaataaaagttgaagcttaccatgaacttggacatttgataaacgaaatatttgaagaaactgtcgagcatcagcttattcaaccgacatttattacagattatccagctgtagtttcaccattggcgcgtagacaagacggtaaccctgagtttaccgatagatttgagttctttattggagcacgtgaagttgctaacggcttctctgagctaaatgatgctgaagatcaagcagagcgtttcagaaaacaggttgaagctgcggcatctggagatgatgaagctatgccttatgacaaagactatattcgcgcactagagtatggtatgcctcctacagcgggacaaggaatcggtattgatagactggtaatgtatctaacaaactctcaatcaattagagatgtgattctatttccgcatatgaagcctgagtaa

SEQ ID NO: 30200 - protein, 560 aa, Francisella tularensis subsp. holarctica
MSSKLKDLIKTTIKEYLEANDITVKDAIRGKIREQISEFLGEVSEINEQVKEQISALVKKHVTELQESSQIALRKEKLKTLAQQNNGISHPNSFRRNAVAIELQARYTDKTKQELEELDNKQQYSLTGRVVLRRVMGKASFITLQDYTGRIQVYLKKSDLPDGQYETFKNLCDLGDIVGITGTMFKTNTGELSVEANHFEILTKAIRPLPDKFHGLADQEMRYRQRYVDLITNEKAREVFKVRSKVVSFIRNYFDRLDFMEVETPMMHVLQGGAAAKPFKTHHNALDMPLYLRIAPELYLKRLVVGGFERVYEINRNFRNEGISSRHNPEFTMLEFYMAYADYNDLMDLTEDMLSKLVQEVIGSEILEYGEYKINFGGKYERISMVDSIVKYNDDITKEDLVTFESAKKIAEKLKIKVEAYHELGHLINEIFEETVEHQLIQPTFITDYPAVVSPLARRQDGNPEFTDRFEFFIGAREVANGFSELNDAEDQAERFRKQVEAAASGDDEAMPYDKDYIRALEYGMPPTAGQGIGIDRLVMYLTNSQSIRDVILFPHMKPE

SEQ ID NO: 30201 - DNA, 1467 bp, Desulfitobacterium hafniense Y51
  CDS (1)..(1467): transl_table=11
atggatgaaatgaatgatctctggcgggttcgcctggacaagctggctcagttaagagaaaatggggtagagccttatgcggatcgctatcagagaactcatatggcccaagagattctggatggatttgatacccttgagggtcaagaggtcaagattgccggtcgtatgatgtccaaaagggaccagggtaaagtggtatttacccatatacaggatttcagcggccagatccaagcttatatccgtaaggatgatgtgggcgaagactggtttgaactgatttctaagtttgatattggtgacatcgttggcattaaaggtaccgtgttccggacacggcggggagaaatctccgtgcatgccaatgaggttcagattttatccaaatcaatgcgccctttgccggagaaatttcatggcttaactaatgttgaactccgctatcgtcaacggtacgtggatctgattatgaacccggaagtccgcaatgtctttgttatgagaagtaagattatccgctccatgaggaacttcctggaaggtcaaggcttcctggaagtggagacgcctactctccatacgattccgggtggggctgctgcccgcccctttatcacccatcacaacactttagatatggatctttatttgcgcattgccctggagcttcctttaaagcgattaattgtcggaggctttgataaagtatttgagataggaagaaacttccgcaatgaagggatttccattaagcataatccggagttcacgatgatggagctctatcaggcctacgcaaactttgaggatatcatggaactcaccgagaacatgatctccgccatcgccaaagaagttcatggaaccaccgaagtaacctatcaaggtcaaatgattgattttaaaacaccttggcgccgcctgcccatgctcgaaggcatcttagaatatggtggagtggatttcagtcagattcatacagatgaagaagcacaacaggccgctaaggaaaagggccttaaggtcgaaccgggaagctctcgtggcaagatcattaacgaattttttgaagagtttgtcgagcccaatctcatccaaccgacgtttgttatcggtcatccggtagagatttcccctctagctaagagaaatgctgaacatcctgaatatacggatcgttttgaagcttttgcttatggcagagaattagggaatgctttttcggaattaaatgatcctatcgatcaaagacagcgtttcgaagctcaagtggctgagcgggataaaggtgacgatgaagcccatatgatggatgaagacttcgtccaggctttggagtacggtcttccgcctacagggggattaggaatcggtatcgaccgcttggtgatgcttttgaccgattcagcgtccatccgggacgtcatccttttccccacgatgcggcccagagaagacgattaa

SEQ ID NO: 30202 - protein, 488 aa, Desulfitobacterium hafniense Y51
MDEMNDLWRVRLDKLAQLRENGVEPYADRYQRTHMAQEILDGFDTLEGQEVKIAGRMMSKRDQGKVVFTHIQDFSGQIQAYIRKDDVGEDWFELISKFDIGDIVGIKGTVFRTRRGEISVHANEVQILSKSMRPLPEKFHGLTNVELRYRQRYVDLIMNPEVRNVFVMRSKIIRSMRNFLEGQGFLEVETPTLHTIPGGAAARPFITHHNTLDMDLYLRIALELPLKRLIVGGFDKVFEIGRNFRNEGISIKHNPEFTMMELYQAYANFEDIMELTENMISAIAKEVHGTTEVTYQGQMIDFKTPWRRLPMLEGILEYGGVDFSQIHTDEEAQQAAKEKGLKVEPGSSRGKIINEFFEEFVEPNLIQPTFVIGHPVEISPLAKRNAEHPEYTDRFEAFAYGRELGNAFSELNDPIDQRQRFEAQVAERDKGDDEAHMMDEDFVQALEYGLPPTGGLGIGIDRLVMLLTDSASIRDVILFPTMRPREDD

SEQ ID NO: 30203 - DNA, 1509 bp, Saccharophagus degradans 2-40
  CDS (1)..(1509): transl_table=11
atgagcgattcacaaacaccaattaataccgatgacgaaaataaattagtagcagagcgccgcgccaagttagcggcaattcgcgagcagggcaatgcgttcccgaatgagtttcgtccgcaaaatcaagcgcaagatttacaagaaagccatggcgataaaactaaagaggctttagaagaagcggctgaagtggtgagtgtggccggtcgtattattcgcaaccgcggtgcgtttatggagctgcaagatggcagcggccgcatccagctatacgtaaccaaagaagcgcgtccgttcgcgaagtcgttggacttgggcgacattgttggtgcaaaaggtgtgctgcataagtccggtaaaggcgacttgtatgtaagcttagatgaataccagttgcttactaaggcattgcgcccgctaccggataagttccatggattggctgaccaagaaatgcgttatcgtcagcgctatgtggatttaattgcaaacccagaagtgcgaaaaacctttgttactcgatcgcgcgttgtgcaatttattcgaaactatttaaacgaaaaagcgtttttagaagtagaaacgcccatgctgcaaactattcctggtggtgcgtctgcacgcccatttattacgcaccacaatgcgctagatatggatatgtatttgcgcatcgcacccgagctttaccttaagcgtttggtggtaggtggtttcgaaagggtatacgagattaaccgcaacttccgcaacgaagggttatctactcgtcacaatccagaatttactatgttggagttttatcaggcttacgcggattacaatgacctgatggacttaaccgaagacatgctgcgcaacctagctcaaactgtgttaggcgatacgaaagttgtgaatacgttgccaagcaaaggcgacgacgagccagaaaccgttacctacgactttgctcagccgtttacacgtctatctgtgtttaactctattttgcagtacaacccagaattaaaagcagagaatatcgatacccttgaggccgcgcgtgaagtagctaaaaacctcggtgttcagctaaaagacagctacggtttaggcaaggttcaaatcgagatattcgagaaaaccgttgagcacagattaattcagccaacttttattacagagtacccaaccgaggtatctccacttgctcgtcgaagcgacagtaacccttttgttaccgatcgttttgagttctttgtgggtggtcgtgaaattgctaatggtttttcggagcttaacgatgctgaagatcaggcgcagcgctttaaagagcaggttgccgaaaaagacgccggcgatgacgaggctatgcattacgatgccgactatgtgcgagcacttgaatacggtttgccgccaactgcgggtgaaggtataggtatcgatcgtttggttatgttactaaccgattctccatctattcgcgacgtattgttgttcccgcatatgcgtcctgagtaa

SEQ ID NO: 30204 - protein, 502 aa, Saccharophagus degradans 2-40
MSDSQTPINTDDENKLVAERRAKLAAIREQGNAFPNEFRPQNQAQDLQESHGDKTKEALEEAAEVVSVAGRIIRNRGAFMELQDGSGRIQLYVTKEARPFAKSLDLGDIVGAKGVLHKSGKGDLYVSLDEYQLLTKALRPLPDKFHGLADQEMRYRQRYVDLIANPEVRKTFVTRSRVVQFIRNYLNEKAFLEVETPMLQTIPGGASARPFITHHNALDMDMYLRIAPELYLKRLVVGGFERVYEINRNFRNEGLSTRHNPEFTMLEFYQAYADYNDLMDLTEDMLRNLAQTVLGDTKVVNTLPSKGDDEPETVTYDFAQPFTRLSVFNSILQYNPELKAENIDTLEAAREVAKNLGVQLKDSYGLGKVQIEIFEKTVEHRLIQPTFITEYPTEVSPLARRSDSNPFVTDRFEFFVGGREIANGFSELNDAEDQAQRFKEQVAEKDAGDDEAMHYDADYVRALEYGLPPTAGEGIGIDRLVMLLTDSPSIRDVLLFPHMRPE

SEQ ID NO: 30205 - DNA, 1530 bp, Methylobacillus flagellatus KT
  CDS (1)..(1530): transl_table=11
gtgagtgacgcgcaaaatgccaagacggtaaatgaagcagccagtgtgcagccggacgaaaaccatgtgatcgccgagcgccgcgagaagctcaaggcgattcgcgaacagggcgtggcctttcccaacgatttcaggcctgagcatatcgcacaaagcctgcatgatagttacgatgccgttgaagccgaggcgctggagtctcaggcactaggcgtggcgatcgctggtcgcatgatgctcaagcgcgtcatgggcaaggccagctttgccactgtgcaggatagaagcggccgcatccagatatttattaccagagaaaatgtcggcgaagcaacctacgacgctttcaagaaatgggacctgggcgatatcatcgcggcccggggaactttgttcaagaccaagacgggggagctttcggtcaaggtaagcgagctacgcctgctgaccaagtccctacgccccttgccggaaaagtttcatggtttggcagatcaggaaaccaaatatcgccagcgctatgtcgacctgattgtctccgaggaaacccgcaagactttcgtggcgcgcagcaagatcgtggcggcgattcgtgcgttcatgctcagccacgagtttctggaagtggagacgcctatgttgcatcccatccccgggggcgccgcagccaagcccttcatcacccaccataatgcgctggacctgcaaatgtacatgcggattgcgcccgagctttatctcaagcgcctcgtggttggcggtttcgaacgggtgttcgagatcaaccgtaatttccgcaacgaaggcttgagcgtaagacacaatcccgagttcaccatgatggagttttatgcggcctatacggactacaagtggctgatggatttcaccgagagttgcattcgtgctgcagcgattgcggcctgcgggtcagccgtggtcgaatatcaggggcgggagctggacttgggcaagccatttgaacgactgaccattatcggcgcaatccagaaatacgcgccgcagtacacgctggagcaattgagcgaccaggcatttctacgccaggagctcaaaaagttcggagtggaggccttaccccacttgggcctgggtgccttgcaactggccttgttcgaggaaacggcggaaagccagctctggaacccgacctatatcatcgattatccggtcgaggtatccccgctggcgcgtgcatccgatagcgatccctcaatcactgagcggtatgagttatttattacggggcgtgaaattgcgaatggcttctcggagttgaacgatgccgaagaccaggccgcccgcttccatgcgcaggtggccgccaaggaggctggcgatgacgaggccatgtattacgatggggacttcattcgtgcactcgagtacggcatgccgccgacaggggggtgcggtatcggcatcgatcgcttggtaatgctgctgaccgatagccccagtatacgtgacgtgatcctgtttccgcatatgcggccagaacattaa

SEQ ID NO: 30206 - protein, 509 aa, Methylobacillus flagellatus KT
MSDAQNAKTVNEAASVQPDENHVIAERREKLKAIREQGVAFPNDFRPEHIAQSLHDSYDAVEAEALESQALGVAIAGRMMLKRVMGKASFATVQDRSGRIQIFITRENVGEATYDAFKKWDLGDIIAARGTLFKTKTGELSVKVSELRLLTKSLRPLPEKFHGLADQETKYRQRYVDLIVSEETRKTFVARSKIVAAIRAFMLSHEFLEVETPMLHPIPGGAAAKPFITHHNALDLQMYMRIAPELYLKRLVVGGFERVFEINRNFRNEGLSVRHNPEFTMMEFYAAYTDYKWLMDFTESCIRAAAIAACGSAVVEYQGRELDLGKPFERLTIIGAIQKYAPQYTLEQLSDQAFLRQELKKFGVEALPHLGLGALQLALFEETAESQLWNPTYIIDYPVEVSPLARASDSDPSITERYELFITGREIANGFSELNDAEDQAARFHAQVAAKEAGDDEAMYYDGDFIRALEYGMPPTGGCGIGIDRLVMLLTDSPSIRDVILFPHMRPEH

SEQ ID NO: 30207 - DNA, 1542 bp, Burkholderia xenovorans LB400
  CDS (1)..(1542): transl_table=11
atgaccgaaccgacccaaccgaacgcggcccagcctaatgtcgtacccgaggtggacgacaacaagatcatcgccgagcgccgcgaaaagctgcgcgagctgcgtgagcaaggcgtcgcctatccgaacgatttccgccccacgcatcacgccgaagatttgcaagcgcaatacgagcactccgacaaggaagcgctcgaagcgaatccgctcgaagtcgcgatcgccggccgcatgatgctcaagcgcgtgatgggcaaggcgagctttgcgaccgtgcgcgacggctcgggtcagatccagttcttcatcacgcccgccgacgtcggccaggaaacgtacgacgccttcaagaagtgggacatgggcgacatcgtcgcggcgcgcggcgtactgttccgcaccaacaagggcgagctctcggtgcgctgcaccgaactgcgtctgctgtcgaagtcgctgcggccgctgccggacaagttccacgggctgtccgaccaggaaatgaagtatcgccagcgctatgtcgatctgatcgtcacgccggaaacgcgcaagactttcgttgcgcgcacgaaggcgatttcgtcgatccgcaagttcatggccgacgccgacttcatggaagtcgaaacgcccatgctgcacccgattccgggcggtgcggcggccaagccgttcaccacgcaccacaacgcgctcgacatgcagatgttcctgcgcatcgcgccggagctgtatctgaagcgtctggtggtcggcggcttcgagcgtgtgttcgagatcaaccgtaacttccgcaatgagggcgtgtccgtgcgccacaatccggaattcacgatgatcgagttctacgcggcgtacaccgactacaagtggctgatggacttcaccgagcagttgatccgccaggccgccatcgacgcgctgggcacggccaccatcacgtatcagggccgcgaactggatctggccaagccgttccatcgcctcacgatcacccaggcgatccagaagtacgcgccgcagtacacgaacgagcaactcgccgacagcgctttcctgcgcaccgaactgaagaagttcggcgtggacgcatcgcagccgcagttcctgaacgcgggcgtcggtgcgctgcaactcgcgctgttcgaggagaccgccgagtcgcaattgtgggagccgacctacatcatcgactacccgatcgaggtttcgccgctcgcgcgcgcgtcggacaaggtcgagggcatcacggagcgtttcgagctgttcatcaccggccgtgaaatcgccaacggcttctcggagctgaacgatccggaagaccaggcggcccgcttcaggaagcaggtcgaccagaaagacgccggcgacgaagaagccatgttctacgacgcggactacattcgcgcgctcgaatacggcatgccgccggccggcggttgcggcatcggtatcgaccgtctggtcatgttgctgaccgatagcccgagcattcgcgacgtgattctgttcccgcatctgcgccgcgaagactga

SEQ ID NO: 30208 - protein, 513 aa, Burkholderia xenovorans LB400
MTEPTQPNAAQPNVVPEVDDNKIIAERREKLRELREQGVAYPNDFRPTHHAEDLQAQYEHSDKEALEANPLEVAIAGRMMLKRVMGKASFATVRDGSGQIQFFITPADVGQETYDAFKKWDMGDIVAARGVLFRTNKGELSVRCTELRLLSKSLRPLPDKFHGLSDQEMKYRQRYVDLIVTPETRKTFVARTKAISSIRKFMADADFMEVETPMLHPIPGGAAAKPFTTHHNALDMQMFLRIAPELYLKRLVVGGFERVFEINRNFRNEGVSVRHNPEFTMIEFYAAYTDYKWLMDFTEQLIRQAAIDALGTATITYQGRELDLAKPFHRLTITQAIQKYAPQYTNEQLADSAFLRTELKKFGVDASQPQFLNAGVGALQLALFEETAESQLWEPTYIIDYPIEVSPLARASDKVEGITERFELFITGREIANGFSELNDPEDQAARFRKQVDQKDAGDEEAMFYDADYIRALEYGMPPAGGCGIGIDRLVMLLTDSPSIRDVILFPHLRRED

SEQ ID NO: 30209 - DNA, 1548 bp, Ralstonia metallidurans CH34
  CDS (1)..(1548): transl_table=11
atgaccgaaccgacccgcgcccaagccgccacgcccaccaccgaagggcttgccgtagatgagaacaagatcatcgccgagcggcgcgagaaactgcaggccctgcgccagcaaggcgtggccttccccaacgatttccagccgacgcaccaggccggcgcgctgcacgcgcagtatggcgaaacggaccaggccacgctggaagccagccccgtggaagtgtccatcgccggacgcatgatgctcaagcgcgtgatgggcaaggccagcttcgccacggtccaggacggcagcggccagatccagttctacatcacgcgcgacaaggtcggtgaagacgtctatgccgcgttcaagcactgggacctcggcgacatcatcagcgcgcgcggagaactgttccgcacgaacaagggcgagttgtcggtgcaggtgcgcgaactgcgcctgctgtcgaaggcactgcgtcccctgccggacaagttccatggcctggccgaccaggaaaccaaataccgccagcgctatgtggacctgatcgtctcgccggaaacgcgcagcacgttccgcgcccgcacccaggccatctcgtcgatccgccgccatatggccgatgccggctttatggaagtggaaacgccgatgctgcacccgattccgggtggcgcggcggccaagccgttcatcacgcaccacaacgcactggacatgcagatgttcatgcgcatcgcgcccgagctctatctgaagcgcctgatcgtcggcggcttcgagcgcgtgttcgaaatcaaccgcaacttccgtaacgaaggggtgagcccgcgccacaaccccgagttcacgatgatggagttctacgcggcctacacggattaccgttggctgatggacttcaccgagaacctgatccgtcaggccgcaattgacgcgcgtggcagcgccacggtgacgtaccagggccgcgaacttgatctgtccaagccgttccatcgcctgacgatctgcggggcgatccagaagtacgcgccggaatacaccgacgcgcagcttgccgatgccgacttcctgcgcgccgagctcaagaacaagttcaagatcaataccagcgcgccgcagttcctgaacgccggcctgggcacgctgcaactggtgctcttcgaggaaaccgccgaagcgcaactctgggaaccgacctacatcgtcgactacccggtcgaggtatcgccgctggcgcgcggctcggacacgcagccgggcattaccgaacgcttcgaactgttcatcacgggccgcgagatcgccaacggcttctccgagcttaacgacccggaagaccaggccgaacgtttccgcaagcaggtcgagcagaaggatgcgggcgacgaggaagcgatgtacttcgacgccgattacatccgcgcgctcgagtacggcatgcctccgacaggcggctgcggtatcggcatcgaccgcctggtgatgctgctgaccgacagcccgaacatccgcgacgtaatcctgttcccgcacctgcgccgcgaggactga

SEQ ID NO: 30210 - protein, 515 aa, Ralstonia metallidurans CH34
MTEPTRAQAATPTTEGLAVDENKIIAERREKLQALRQQGVAFPNDFQPTHQAGALHAQYGETDQATLEASPVEVSIAGRMMLKRVMGKASFATVQDGSGQIQFYITRDKVGEDVYAAFKHWDLGDIISARGELFRTNKGELSVQVRELRLLSKALRPLPDKFHGLADQETKYRQRYVDLIVSPETRSTFRARTQAISSIRRHMADAGFMEVETPMLHPIPGGAAAKPFITHHNALDMQMFMRIAPELYLKRLIVGGFERVFEINRNFRNEGVSPRHNPEFTMMEFYAAYTDYRWLMDFTENLIRQAAIDARGSATVTYQGRELDLSKPFHRLTICGAIQKYAPEYTDAQLADADFLRAELKNKFKINTSAPQFLNAGLGTLQLVLFEETAEAQLWEPTYIVDYPVEVSPLARGSDTQPGITERFELFITGREIANGFSELNDPEDQAERFRKQVEQKDAGDEEAMYFDADYIRALEYGMPPTGGCGIGIDRLVMLLTDSPNIRDVILFPHLRRED

SEQ ID NO: 30211 - DNA, 1527 bp, Acidobacteria bacterium Ellin345
  CDS (1)..(1527): transl_table=11
gtgtcgttagaagacaatatttaccagcttcgcctcgagaagctgaagcagatcgaagccctcggccagcgcgcctacccgttcaaatacgagacgacccacaccgtccccgagatctgggagcagttcgagtccaagactggcgaagaactcgaggcccatcacatcgacgtccgcgtcgccggccgcctcatgtccatccgcggccagggcaaggccggcttcgcccacctccagcagaacggcaagaagctccagctctacgtgcggctcgacaacgtcggcgaaaaaggcttcgccctttataagctgctcgatctcggcgacttcatcggcgccaagggatacctcttccgcacccgcaccggcgaactcagcatccacgtcgaagaaatcaccttcttagccaaggaccttctcccgctgcccgaaaaatggcacggcctcaccgacgtcgaactgcgctaccgccgccgttacgtggacatgaacatggaccccgacgtccgcgaggtcttcatcaagcgtgcccgcatcctccagacgatgcgcagctttttcgaccagcgcggtttcgtcgaagtcgagaccccgatgctccaaagccagtacggaggcgctgctgcacgtccgttcaccacccaccacaacacgctcgacatggatctctacctgcgcatcgcgcccgagctctatctcaagcggctcgtcgtgggcggcatcgaccgcgtctacgagatcaaccgcaacttccgtaacgaaggcatcagtacccggcacaaccccgagttcaccatgctcgagttctactgggcctacgccgattacttcgacctcatgaccttgacggaagagctcttccgccagctcgccaccgaagtcacgggcgggaccacggtccagtacggcgaccacaccctcgacttcagcaagatggaacgtctcaccatgcgcgacgccatcctgaagtactggcccgagaacgccggccccaagcccgcgttcgaagacttctccagcgccgaaaaggtcgccgcgatgggcaagcacctcagcgaactgaagctcatgcccttccaggtgaatgcgccgaagggcgtaaccatcgccgcaatgttcgaggccctctccgaggagcacctcgtgcagccgacaatcctttacgacttcccggtcgagatctcgccgctcagcaagaaccaccgcgaagatccggagtgggtggagcgcttcgaagtcttctgcgccggcatggaaatcggcaacgccttcagcgaactcaacgatcccatcgagcagcgtaagcgcttcgaaatgcagttagccgaacgcgcccgcggcgacgaagaagcccatcagatggacgaagactacgtccgcgccctgagctacggcatgccgccgacgggaggcatgggcatcggcatcgaccgtacggtgatgctcctgaccaacagcaaatcgatccgcgacgtaatcctcttcccgctgctgcgaccggagcaggaggaacctgctgagccatga

SEQ ID NO: 30212 - protein, 508 aa, Acidobacteria bacterium Ellin345
MSLEDNIYQLRLEKLKQIEALGQRAYPFKYETTHTVPEIWEQFESKTGEELEAHHIDVRVAGRLMSIRGQGKAGFAHLQQNGKKLQLYVRLDNVGEKGFALYKLLDLGDFIGAKGYLFRTRTGELSIHVEEITFLAKDLLPLPEKWHGLTDVELRYRRRYVDMNMDPDVREVFIKRARILQTMRSFFDQRGFVEVETPMLQSQYGGAAARPFTTHHNTLDMDLYLRIAPELYLKRLVVGGIDRVYEINRNFRNEGISTRHNPEFTMLEFYWAYADYFDLMTLTEELFRQLATEVTGGTTVQYGDHTLDFSKMERLTMRDAILKYWPENAGPKPAFEDFSSAEKVAAMGKHLSELKLMPFQVNAPKGVTIAAMFEALSEEHLVQPTILYDFPVEISPLSKNHREDPEWVERFEVFCAGMEIGNAFSELNDPIEQRKRFEMQLAERARGDEEAHQMDEDYVRALSYGMPPTGGMGIGIDRTVMLLTNSKSIRDVILFPLLRPEQEEPAEP

SEQ ID NO: 30213 - DNA, 1554 bp, Myxococcus xanthus DK 1622
  CDS (1)..(1554): transl_table=11
atggccgagaccgaaaacaagagcgagaagagtgcgggcgagggcgacctcgggacgaaggaacaggaaatctacgaccagcggctggagaaggccgcgaagtggcgcgaggccggcttcaatccgtacggcaacggctaccgtccccagcaccaggccgccgaaatccacgagaagcacgccgctcagtccgccgaggaaatcgagcaggccgcgcctccgccctatgacgtcgccggccgcgtcgtggccatgcgctccttcggcaaggccgccttcatcaagctgcgcgaccgctcgggcgaaatccaggtccacatgaagaaggacgccttgggggactcctatgagaccttcaagctctgtgacttgggcgacttcctggccgccaccggtccggtgttccgttcgaagacgggcgagctcacgctctccgccacgaagttcaccccgctcaccaagtccctgcgccccctgccggagaagtggcacggcctgacggacgtggaggtccgctaccgtcagcggtacctggacctcgtgtccaacccggacgtgaagcagaccttcctccggcgcaacaagctcatccgcttcatccggaacttcctcgacacgcgtgacttcgtcgaggtcgaaacgccgatgatgcacccgctcgtgtccggcgcggcggcgcggcccttcaccacgcaccacaacgcgctcgacattgacctgtacatgcgcatcgccccggagctgtatctcaagcgcctggtggtgggcggcctggagcgcgtctacgaggtcaaccgcaacttccgcaatgaaggcatcagcacccggcacaacccggaattcacgatgctggagttctatcaggcgtacgccacgtacgaggacctgatggacctctccgaggagatgatttcggaggccgccaaggccgtcaccggcgacacgaaggtgaagtacggcgaccacgtgctcgacttcggcaagggctggaagcgcatctccatgacggaggccatccgcgaggtggtgagcggcctgtccgacaaggacatggcggacgcggaccggctgcgccacgaactgctcaagacgagccactcggaggccgagcggcgggccatcgacacgatgaaccacggtgagctggtgggcgcgctcttcgagcaccacgtcgagcacacgctcatccatcccaccttcatcacccatttccccaccgccgtctcgccgctggcccggcgcaatgaccagaacccggacgtgacggaccgcttcgagctgtacgtggcgggccgcgaaatcgcgaacgccttctccgagctgaacgacccgctggaccagaagggccgcttccaggctcagctggacgcgaagcagcggggccagcaggagaccatggactacgacgaggactacatccgggccctcgagcacggcatgccgcccaccgccggtgaaggcatcgggattgatcggctcgccatgctgttcacggattcgcagagcatccgggacgtcatcctgtttcccctcctcaagccactggcgaagtag

SEQ ID NO: 30214 - protein, 517 aa, Myxococcus xanthus DK 1622
MAETENKSEKSAGEGDLGTKEQEIYDQRLEKAAKWREAGFNPYGNGYRPQHQAAEIHEKHAAQSAEEIEQAAPPPYDVAGRVVAMRSFGKAAFIKLRDRSGEIQVHMKKDALGDSYETFKLCDLGDFLAATGPVFRSKTGELTLSATKFTPLTKSLRPLPEKWHGLTDVEVRYRQRYLDLVSNPDVKQTFLRRNKLIRFIRNFLDTRDFVEVETPMMHPLVSGAAARPFTTHHNALDIDLYMRIAPELYLKRLVVGGLERVYEVNRNFRNEGISTRHNPEFTMLEFYQAYATYEDLMDLSEEMISEAAKAVTGDTKVKYGDHVLDFGKGWKRISMTEAIREVVSGLSDKDMADADRLRHELLKTSHSEAERRAIDTMNHGELVGALFEHHVEHTLIHPTFITHFPTAVSPLARRNDQNPDVTDRFELYVAGREIANAFSELNDPLDQKGRFQAQLDAKQRGQQETMDYDEDYIRALEHGMPPTAGEGIGIDRLAMLFTDSQSIRDVILFPLLKPLAK

SEQ ID NO: 30215 - DNA, 1506 bp, Clostridium perfringens ATCC 13124
  CDS (1)..(1506): transl_table=11
atgtcaaatgaggaaataaatattcacgaagcagaagaacaattaagtgaacaagagatgttaagaagacaaaagcttgctgaattacaagaagctggtaaggacccatttgatgtatacaaggtagagagaacacactcttctgctgatgtaaaagataattttgaagagttagaaggtaaagaagtaaaagttgctggaagacttatgtcaaaaagaggtcaaggtaaagtagtattcgctgatttagcagatttaccaggaaaaattcaattatttattaagattgataacgttggagaggaagctttaaaggaatttaaaactttcgatttaggtgactgggttgctgcaactggagaagtatttaaaacaaaaatgggtgaagtttcagtaaaagtaacttcatttgaattaatctgtaaatctttaaaaccattaccagaaaaatggcatggtttaaaagacccagacttaagatacagacaaagagaagttgatataataacaaacccagaagttaaagatacttttattaagagatcacaaatagtaaaagcaataagagaattcttagataatagaggattcttagaggttgacacaccaattctttcaccaatagctggtggagctgctgctagacctttcataactcaccacaatgctttagatatagatatgtatttaagaattgctactgagttatacttaaagagattaatagttgctggatttgaaaaagtttatgaaatgggtaaaaacttcagaaatgaaggggtttcagtaagacataatccagaattcactgctatagagttatatgaagcatatgctgattacaatgacatgatggaaatcatggaaaacatgattgcttatgtttgtgaaaaagtaaatggatcaactaaagttacttatgaaggaactgaaatagacttcacaccaccatggagaagaattactatggttgatgcagttaaagaatttgctggtatagatttcaacgaaattaagagtgatgaagaagctcaagctatagctaaagagaaaaacttagaattccctaaaccattagataaggttactaaaggtgaagttctaaatatgttatttgaagaatatggtgaagataaattaatccaacctacattcttaatagattatccagtagagatatcacctcttactaaaaagaaaagaggaaatgaaatgtttactgagagatttgaaggatttgtatatggtagagaagtatgtaacgcatactcagagcttaacgatccaatagttcaaagagaaagatttgaacaacaagctagagaaagagaatacggagatgatgaagcatacatgttagatgaagaattcatgagtgctttagaaactggtatgcctccaacaggtggattaggaataggaatagacagaatgataatgttcttaactgactcttcatcaataagagacgttatattattcccaacaatgaaaccacaaaaatag

SEQ ID NO: 30216 - protein, 501 aa, Clostridium perfringens ATCC 13124
MSNEEINIHEAEEQLSEQEMLRRQKLAELQEAGKDPFDVYKVERTHSSADVKDNFEELEGKEVKVAGRLMSKRGQGKVVFADLADLPGKIQLFIKIDNVGEEALKEFKTFDLGDWVAATGEVFKTKMGEVSVKVTSFELICKSLKPLPEKWHGLKDPDLRYRQREVDIITNPEVKDTFIKRSQIVKAIREFLDNRGFLEVDTPILSPIAGGAAARPFITHHNALDIDMYLRIATELYLKRLIVAGFEKVYEMGKNFRNEGVSVRHNPEFTAIELYEAYADYNDMMEIMENMIAYVCEKVNGSTKVTYEGTEIDFTPPWRRITMVDAVKEFAGIDFNEIKSDEEAQAIAKEKNLEFPKPLDKVTKGEVLNMLFEEYGEDKLIQPTFLIDYPVEISPLTKKKRGNEMFTERFEGFVYGREVCNAYSELNDPIVQRERFEQQAREREYGDDEAYMLDEEFMSALETGMPPTGGLGIGIDRMIMFLTDSSSIRDVILFPTMKPQK

SEQ ID NO: 30217 - DNA, 1512 bp, Rhodococcus sp. RHA1
  CDS (1)..(1512): transl_table=11
gtgagtgaagtagcagcccagccagtcgacgacacccccgagcagcttcgcatccgccaggagaagcgtgagcgcatcctcgcggagggacgcgaggcgtacccggtgtcggtggcgcgcacccactcgctggcggagatccgggccaagtacccggaactcgagcccgacacggccaccggcgaccaggtcggtgtcgtcggccgggtgatcttcgtgcgcaacacgggcaagttgtgcttcgcgacgctgcaggaaggcgacggcacccagctgcaggcgatgatcagtctcgccgctgtcggtgaggatgctctcgcgttgtggaaggccgatgtcgacctcggtgacttcgtgttcgtgcacggcgaggtgatcagttcccgtcgcggtgagctgagcgtgatggccgattcgtggcagatcgcgtccaagtcgctccggcccctgccggttgcgcacaaggagatgaacgaggagtcgcgggtccggcagcgttacgccgatctgatcgtgcgctccgaggcgcgggagaatgcgcgtaagcgggtggctgtcgtccgtgagctccggaacgcgctcgagctgcgcgggttcctcgaggtcgagacgccgatgctgcagacggtggcgggtggcgccgcggcccgcccgttcatcactcattccaatgccctggatatcgacctctatctccgtatcgctcccgaactgttcctgaagcggtgcgtcgtcggcggtatcgagaaggtcttcgagatcaaccggaatttccgcaacgagggtgtcgattcgacgcactcgccggaattcgcgatgctcgagacatacgaggcgtacggcacgtacgacgattccgccgtgatgatccgcgaactcgtccaggaagtggcgcaggccgctttcggttcgcaggtcgtcacactcgccgacggcaccgaatacgacctcagtggtgaatggaagaccctcgagatgtacccgtcgctgtcgcaggcgatcggtgtcgaggtcactccggataccaccgtcgaggaattgctggcgctcgccgagaaggtgggcctcgaggtccccaaggacaagggttacgggcacgggaagctcgtcgaggaactgtgggagcaccagtgcggcgaccagctgttcgagccgacgttcgtccgtgatttcccggtcgagacgtcgccgctgactcgtgaccaccgcagcaaggccggggtcaccgagaagtgggacctctacatccgcgggttcgagttggccacgggctattcggaattggtcgatccggtcatccagcgtgagcggttcgtcgatcaggcgcgtctcgcgtcggctggtgacgacgaggcgatggccctcgacgaagaattcctcgccgctatggagcagggaatgccgccgaccaccggcaccggaatgggaatcgaccgtctgctgatggctttgacgggattgggaatccgcgaaacaatcctctttcccattgttcgcccttcttctcgctga

SEQ ID NO: 30218 - protein, 503 aa, Rhodococcus sp. RHA1
MSEVAAQPVDDTPEQLRIRQEKRERILAEGREAYPVSVARTHSLAEIRAKYPELEPDTATGDQVGVVGRVIFVRNTGKLCFATLQEGDGTQLQAMISLAAVGEDALALWKADVDLGDFVFVHGEVISSRRGELSVMADSWQIASKSLRPLPVAHKEMNEESRVRQRYADLIVRSEARENARKRVAVVRELRNALELRGFLEVETPMLQTVAGGAAARPFITHSNALDIDLYLRIAPELFLKRCVVGGIEKVFEINRNFRNEGVDSTHSPEFAMLETYEAYGTYDDSAVMIRELVQEVAQAAFGSQVVTLADGTEYDLSGEWKTLEMYPSLSQAIGVEVTPDTTVEELLALAEKVGLEVPKDKGYGHGKLVEELWEHQCGDQLFEPTFVRDFPVETSPLTRDHRSKAGVTEKWDLYIRGFELATGYSELVDPVIQRERFVDQARLASAGDDEAMALDEEFLAAMEQGMPPTTGTGMGIDRLLMALTGLGIRETILFPIVRPSSR

SEQ ID NO: 30219 - DNA, 1509 bp, Haemophilus somnus 129PT
  CDS (1)..(1509): transl_table=11
atgacagaaataattcaagaattggatctcaatggcgaaatgttggttcgtcgtgaaaaattagctgcgttaagagcaaaaggcaacgcctttccaaatacattccgtcgcaatgctttagcacaggacttacatacacaatatgatgaaattgaaagtgagagcttaaaaacacagggaattgaagtaaaagtggcggggcgtattatgactcgtcgtgtcatgggtaaagcaacctttatcacattgcaagacatgagcggaaaaattcaactttatgttgctcgtgataacctagctgaaggtgtttatactgatgatgtgggcaattgggatttaggggatattgttggtgtaaaaggtactttatttaaaactaaaaccaatgagttgacaatacgtgcaacggaggttcacttattaactaaagcattacgcccgcttcctaataaatttcatggactgagcgatcaagaaactcgttaccgtcaacgctacttagatttaattgctaatgaagattcacgccgcacttttattattcgatctaaagtaatcgcaggcattcgtgaatatttcatttccaagggatttatggaagtagaaacccctatgttacaaattattcctggcggtgcatctgcacgtccatttattactcatcacaatgcgttagatgtggatatgtatttacgtattgcacctgaactttatttaaaacgtttggtagttggcggttttgaacgtgtattcgagttaaatcgtaacttccgcaatgaaggtgtttctattcgccataaccctgaatttactatgttggaatactaccaagcctatgcggattaccacgatttaatggacaatacagaagaacttttacgcaaattagcactggatattttaggtacgaccattgttccttacggcgatttaaaattcgatttcggcaaaccgtttgaacgtattaccatgcacgaggcaatcttaaaatacggtgccgagcaaggtattgtgaaagaagatttatacgatttcgatcgtgctgttgcaatagcacaaaaattgggtatcgaagtacaaaaatcatgggggctaggtagcttagtcaatgcaatttttgaagaagttgctgaacatcatttaattcaaccaactttcttaatggctcatccagcagaaatctcccctttagcacgccgcaatgatgaaaatcctgacgtaacagaccgctttgaactatttatcggaggacgtgagatcggtaacggtttctcagaattaaatgatgcagaagatcaaaatgagcgttttgatgcacaggttgcagcaaaagaagctggtgacgatgaagctatgtttaaagatgaagattttgttaccgcacttgagcatggattgccaccaacggctggtgagggtttaggaattgatcgtctagcgatgttatttgccaacgctaactcaattcgtgatgtgattttatttcctgcaatgaagacaaaaaactaa

SEQ ID NO: 30220 - protein, 502 aa, Haemophilus somnus 129PT
MTEIIQELDLNGEMLVRREKLAALRAKGNAFPNTFRRNALAQDLHTQYDEIESESLKTQGIEVKVAGRIMTRRVMGKATFITLQDMSGKIQLYVARDNLAEGVYTDDVGNWDLGDIVGVKGTLFKTKTNELTIRATEVHLLTKALRPLPNKFHGLSDQETRYRQRYLDLIANEDSRRTFIIRSKVIAGIREYFISKGFMEVETPMLQIIPGGASARPFITHHNALDVDMYLRIAPELYLKRLVVGGFERVFELNRNFRNEGVSIRHNPEFTMLEYYQAYADYHDLMDNTEELLRKLALDILGTTIVPYGDLKFDFGKPFERITMHEAILKYGAEQGIVKEDLYDFDRAVAIAQKLGIEVQKSWGLGSLVNAIFEEVAEHHLIQPTFLMAHPAEISPLARRNDENPDVTDRFELFIGGREIGNGFSELNDAEDQNERFDAQVAAKEAGDDEAMFKDEDFVTALEHGLPPTAGEGLGIDRLAMLFANANSIRDVILFPAMKTKN

SEQ ID NO: 30221 - DNA, 1569 bp, Trichodesmium erythraeum IMS101
  CDS (1)..(1569): transl_table=11
atggctaaaagcgaaaccaggaatgaagtagaagttcgttcacaaaaagttgatgaattacgcgcccaaggaatagacccctatcctagtcaagccatagagcgatcgcataccactaagcaagtaatagatctattttctccaccagcaaaggaattagaacctggagaaacagaccccaatgaaaaattcttaaaggtttgcggtcgtattacttctaagcgagatagtggtagtattggttttattaacctaacagatgaaactggaaaaattcaacttaaaattgagaaaaaattagtaaagggcgaccctggtttaagctttaaacaagttcaaaaattattagatgtaggagattttgttagtgcggaaggaataggttgtcgtactaatagaggtgagttatcaattcaggtaaataaattggatgtgctctccaaagctattattccttttcctgactcttattatggtgtaaatgacccagaaatttgtcgccgtcaccgggaaatggatttggctggaaatgctgaagctttacagcgttttagagtgcggagcaaaattatgcaaagtattcgaacatatctttgggatgctaatttttatgaaatagaaacaccaattttacagtcaatttatggtggtgctgcagctcgaccttttgttactcatcataatgctttagatgtagatttatatttacgaattgctacagaattatttctcaaacgggcaatttgtggaggttttgaacgggtatttgaattaggaagagtatttagaaatgaaggaattgatagtactcataatcctgagtttacttccctagaagtttatcaggcttatgcagattattttgaaattctgggcttggtagaggatgttatttgttatagtttaaccaatattttgggggatttaaaacagatagaatatcaagggcaaactattagtttagaacgtcaatatgactatagtcaaaaatatcctaatttcacaggaaaacattggcaagtaaaaacaatggtggaagcagttaaggatgaaacaggactagattttgataacctagagttgccagaagctattcgagcagcagaaaaattaaacctgaaattatccaaattagaaactcaaagtttaggttatcttttatatgcagtttttgatcaaaaagtagagtcaactttaattcaacctacttttgtgattgattttccggttgaggttagcccgttagcaaaaagacatcatagtaaaccaggttttgtggaaagatttgagttgtttattcacggcacagaatattctaatggtttctccgagttaaatgatccacaagaccagcgccaacgttttgaggaacagatcgctcaaagagaggcaggggatgatgaagcgcacccaatggatgaagattttattcaagcgttatcactggggatgcctaactgtggtggaatgggtattggagtagaccgtctggtgatgttgctgacaaatactcaaagtattagggatgtcattatgtttccaactatgcgttcgactttaaaggattaa

SEQ ID NO: 30222 - protein, 522 aa, Trichodesmium erythraeum IMS101
MAKSETRNEVEVRSQKVDELRAQGIDPYPSQAIERSHTTKQVIDLFSPPAKELEPGETDPNEKFLKVCGRITSKRDSGSIGFINLTDETGKIQLKIEKKLVKGDPGLSFKQVQKLLDVGDFVSAEGIGCRTNRGELSIQVNKLDVLSKAIIPFPDSYYGVNDPEICRRHREMDLAGNAEALQRFRVRSKIMQSIRTYLWDANFYEIETPILQSIYGGAAARPFVTHHNALDVDLYLRIATELFLKRAICGGFERVFELGRVFRNEGIDSTHNPEFTSLEVYQAYADYFEILGLVEDVICYSLTNILGDLKQIEYQGQTISLERQYDYSQKYPNFTGKHWQVKTMVEAVKDETGLDFDNLELPEAIRAAEKLNLKLSKLETQSLGYLLYAVFDQKVESTLIQPTFVIDFPVEVSPLAKRHHSKPGFVERFELFIHGTEYSNGFSELNDPQDQRQRFEEQIAQREAGDDEAHPMDEDFIQALSLGMPNCGGMGIGVDRLVMLLTNTQSIRDVIMFPTMRSTLKD

SEQ ID NO: 30223 - DNA, 1470 bp, Synechococcus sp. CC9311
  CDS (1)..(1470): transl_table=11
ttgtctgaacttcgtgagacccgcttggagaaggcgaatgctctcaaagaacaggggcaagagccgtatgcattgcgttttgatctcaccgatcgcatggctcgcctgcaagccgatcacgctgatcttgcaaaaggcgccgagcgagacctcaaagtttcggttgctggtcgggtgatgacgcgccgggtgatgggcaagcttgcatttttcacgctggcggatgaaacgggaacgatccagttgttccttgagaaagcaacgctgggcgacagctttgctcagctcagttccttggtggatgcaggtgacctcatcggggttcatggcatcttgcgccgcaccgatcggggtgagttgtccgtcaaggtgagcaaatgggagatgctcaccaaatcgctgcagccgttgccagataagtggcatggcctggcggatgtggagaagcgctatcgacagcgctatctggatttgatcgtgacgccgcagtcccgtgagacgttccggcgtcgggcgatggctgttagtgcgatccgccgttggttggatgaacgcgactttctagagatcgaaacaccggtcctgcagtccgaagccggtggcgctgaggcgcggccgttcatcacgcatcacaacaccctcgatctgcctctctacttgcggattgccactgagctccatctcaaacggctcgtggtgggtggatttgaacgggtctatgagctcgggcggatctttcgcaacgaaggggtgagcacgcgccataaccctgaattcacttcggtggaggtgtatcaggcctatgccgattacaacgacatgatgacgctcaccgaacagctaatcgcttcggtttgtgagcaggtatgcggtacaacccgcatcagctaccagggcgtggaggtggacctgacgccgtcctggagacgcgccacgatgcatgaactcgtgcaggaggccaccggcctggatttcacctccttcgagacccgtgaagcggctgtggaggcgatgcgagcggccaatctcccggcgccagataaggccgacaccgttggacggcttttgaacgaagcgtttgagcatgctgtggaacccaatttgatccagcccacctttgtgctcgattacccgcaggaaatttcacccctggcgcgtaaacatcgcagcaagccagggcttgtggagcgctttgaattgttcatcgtgggccgagaaacggccaatgccttcagtgagctcacggatcctttggatcaaagaggccgcatggagctccagcaggaacgtcgtgctgccggagatgtggaagccagcggagtggatgaagatttcatccaggcgctcgaagtgggaatgccccccacgggtggacttggaatcggcattgatcgcctggtgatgctgcttactgacagcccctcgattcgggatgtcattgccttcccattgatgcgacctgaggggtga

SEQ ID NO: 30224 - protein, 489 aa, Synechococcus sp. CC9311
MSELRETRLEKANALKEQGQEPYALRFDLTDRMARLQADHADLAKGAERDLKVSVAGRVMTRRVMGKLAFFTLADETGTIQLFLEKATLGDSFAQLSSLVDAGDLIGVHGILRRTDRGELSVKVSKWEMLTKSLQPLPDKWHGLADVEKRYRQRYLDLIVTPQSRETFRRRAMAVSAIRRWLDERDFLEIETPVLQSEAGGAEARPFITHHNTLDLPLYLRIATELHLKRLVVGGFERVYELGRIFRNEGVSTRHNPEFTSVEVYQAYADYNDMMTLTEQLIASVCEQVCGTTRISYQGVEVDLTPSWRRATMHELVQEATGLDFTSFETREAAVEAMRAANLPAPDKADTVGRLLNEAFEHAVEPNLIQPTFVLDYPQEISPLARKHRSKPGLVERFELFIVGRETANAFSELTDPLDQRGRMELQQERRAAGDVEASGVDEDFIQALEVGMPPTGGLGIGIDRLVMLLTDSPSIRDVIAFPLMRPEG

SEQ ID NO: 30225 - DNA, 1503 bp, Shewanella sp. MR-4
  CDS (1)..(1503): transl_table=11
atgactgaacaagtacaagatgaaaacaaactgattgccgagcgtcgtgccaagctagaaagcattcgcccgaactgcagcgctaatgctcaccctaatactttccgtcgcacccacaaagcggctgagttgcaggaaaaatacggtcaaaacactaaggaagaactcgaagccttaggttttaaaaccagcatcgctggccgtatcatggcaaaacgtggcccattcctggtgatccaagacgtgtctggtcgtatccaagcttacgctgaaaagggcgttcaagcggatctgaaagaccgttaccaaggtttggatatcggtgacatcatcggcgtaacgggtcagttgcacttgtctggtaaaggcgatctgtacgtgaacatggaagagtatcaactgctgactaaagcactgcgtcctctgccagaaaaattccacggcctgaccgaccaagaaactcgttaccgccaacgttatgtggacttaatcgttaacgaagaatctcgtcaagccttcgtcatgcgttcaaaagtggttgctgctatccgtaacttcatgatcaaaaaagagttcatggaagttgaaaccccaatgatgcacgtgatcccaggcggcgcttcagcccgtccatttatcactcaccacaatgcgctggacatgccaatgtacctgcgtatcgcgccagagttatacctcaagcgtttagtggtcggtggttttgagcgtgtgttcgaaatcaaccgtaacttccgtaacgaaggtctgtcgccacgccataacccagaattcactatgatggaattctatatggcctatgcagactacaaagatctgatggacttaaccgaagaactgttaagctcaatcgcgattgaactgttaggtagcgcgcaaatgccatatggcgagcacactgttgatttcggtggcccatatgcccgtttaagcatgttagaagcgattcagaaatacaatcctgacaacgcgactatccaagccatgacctacgagcaagtgaaagatcttgaattcatgcgtgaactggcgatcagcctaggcatcaagatcgagaagttctggacctgtggtcagctattagaagaaatcttcggtgaaactgctgaatggcagctaatgcaaccgactttcatcactggctacccagcggatatttcgccactggcacgtcgtaacgatgacaatcacttcatcaccgaccgttttgaattcttcatcggtggccgtgaagtggctaacggtttcagcgagttaaacgatgctgaagatcaagatagccgctttaaggcgcaggttgatgcgaaagacgcaggtgacgatgaagccatgttctacgatgcagactacatcactgcactggaacacggtttaccaccaacagcgggtcaaggtatcggtatcgaccgtttagtgatgctattcactaacactcatactatccgtgacgtgatcctgttcccagcgatgcgcccacaggcctaa

SEQ ID NO: 30226 - protein, 500 aa, Shewanella sp. MR-4
MTEQVQDENKLIAERRAKLESIRPNCSANAHPNTFRRTHKAAELQEKYGQNTKEELEALGFKTSIAGRIMAKRGPFLVIQDVSGRIQAYAEKGVQADLKDRYQGLDIGDIIGVTGQLHLSGKGDLYVNMEEYQLLTKALRPLPEKFHGLTDQETRYRQRYVDLIVNEESRQAFVMRSKVVAAIRNFMIKKEFMEVETPMMHVIPGGASARPFITHHNALDMPMYLRIAPELYLKRLVVGGFERVFEINRNFRNEGLSPRHNPEFTMMEFYMAYADYKDLMDLTEELLSSIAIELLGSAQMPYGEHTVDFGGPYARLSMLEAIQKYNPDNATIQAMTYEQVKDLEFMRELAISLGIKIEKFWTCGQLLEEIFGETAEWQLMQPTFITGYPADISPLARRNDDNHFITDRFEFFIGGREVANGFSELNDAEDQDSRFKAQVDAKDAGDDEAMFYDADYITALEHGLPPTAGQGIGIDRLVMLFTNTHTIRDVILFPAMRPQA

SEQ ID NO: 30227 - DNA, 1500 bp, Alkalilimnicola ehrlichei MLHE-1
  CDS (1)..(1500): transl_table=11
atgaccatgaccgagcaggacgacaacaagctcatcgcccagcggcgggaaaagctcgccgcgttgcgcgaggccggccaggccttccccaacgacttccgccgcgacagcctggcagcggacatccacgcccgctgcgcggagctggacgacgaggcgctggaggcggagaacatccgcgtgcgggtggccgggcggatgatggccaagcgggtgatgggcaaggcgagctttacccacctgcaggatcagtccggtcgcatccagctctttctggcccgagatgagctgccggagggggtctaccagcagttcaagggctgggatgtcggtgacatcatcggcgcggcggggacgttgttccgcacccgcaagggcgagctgtcggttaaggtggacgagctgcgcctgctcaccaagtcgctgcgcccgctgcccgagaagtaccacgggctgacggacaccgaggcgcgctaccgccagcgctacgtcgacctgatcatgaacgacgactcacgccgggtcttcatgctgcgcagccggctggtggcgggcattcgtgactttttgaacggccgtggttttctcgaggtggagacgccgatgatgcagcccattccgggcggcgcgacggcgcgaccgttcgtgacccatcacaacgccctgggcgcggacctgtacctgcgggtggcgccggagctgtacctgaagcggctggtggtgggcggcttcgaacaggtctacgagatcaaccggaatttccgtaacgagggggtgagcacccgccacaaccccgagttcacgatgctggagttctatcaggcctacgcggatcacaacgacctgatggacctgaccgaggctatgctgcggcggctggccgaggagcagttgggcacgacgcagatcacctatcagggtgaaaccttcgacttcggccggcccttccggcggatccggatggtggatgcgatctgtgagttcaaccccgacatcgggccggaggcgctgaccgaccgggattcggcgctcaacctggctgggcacctgaacatcccgctgatggggcatgaggggctcggcaagctgcagatggtgatcttcgagaccacgacggagcacaagctgcgcgagcccacgttcgtgacccactaccccaaggaggtctcgccgctggcccggccggtggatgacgaccccttctacaccgagcggttcgagctgatcgtcggcggccgggagattgccaatggcttctccgagctgaacgacgccgaggaccaggcggagcggttccgggcccaggcggcggaaaaggccgccggcgatgacgaggcgatgcactacgacgccgatttcatccgggcgctggagtacgggttaccccccacggcgggcgagggcatcggcatcgaccggctggtgatgctcttcgccgacgccccatccatccgggacgtcctgctgttcccggccatgcgcccggagacgggggagtaa

SEQ ID NO: 30228 - protein, 499 aa, Alkalilimnicola ehrlichei MLHE-1
MTMTEQDDNKLIAQRREKLAALREAGQAFPNDFRRDSLAADIHARCAELDDEALEAENIRVRVAGRMMAKRVMGKASFTHLQDQSGRIQLFLARDELPEGVYQQFKGWDVGDIIGAAGTLFRTRKGELSVKVDELRLLTKSLRPLPEKYHGLTDTEARYRQRYVDLIMNDDSRRVFMLRSRLVAGIRDFLNGRGFLEVETPMMQPIPGGATARPFVTHHNALGADLYLRVAPELYLKRLVVGGFEQVYEINRNFRNEGVSTRHNPEFTMLEFYQAYADHNDLMDLTEAMLRRLAEEQLGTTQITYQGETFDFGRPFRRIRMVDAICEFNPDIGPEALTDRDSALNLAGHLNIPLMGHEGLGKLQMVIFETTTEHKLREPTFVTHYPKEVSPLARPVDDDPFYTERFELIVGGREIANGFSELNDAEDQAERFRAQAAEKAAGDDEAMHYDADFIRALEYGLPPTAGEGIGIDRLVMLFADAPSIRDVLLFPAMRPETGE

SEQ ID NO: 30229 - DNA, 1497 bp, Rhizobium leguminosarum bv. viciae 3841
  CDS (1)..(1497): transl_table=11
atggctgacaacaagagcgaaaacaccctttcctccgacgcgacggaagtgcgcgctcagaagctgaagctgctgcgtgagcagatcggcgaggtctatccggcgcatttccaccgcacgatgaccaacgccgagctcatcgcgaaatatgagaacctggaacctgacgtcgagacgcaggatgtcgttaccgtcgccggccgcgtctactcgtcgcgcaactccggcatgttcatggacatccacgatgcccgcggcaagatccagattttcagtcacaaggacacgaccccggaagaagcccgtgcgcttctgccgatgatcgacatcggcgacatcatcggcgtcaccggcagcgtacgccgcaccaaacgcggcgagctgacgatcaatgcgcagacgatcaccatgctgacgaagtcgctgctgccgatgccggagaagtggcacggtctctccgacatcgaactgcgttatcgcaagcgccatctcgacatcatgaccaacgaggattcgaagctccgcttccagcagcgctcgaagatcctctccggcatccgccgcttcatggaaaatgacggcttcatggaagtcgagacgccgatgctgcagtcggtctatggcggcgccaccgccgagccgttcaagacccatcacaacacgctaaagctcgacatgtacctgcgcatcgcgccggaactgttcctcaagcgcacgctgatctcggggctcaccgacaaggtcttcgaggtcaaccggaacttccgcaacgaaggcgtctccacccgacacaatcccgaattcaccatgatggagtgttactgggcctatgccgattacgaggacatcatggacctcgtcgagcggctgttcgagagcttggcgctctccattcacggcacgacggaattccccttcggcgacaagaccatgtccttcaagggtccgttcaagcgcgttccgatgcccgatgccgtcaaggaagcgaccggcatcgacttccgcgccatcaagaccgatgaagaggcgcgcgtcgccgccaaggctgccggcttcgcagtcgagaaggattggacctggggcgaatgcctcgccttcatcttcgaggaaaaagtcgaatccaccctgattcagccgtcgcatgtcacgcattttccgaaggacatctcgcccttcgccaaggaagtgccgggcgagccgcgcctcgtcgagcgcttcgagacctattgcaacgcctgggaactcggcaacgccttctcggaactcaacgatcccgaagagcagcgccgccgcatggtcgagcagctcgaacaggcgcatgcccgcggcgaaaaggaaaagcagctggacgaggaattcctcgacgcgatcgaccagggcatgccgccggcaggtggcctcggcatcggcgtcgaccgtctcatcatgcttctgaccaatgcgccgtcgattcgcgacgtcatcctcttcccggcccgccgcagcaaggccgactga

SEQ ID NO: 30230 - protein, 498 aa, Rhizobium leguminosarum bv. viciae 3841
MADNKSENTLSSDATEVRAQKLKLLREQIGEVYPAHFHRTMTNAELIAKYENLEPDVETQDVVTVAGRVYSSRNSGMFMDIHDARGKIQIFSHKDTTPEEARALLPMIDIGDIIGVTGSVRRTKRGELTINAQTITMLTKSLLPMPEKWHGLSDIELRYRKRHLDIMTNEDSKLRFQQRSKILSGIRRFMENDGFMEVETPMLQSVYGGATAEPFKTHHNTLKLDMYLRIAPELFLKRTLISGLTDKVFEVNRNFRNEGVSTRHNPEFTMMECYWAYADYEDIMDLVERLFESLALSIHGTTEFPFGDKTMSFKGPFKRVPMPDAVKEATGIDFRAIKTDEEARVAAKAAGFAVEKDWTWGECLAFIFEEKVESTLIQPSHVTHFPKDISPFAKEVPGEPRLVERFETYCNAWELGNAFSELNDPEEQRRRMVEQLEQAHARGEKEKQLDEEFLDAIDQGMPPAGGLGIGVDRLIMLLTNAPSIRDVILFPARRSKAD

SEQ ID NO: 30231 - DNA, 1506 bp, Pseudomonas aeruginosa UCBPP-PA14
  CDS (1)..(1506): transl_table=11
atgagcgaccaacaactcgaccagcacgaactgcaacaggaagaaaacaagctgatcgcccagcgcaaggaaaaacttgccgccgtgcgcgaagcccgggccatcgccttccccaacgacttccgccgcgacgcctacttcgcggacctgcagaaacagtacgccgacaagaccaaggaagagctggaagccgcagcgatcccggtcaaggtggccggtcggatcatgctcaaccgcggttccttcatcgtcctccaggacagcagcgagcgcctgcaggtctacgtcaaccgcaagaccctgccggaagaaaccctggccgagatcaagacctgggacctgggcgacatcatcggcgccgaaggcgtgctggcccgctcgggcaagggcgacctgtacgtcgacatgaccagcgtgcgcctgctgaccaagtcgctgcgtccgctgccggacaagcaccatggcctgaccgacaccgagcagcgctaccgccagcgctacgtcgacctgatggtcaacgaggaaacccgccacaccttccgcgtgcgctcccaggtcatcgcccacatccgccgtttcctcagcgagcgcggtttcctcgaagtggagaccccgatgctgcagaccatccccggcggtgccgcggccaagccgttcgagacccatcacaacgcgctggacatggccatgttcctgcgcatcgccccggagctgtacctcaagcgcctggtggtcggcggtttcgagaaggtcttcgagatcaaccgcaacttccgtaacgaaggcgtctcgacccggcacaaccccgagttcaccatgctcgagttctaccaggcctacgccgactacgaagacaacatggacctgaccgaggaactgttccgcgaactggcccaggcggtactcggtaccaccgacgtgccctacggcgacaaggtcttccacttcggcgagccgttcgtgcgcctgtcggtgttcgattcgatcctcaagtacaacccggagatcagcgccgccgacctcaacgacgtcgagaaggcgcgggccatcgccaagaaggccggcgccaaggtcctcggccacgaaggcctgggcaagctgcaggtgatgattttcgaggaactggtggagcacaagctggagcagccgcacttcatcacccgctaccccttcgaggtttcgccgctggcccgccgcaacgacgaagacccgagcgtcaccgaccgcttcgagctgttcatcggcggccgcgagatcgccaatgcctattccgagctgaacgacgccgaggaccaggccgagcgcttcatgttgcaggtcaaggagaaggacgccggcgacgacgaggcgatgcactacgacgccgacttcatcaatgccctggaatacggcatgccgccgaccgccggcgaaggcatcggcatcgaccgcctggtgatgctgctgaccaactcgccgtcgatccgcgacgtgatcctgttcccgcacatgcgcccgcaggcctga

SEQ ID NO: 30232 - protein, 501 aa, Pseudomonas aeruginosa UCBPP-PA14
MSDQQLDQHELQQEENKLIAQRKEKLAAVREARAIAFPNDFRRDAYFADLQKQYADKTKEELEAAAIPVKVAGRIMLNRGSFIVLQDSSERLQVYVNRKTLPEETLAEIKTWDLGDIIGAEGVLARSGKGDLYVDMTSVRLLTKSLRPLPDKHHGLTDTEQRYRQRYVDLMVNEETRHTFRVRSQVIAHIRRFLSERGFLEVETPMLQTIPGGAAAKPFETHHNALDMAMFLRIAPELYLKRLVVGGFEKVFEINRNFRNEGVSTRHNPEFTMLEFYQAYADYEDNMDLTEELFRELAQAVLGTTDVPYGDKVFHFGEPFVRLSVFDSILKYNPEISAADLNDVEKARAIAKKAGAKVLGHEGLGKLQVMIFEELVEHKLEQPHFITRYPFEVSPLARRNDEDPSVTDRFELFIGGREIANAYSELNDAEDQAERFMLQVKEKDAGDDEAMHYDADFINALEYGMPPTAGEGIGIDRLVMLLTNSPSIRDVILFPHMRPQA

SEQ ID NO: 30233 - DNA, 1497 bp, Pediococcus pentosaceus ATCC 25745
  CDS (1)..(1497): transl_table=11
gtgggtgaaaagcaacaaccaagtatgaatgaccaactaagagttcgtcgcgaaaagatgcaagaacttcgtgataagggcatcgatccatttggtcatcgttttgagagaacacatttagcagcacaattacacgaaaagtacagtgatatgacaaaggaagagcttgatgaacagggcgtggtagctacgattgccggccgtatgatctctaagcgtggtaagggtaaggtcggttttgcagatcttaaagaccgttctggaaaaatgcaattgtacgttcgtaaggatgttttaggcgaagatgtatacaaagtctttaagcgttctgatattggtgatttcctcggtgtaactggggatgtcatgaaaaccgatatgggtgaattaacaattaaagtaacgggactaactttcttaagtaaagcgctccgtcctcttcccgacaagttccatggtttacaaaacgttgaacaaatttatcgtcaacgttatcttgatttaattgctaatgatgatagtatggatcgtttcagaaaacggactaagattgtttcagcagtaagaagatatcttgatggtaatgattttgccgaagttgaaacaccagtgctacatactcaagctggtggagctagtgcacgtccatttattacacaccataatgccctagatatcaatttatatttacggattgcgttggaacttcatttaaaacggctaattgttggtggaatggaacgagtatacgaaatcggtcgcgtattcagaaatgaagggattgatactcgtcataatcctgaattcactatgctcgaaacatacgcagcttactttgatttccatgacgtaatggatgaaactgaaggaatttttaaggcagcagttgcagcggtttcagatgatggtaagattacgtaccaaggaacagaacttgacttaggtcaagattttgaacgtctacacatggtcgatgcaatcaagaaatatgcgggagtggacttttggcctaagatgtcggttgaagatgcgaagaaacttgctgatgaaaatggtatccactacgagtcttggtggacagttggacacatcatcaatgaattctttgaagaaaaggttcaagaccaattgaaacaaccggtgtttatttacggacatccagtagaaatttctccactagctaagaagaacgccgaagatgatcgttttacagatcgatttgagttgtacatcttaggtaatgaatatggtaatgcctttactgaattaaatgatcctatcgaccaacgggcacgttttgaagctcaagttgcagaacgtgaagcaggtaacgatgaagctgaaggtattgacgaagattatatcgaagcacttgaatatggtatgccaccaacagggggacttggaattgggattgatcgtttagtgatgttgctaactgatgctccttcaattcgtgatgtactattgttcccaacgatgaaacccatcgattaa

SEQ ID NO: 30234 - protein, 498 aa, Pediococcus pentosaceus ATCC 25745
MGEKQQPSMNDQLRVRREKMQELRDKGIDPFGHRFERTHLAAQLHEKYSDMTKEELDEQGVVATIAGRMISKRGKGKVGFADLKDRSGKMQLYVRKDVLGEDVYKVFKRSDIGDFLGVTGDVMKTDMGELTIKVTGLTFLSKALRPLPDKFHGLQNVEQIYRQRYLDLIANDDSMDRFRKRTKIVSAVRRYLDGNDFAEVETPVLHTQAGGASARPFITHHNALDINLYLRIALELHLKRLIVGGMERVYEIGRVFRNEGIDTRHNPEFTMLETYAAYFDFHDVMDETEGIFKAAVAAVSDDGKITYQGTELDLGQDFERLHMVDAIKKYAGVDFWPKMSVEDAKKLADENGIHYESWWTVGHIINEFFEEKVQDQLKQPVFIYGHPVEISPLAKKNAEDDRFTDRFELYILGNEYGNAFTELNDPIDQRARFEAQVAEREAGNDEAEGIDEDYIEALEYGMPPTGGLGIGIDRLVMLLTDAPSIRDVLLFPTMKPID

SEQ ID NO: 30235 - DNA, 1491 bp, Oenococcus oeni PSU-1
  CDS (1)..(1491): transl_table=11
atgacagaaaaaatagatacagaattaaatgatcaactccgagttcgccgccaaaagctccaagctttgaaagatgatttagggattgatccttttggtcatcgttttgaacgagattcatatgcaaaagatattcattcttttgctgataacaaaagtaaagaagaattagatgctgcaaaaaaacatgtgattatagctggaagaatcatggccaaacgtggagcaggtaaaattatttttgccgatattcgagatgtttccggaacggttcagatttatgcacgtcgtgatgatttggcagataactatgccttgattcgtcgggccgaccttggcgatattttaggtttttccggtacagttatgaagaccgatgcgggcgagacaaccattttaattgataaattgacctggctgtcaaaggcacttcgacctttgccggataaatatcatggtttaacagacattgatactcgctaccgtaaacgctatttggatttgatttcgaatccaaaatcttttgaggtttttattaaacgctctaaaattgttaaagcaatccgaaattacatggattcgattggttttctagaagtggaaacaccaattttacaaaattcagctggtggcgctgctgcccgcccttttgttactcatcataatgcactcgatatcgatatgtatctgcggattgcgacggagctctatttaaaacgtttaattgttggtggaatggaacgcgtttatgagattggccgtatctttagaaatgagggtatggacacgcgtcataatcccgaattcacaacgcttgagtcttatggagcttactgggatttgtcggatgtgatgatagagacggaaaatattattcgtgccgctgccaaatcaatcaatgaagatggtgtcattgactatcaaggccataaaattgaccttagtaaggattttgccaagaggtcaatgactgaattgattaaggaaaaaaccggaattgattttgataagaagattgatttagaaacagcgcgaaaattggctaatgaaaataatgttaaatatgaaagcttctggggcgttggccatatcattgctgaattctttgatacttttgttgaaaaaagtttaattgagccaacctttgtttatcattttcctttggaagtcagtccgttggctaaaaaagaggataataatccagattttgttcaacgttttgagttatacatagccggcggcgagtatggcaatgcgtttactgaattgaatgatccaattgatcagcgccagcgttttgaagcacaagcagctgagcgtgaaaatggtaatgacgaagctgaatcaattgatgaagactatattgaagcccttgaacacggaatggcgccgaccggtggcctaggaattgggatcgaccgtttaacaatgttactgacaaatcagacttcagttcgagatgttcttttatttccaacgatgagaaactaa

SEQ ID NO: 30236 - protein, 496 aa, Oenococcus oeni PSU-1
MTEKIDTELNDQLRVRRQKLQALKDDLGIDPFGHRFERDSYAKDIHSFADNKSKEELDAAKKHVIIAGRIMAKRGAGKIIFADIRDVSGTVQIYARRDDLADNYALIRRADLGDILGFSGTVMKTDAGETTILIDKLTWLSKALRPLPDKYHGLTDIDTRYRKRYLDLISNPKSFEVFIKRSKIVKAIRNYMDSIGFLEVETPILQNSAGGAAARPFVTHHNALDIDMYLRIATELYLKRLIVGGMERVYEIGRIFRNEGMDTRHNPEFTTLESYGAYWDLSDVMIETENIIRAAAKSINEDGVIDYQGHKIDLSKDFAKRSMTELIKEKTGIDFDKKIDLETARKLANENNVKYESFWGVGHIIAEFFDTFVEKSLIEPTFVYHFPLEVSPLAKKEDNNPDFVQRFELYIAGGEYGNAFTELNDPIDQRQRFEAQAAERENGNDEAESIDEDYIEALEHGMAPTGGLGIGIDRLTMLLTNQTSVRDVLLFPTMRN

SEQ ID NO: 30237 - DNA, 1506 bp, Solibacter usitatus Ellin6076
  CDS (1)..(1506): transl_table=11
ttgtccctggaagacgacttgctcaaacagcgtttgacgcgcattcgcgaaatcgaagccctcggctaccggggctatggacagcggttcgagtttacccatgccgtgcccgagatactcgccgagtatggagccaaaacggcggaggagctggcgccggaggttcgggtccgcgttgccggacgcctgatgacgctgcgccacatgggcaaggcgggctttgcgcacctgcagcagaatggcgagcgactgcagatctacgtgaagaaagacgcagtgggcgaacgcgattacgcgctgttcaagctgatcgacctgggcgatatcgtcggcgtggagggatacttgttccgcacgcgcaccggggagctgagcattcacgcggagaagctggaattcctgagcaagacgctgctctccatgcccgagaagtggcatggcctggaagacgtggagacgcgctaccggcagcgctacctggacctgatcgccaacgccgacgtgcgcaaagttttcgtgacgcgggccaagatcatttcgtccctgcgacgtcagctggaggcgcgcaacttcatcgaagtggagacgccgatgatgcagccgctttacggcggggcagcggcgcggcccttcgtcacgcatcacaatacgctggatatcgacctctacctgcggatcgcgcccgagctctacctgaagcgcttggtggtgggcggaatggagcgcgtttacgaaatcaatcgcaacttccgcaacgaagggctatccacgcatcacaaccccgagttcacgatgttggagttctaccaggcgtacacggactatcgcgggctaatcgatttttccgaggagctgctgcggcaggcggcgatcgacgccacggggtcgccggtggtggagttcgaaggccatcagatcgatttcagctgcctggcgcggtacagcatgcgcgaagcgattgtgcggcactgggaaggtgacggtgcgccgacgatggaagacgtggccagccccgaatggctgagcgtgcattccggcaaggcgacggcgggcgagcgtctgacagatattttcgagcgccatgtggaagacaagttgattcagccgacggtgatttacgactacccggtggagacttcgccgctttcgaagaacaagcccgaggatccggcgttcgtggagcgcttcgagatctatgcggcgggcatggagatcggcaacgcatataccgagttgaacgatccgcaggagcagcggcggcgcttcgagatgcagatcggcatgcgcgagcgcggcgacgaagaggcgcaccagatggatgaggactatgtccgcgcgctggcatacgggatgcctccgaccggaggcgaagggatcggtatcgaccggttgacgatgatcctgaccggatcgcgctccatccgcgacgtgattctgttcccgctgctgcggccggaagggccgatcgaactggtggggcaactgcgcgaatccgacaaactgtga

SEQ ID NO: 30238 - protein, 501 aa, Solibacter usitatus Ellin6076
MSLEDDLLKQRLTRIREIEALGYRGYGQRFEFTHAVPEILAEYGAKTAEELAPEVRVRVAGRLMTLRHMGKAGFAHLQQNGERLQIYVKKDAVGERDYALFKLIDLGDIVGVEGYLFRTRTGELSIHAEKLEFLSKTLLSMPEKWHGLEDVETRYRQRYLDLIANADVRKVFVTRAKIISSLRRQLEARNFIEVETPMMQPLYGGAAARPFVTHHNTLDIDLYLRIAPELYLKRLVVGGMERVYEINRNFRNEGLSTHHNPEFTMLEFYQAYTDYRGLIDFSEELLRQAAIDATGSPVVEFEGHQIDFSCLARYSMREAIVRHWEGDGAPTMEDVASPEWLSVHSGKATAGERLTDIFERHVEDKLIQPTVIYDYPVETSPLSKNKPEDPAFVERFEIYAAGMEIGNAYTELNDPQEQRRRFEMQIGMRERGDEEAHQMDEDYVRALAYGMPPTGGEGIGIDRLTMILTGSRSIRDVILFPLLRPEGPIELVGQLRESDKL

SEQ ID NO: 30239 - DNA, 1500 bp, Mycobacterium avium 104
  CDS (1)..(1500): transl_table=11
gtgagtcccgccccagacgccgacattcccgagcagtaccggatccgccgggacaagcgcgcgcggctgctcgccgaggggcacgacccgtacccggtcgccgtcgaacgcacccacacgctggcgcaggtgcgcgccgcccaccccgacctgcccgtcgacaccgcgaccgacgacgtggtcggcgtcgccggccgggtgatcttcgcgcgcaactccggcaagctgtgcttcgccacgctgcaggagggcgacggcaccaccctgcaggtgatggtcagcctggacaaggtgggccgcgaagccctggacgcgtggaaggccgacgtcgacctgggcgacatcgtctccgtgcacggcaccctgatcagctcccggcgcggcgaactgtccgtgctcgccgactcgtggcggatggcgtccaagtcgttgcgtccgctgcccgtcgcgcacaaggagatgagcgaagaggcgcgggtgcggcagcgctacgtcgacctgatcgtgcgcccgcaggcgcgcacggtcgcccggcagcggatcgcggtgatccgggcgatccgcaacgccttggaacggcgcgggtttctcgaagtcgaaaccccaatgttgcagacgctggccgggggcgcggctgcacggccgttcgtcacccattccaacgcgctcgacatcgatctctacctgcggatcgccccggaactgttcctcaagcgctgcgtcgtcggtggtttcgataaggttttcgaactaaatcgcgtgttccgaaacgaaggtgcggattccacccattctccggaattctccatgctggagacctaccaggcctacggaacgtatgacgattcggcggtggtgacgcgcgagcttattcaagaggtggccgacgaggccatcggaacccgacaactaccgctgcccgacggcagcgtctacgacatagacggagaatgggcttctatagaaatgtacccgtcgctgtcggcggcgctcggtgaggagatcaccccgcagaccacggtggaaaagctgctcggcatcgccgagcggctgggcgtcgagatcccccgcgaccgcggctacgggcacggcaagatcgtcgaggagctgtgggagcacaccgtgggcgacacgctcaccgcgcccacgttcgtgcgggatttcccggtcgagacaacgcctttgacgcgtcagcaccgcagcatcgacggcgtcaccgagaaatgggacctgtacgtgcgtggggtcgagctggccaccggctactcggagttgaccgatcccgtggtgcagcgcgagcggttcgccgcccaggcgcgtgcggcggccgccggcgacgacgaggccatggtgctcgacgaagactttctcgccgcgctcgagtatgggatgccgccctgcaccggaacgggaatgggtatcgaccggttgttgatgacattgaccgggctgtcaattcgggagacagttttgttccccatcgttcggccgcattcgtag

SEQ ID NO: 30240 - protein, 499 aa, Mycobacterium avium 104
MSPAPDADIPEQYRIRRDKRARLLAEGHDPYPVAVERTHTLAQVRAAHPDLPVDTATDDVVGVAGRVIFARNSGKLCFATLQEGDGTTLQVMVSLDKVGREALDAWKADVDLGDIVSVHGTLISSRRGELSVLADSWRMASKSLRPLPVAHKEMSEEARVRQRYVDLIVRPQARTVARQRIAVIRAIRNALERRGFLEVETPMLQTLAGGAAARPFVTHSNALDIDLYLRIAPELFLKRCVVGGFDKVFELNRVFRNEGADSTHSPEFSMLETYQAYGTYDDSAVVTRELIQEVADEAIGTRQLPLPDGSVYDIDGEWASIEMYPSLSAALGEEITPQTTVEKLLGIAERLGVEIPRDRGYGHGKIVEELWEHTVGDTLTAPTFVRDFPVETTPLTRQHRSIDGVTEKWDLYVRGVELATGYSELTDPVVQRERFAAQARAAAAGDDEAMVLDEDFLAALEYGMPPCTGTGMGIDRLLMTLTGLSIRETVLFPIVRPHS

SEQ ID NO: 30241 - DNA, 1524 bp, Mycobacterium smegmatis str. MC2 155
  CDS (1)..(1524): transl_table=11
gtgaccccagccgatcgtgacgacacgtcccagccccaggccgatatccccgagcagttccgaatccgtcaggagaagcgggagcggctgctggcgcaggggcacgatccgtacccggtgaaggtcgatcgcacccacacgctggccgaactgcgccgcgcccaccccgacctggccgccgacaccgcgaccggccagatcgtcggggtctccggccgcgtggtgtttgcccgcaactcgggcaagttgtgcttcgcgaccctgcaggagggcgacggcacccaactgcaggtgatgatcagcctcgctcaggtgggccaggaggcactcgactcctggaagagtgacgtggacctcggtgacatcgtgttcgtccacggcgaagtcatcagttccaagcgtggcgaattgtcggtgctggccgacagatggcagatggcggcaaaggcgctgcggccacttccggttgctcacaaagaaatgagcgaagaagcgcgcgtgcgtcagcgctatgtcgacctcatcgtccggcccgaggcccgcaccatcgcccgccagcgcgtcgcggtggtccgcgctgtgcgttcggcgctcgaacggcgcggattcctcgaggtcgagaccccgatgctgcagacgctcgccggcggtgccgccgcgcgcccgttcatcacgcactccaatgcgctcgacatcgatctgtacctgaggatcgcgccggaactgttcctcaagcgctgcctcgtgggcggatttgagaaggttttcgagttgaatcgcaactttcgcaatgagggtgtggattccacacactcgccggaattcgcgatgttggagacatatcaggcttacggtgactacaacgattccgcgaccgtcacccgagaacttattcaagaggtcgccgacgaagcgatcggcacgcgtcaggtgccattgcccgatggcacggtctacgatctcgacggtgaatgggacacggtggaaatgtacccatcgctgtcggaggcactcggtgacgagatcactcccgagaccccggtcgagaagttgtggcagattgcggatcgacttgaggtcgagattccgcgtgaccgcggttacggtcacgggaaattgatcgaagaactatgggaacacacggtcggtgacaagttgtgggccccgacgttcgtgcgcgacttccccgtcgagacgactccactcacccgagcgcatcgcagcattccaggggtcaccgagaagtgggacctgtatgtgaggaaattcgaactcgccacgggatactccgaactcatcgacccggtaatccagcgcgagcgtttcgaggcccaggcccgcgccgccgccgccggcgacgacgaggcaatggttctcgacgaggatttcctggccgcattggagttcgcgatgccgccgaccacgggaaccggaatgggcatcgataggttgatgatggcgttgacagggttgtctattagggagaccgttttgttcccgattgttcggcgtcacagcaactga

SEQ ID NO: 30242 - protein, 507 aa, Mycobacterium smegmatis str. MC2 155
MTPADRDDTSQPQADIPEQFRIRQEKRERLLAQGHDPYPVKVDRTHTLAELRRAHPDLAADTATGQIVGVSGRVVFARNSGKLCFATLQEGDGTQLQVMISLAQVGQEALDSWKSDVDLGDIVFVHGEVISSKRGELSVLADRWQMAAKALRPLPVAHKEMSEEARVRQRYVDLIVRPEARTIARQRVAVVRAVRSALERRGFLEVETPMLQTLAGGAAARPFITHSNALDIDLYLRIAPELFLKRCLVGGFEKVFELNRNFRNEGVDSTHSPEFAMLETYQAYGDYNDSATVTRELIQEVADEAIGTRQVPLPDGTVYDLDGEWDTVEMYPSLSEALGDEITPETPVEKLWQIADRLEVEIPRDRGYGHGKLIEELWEHTVGDKLWAPTFVRDFPVETTPLTRAHRSIPGVTEKWDLYVRKFELATGYSELIDPVIQRERFEAQARAAAAGDDEAMVLDEDFLAALEFAMPPTTGTGMGIDRLMMALTGLSIRETVLFPIVRRHSN

SEQ ID NO: 30243 - DNA, 1551 bp, Nocardioides sp. JS614
  CDS (1)..(1551): transl_table=11
gtgaccgagcaccccagcgagcacccgtccgagcacccgtccgagcacccagcgcccgccgacgacctgcccgaccagatgcgggtgcgccgggccaagcgggcccggctgctcgaggagggccgggaggcctaccccgtcggcgtgccgcgcacccacacgctggccgacgtgcgcgaggcttggggtcacctcgaggccgcggaggagacccaggacgtggtcggtgtcgccggtcgcgtcgtgttcgtccgcaacaccggcaagctgtgcttcgcgaccctgcaggagggcatcggcacccggctccaggtgatgctcagcctcgccgaggtcggcgaggaggcgctcgacgactggaagcacaccgtcgacctcggcgaccacgtgttcgtcgagggccgggtgatctcctccaagcggggcgagctgtcggtgatggcgtcgagctggtcgatggcctccaaggcgctgcgcccgctgccggtgctgcacaaggagctgtccgaggagtcgcgggtccgccagcgctacgccgacctgatcgtgcgccaggaggcgcgggacatggtccggacccgggcggccgtgctgcgctccatccggtcgaccctcgacgacgcgggcttcgtcgaggtcgagacgccgatcctgcagatgatgcacggcggcgccgccgcgcgccccttcggaacccacctgaacgccttcgaccaggacatgaccctgcggatcgctctcgagctgttcttgaagcgcgccgtcgtcggcggcgtggaccgggtctacgagctcggccggatcttccgcaacgagggcgtcgactccacgcacagccccgagttcacgatgctggagttctacgaggcgtacggcgaccagttcaccgccgctgagcgcaccaaggcgatcgtgctcaacgccgccgcggcggccggcgtcggcaccaccctggtggaccaccacggccacgagatcgacctgtccggcgagtggcgctggctgccgatcgccgacgccgtctccgacgcgctcggtgagcagatctccaccgacgagaccgccgacaacgcggcggccctgcgccggctgggcgaggcgcgcgacatcgcgctcaagccgacctggggcgccggcgagatcatcctggagctctacgaacagctcgtcgagcacaccctgatccagccgacgttcgtctgcgactaccccgagtcggtgcgcccgctcgcccggccgcaccgcacgacgcccggcctggtcgaggcctgggacctgatcatcggcggtatggagctcgcaccgagctactccgagctggtggacccggtcatccagcgcgagcggctgaccgagcagtccctgctcgcggccggcggcgacgccgaggcgatgcagctcgacgaggacttcctccgggcgctggagtacggcgcacccccgatgggcggcaccggcatcggggtcgaccgcctcgtgatgctgctcaccggcgtcggcatccgggagacgatcctgttcccgctgctcaagcccgaggccgagcgctga

SEQ ID NO: 30244 - protein, 516 aa, Nocardioides sp. JS614
MTEHPSEHPSEHPSEHPAPADDLPDQMRVRRAKRARLLEEGREAYPVGVPRTHTLADVREAWGHLEAAEETQDVVGVAGRVVFVRNTGKLCFATLQEGIGTRLQVMLSLAEVGEEALDDWKHTVDLGDHVFVEGRVISSKRGELSVMASSWSMASKALRPLPVLHKELSEESRVRQRYADLIVRQEARDMVRTRAAVLRSIRSTLDDAGFVEVETPILQMMHGGAAARPFGTHLNAFDQDMTLRIALELFLKRAVVGGVDRVYELGRIFRNEGVDSTHSPEFTMLEFYEAYGDQFTAAERTKAIVLNAAAAAGVGTTLVDHHGHEIDLSGEWRWLPIADAVSDALGEQISTDETADNAAALRRLGEARDIALKPTWGAGEIILELYEQLVEHTLIQPTFVCDYPESVRPLARPHRTTPGLVEAWDLIIGGMELAPSYSELVDPVIQRERLTEQSLLAAGGDAEAMQLDEDFLRALEYGAPPMGGTGIGVDRLVMLLTGVGIRETILFPLLKPEAER

SEQ ID NO: 30245 - DNA, 1503 bp, Azoarcus sp. BH72
  CDS (1)..(1503): transl_table=11
atgtccgaccataacgccacccctgccgcccaggacgaaaaccacatcatcgcggagcgccgcgaaaaactcgcccaatggcgccaggcaggccgggccttccccaacgacttctcgcgcgagaacaccgccggcaagctcgacgaggtgtatggcgacaaagagccggaagcgctggaagccagcccggtggaagtccgcgtagcgggccgcgtgatgctcaagcgcgtgatgggcaaggccagcttcatcaccatccaggacctctccggccgcatccagctgtacgtgcagcgcgacggcgtcggcgaagacgtctatgccgacttcaagcactgggacatcggcgacatcgtgggctgcgtcggcacgctgttcaagaccaagaccggcgaactcacggtcaaggcgagcgaaatccgcctgctcaccaagagcctgcgcccgctgccggacaagttccacggcctcaccgacgtcgagcagaagtaccgccagcgctacctcgacctgatcatgagcgagcagacccgcttcaccttcgtggcccgcagccgcatggtgcagtcgatccgcaactacatgatcaaccacggcttcctcgaagtcgaaacgccgatgatgcaccccatccccggcggcgccgcggccaagcccttcgtcacccaccacaacgcgctcgacatggaactcttcctgcgcatcgcgccggagctgtacctcaagcgcctggtggtcggcgggctggagaaggtgttcgaggtgaaccgcaacttccgcaacgaaggcctctcgccgcgccacaaccccgaattcacgatgatggagttctatgaggcctacgcggactaccgcagcctgatgaacttcaccgaaggcctcatccgccaggccgcacgcgaagcgctcggcgccgaaagcttcgtctaccagggccgcgaactcgatctctccaagcccttccaccgcctcaccatcgtgcaggccatccgcaagtaccacccgggcttctccgaagcccagctggccgacgcggaatgggtcaaggaaaagatccaggccttcggcgagaaggtgaagccgggcggcctcggcagcctgcagctgcaactcttcgaagcctgcgccgaagccgagctgtgggaaccgaccttcatcatcgactacccggttgaagtctcgccgctcgcccgcgcctccgacagcaacccggaaatcaccgaacgcttcgaactcttcatcgtcggccgcgagatcgccaacggcttttccgagctcaacgaccccgaagaccaggccgcgcgcttcctcgcccaggcccaggccaaggaagccggcgacgaagaagcgatgtactacgacgccgactacatccgcgcgctcgaattcggcctgccgcccaccggcggctgcggcatcggcatcgaccgtctggtgatgctgctgaccgacagcgcctcgatccgcgacgtgatcctgttcccgcagatgcgtccggaataa

SEQ ID NO: 30246 - protein, 500 aa, Azoarcus sp. BH72
MSDHNATPAAQDENHIIAERREKLAQWRQAGRAFPNDFSRENTAGKLDEVYGDKEPEALEASPVEVRVAGRVMLKRVMGKASFITIQDLSGRIQLYVQRDGVGEDVYADFKHWDIGDIVGCVGTLFKTKTGELTVKASEIRLLTKSLRPLPDKFHGLTDVEQKYRQRYLDLIMSEQTRFTFVARSRMVQSIRNYMINHGFLEVETPMMHPIPGGAAAKPFVTHHNALDMELFLRIAPELYLKRLVVGGLEKVFEVNRNFRNEGLSPRHNPEFTMMEFYEAYADYRSLMNFTEGLIRQAAREALGAESFVYQGRELDLSKPFHRLTIVQAIRKYHPGFSEAQLADAEWVKEKIQAFGEKVKPGGLGSLQLQLFEACAEAELWEPTFIIDYPVEVSPLARASDSNPEITERFELFIVGREIANGFSELNDPEDQAARFLAQAQAKEAGDEEAMYYDADYIRALEFGLPPTGGCGIGIDRLVMLLTDSASIRDVILFPQMRPE

SEQ ID NO: 30247 - DNA, 1548 bp, Acidovorax sp. JS42
  CDS (1)..(1548): transl_table=11
atgtccactgaagccactcctgcaccagccccccaggacgaaaaccaactcatcgccgaacgccgtgaaaagctcaaggctctgcgcgagaaccaggcccagggccaaggcgtggcatttcccaatgactacaagccccagcaccatgccgcagtgctgcagcagcagtacggcacattggatggagaagcgctcgaagcccaggcgatcacggtgagcgtggccggccgcatgatgctcaagcgcgtcatgggcaaggccagcttcgcgaccctgcaggatggatcgctgggtgacaccggcgggcgcatccagctctacgtgacacgcgacgccattggcgaggaagcctattccgacttcaagcgctgggacctcggtgacatcctgggtgccgaaggcacgctgatgaagaccaagaccggcgagctatcggtcaaggtgtcgcgcctgcgcctgctcaccaagagcctgcgccccatgcccgacaaattccacggtgtggccgaccaggaggtcaagtaccgccagcgctacgtggacctgatgaccgacgaggccgcgcgccgccgcttcgtcgcgcgcagcaaggctgtgggcagcatccgctctttcatgatggagcacggcttcctggaggtggaaacgcccatgctgcaccccattcccggcggcgccaacgccaagcccttcgtcacccaccacaatgcgttggagcaggagatgttcctgcgcatcgcgcccgagctgtacctcaagcgcctgatcgtcggcggcttcgagcgcgtgttcgagatcaaccgcaacttccgcaacgaaggcatctcggtgcgccacaaccccgagttcacgatgatggagttttatgcggcctactggaactaccgcgatctgatggatttcaccgaggcgctggtgcgcgatgccgcactcaaggccacgggcacgctgcagctcacctacggtggccgcgcggtggatctggcccagcccttccagcgcctcacgatccgcgaggccatctaccagcacaccgaggccggcgcacatgtggacgatgccgcctggctcatcagcgcgctcaagaaactgggcatgaccgaggagaaggaccgcctgtccacccggaccctcgccagcctgcaggtgctctacttcgaggaagaggtggaggacaagctctggcagccgaccttcatcatggagcacccgaccgagatcagccctctggcgcgcgccaacgacctgcgccccgaggtgacggagcgcttcgagctctacatcaccggccgcgagttcggcaatggcttctcggagctgaacgatgccgaagaccaggccgcccgctttcatgcgcaggtggctgccaaggacgcgggcgatgacgaggccatgttcttcgaccacgacttcgtacgtgcgctggaatacggcatgccgcccacaggtggttgcggcatcggcatcgaccggctgatgatgctgctcaccgacagcccgagcatccgtgacgtgatcctgttcccggccctgcggcgcgagcactga

SEQ ID NO: 30248 - protein, 515 aa, Acidovorax sp. JS42
MSTEATPAPAPQDENQLIAERREKLKALRENQAQGQGVAFPNDYKPQHHAAVLQQQYGTLDGEALEAQAITVSVAGRMMLKRVMGKASFATLQDGSLGDTGGRIQLYVTRDAIGEEAYSDFKRWDLGDILGAEGTLMKTKTGELSVKVSRLRLLTKSLRPMPDKFHGVADQEVKYRQRYVDLMTDEAARRRFVARSKAVGSIRSFMMEHGFLEVETPMLHPIPGGANAKPFVTHHNALEQEMFLRIAPELYLKRLIVGGFERVFEINRNFRNEGISVRHNPEFTMMEFYAAYWNYRDLMDFTEALVRDAALKATGTLQLTYGGRAVDLAQPFQRLTIREAIYQHTEAGAHVDDAAWLISALKKLGMTEEKDRLSTRTLASLQVLYFEEEVEDKLWQPTFIMEHPTEISPLARANDLRPEVTERFELYITGREFGNGFSELNDAEDQAARFHAQVAAKDAGDDEAMFFDHDFVRALEYGMPPTGGCGIGIDRLMMLLTDSPSIRDVILFPALRREH

SEQ ID NO: 30249 - DNA, 1686 bp, Nostoc punctiforme PCC 73102
  CDS (1)..(1686): transl_table=11
atgtcggaagaagatatccgagccgcaaggctggaaaaagtagaacaactcaagcagctagggactaatccctacgcctatcgctgggaatctacccatcatgcagcacagttgcaagaacagtttgccgatttagccagtggtgaagaagttgatttagaagttgcgatcgctggacgcattatggcgcgtcgcgttttcggtaaactggctttcttcaccttgcaagatgaaactggcacaattcagctttatttggataaaaatcgcatccaagaaagcatggcagatattgatgctgatgccttcaatcatttaaaacaactcacagatgcaggcgatatcctgggagttaaaggtactattaaacggactgaaaagggcgagttatctgtctacgttaaacaatatactatcctgactaaatccctgttgcccctacccgacaagtggcatggattgacggatgttgccaagcgctaccgtcagcgttacgttgacctgattgttaacccggaagtgcggcaaactttccgccgtcgtgcccaaattacagctgggattcgccgttatttggaacagcgagattttctcgaaattgaaacgccagttttacagagtgaagctggaggtgcagatgcgcgtccatttatcacccaccacaacaccttagaaatggaattgtatctgcgaattgccacagaactccatctcaagcggttgattgtaggtggttttgaaaaggtgtttgaattgggaaggattttccgtaatgaaggaatttcgactcgacacaatcccgaatttacaacgattgaagtttaccaagcctacgccgactacaacgatatgatggcgctgactgaagggattattaccactgtcgcccaagaggtactcggcacgctgcaaattacctaccaaggggaacctatagatttaacaccaccttggcggcgagtgacaatgcacgatttagttaaagaatttactggcttagatttcaattctttccaaaccttggaagaagcaaaaacagcaagtaaaaatgctggtattcctggtgtagatgaagccaaatcaattggtaaattactgaatttagcctttgaagagaaagtagaagctaatttaattcaacctacctttgtaattgattacccagtagaaatttcgcccctagcaaaaccccaccgttctcaacctggtttggtggaaagatttgagttatttatcgtcgggcgagaaactgggaatagcttctcagaacttacagatcccatcgatcaaagagaacgcctagaagcccaagccgaaagaaaagctgctggcgacttagaagcccaaggtgtagatgaagactttttgacagcccttgaatacggtatgccgcctacaggtggcttagggattgggatcgatcgcttagtaatgttgttaactgattctgccagcattcgggatgtaattgctttccctctgcttaagcctgaaggcagcgttattaagcaatttagctatgaacaaaaaacccaaacactgactattgaatttgacagtggaagtgtttacgagtatttcaaagtccctcccagtgtcaaagaagacttggataatgcaccgtctaaaggtcaacactttaacaagttcattaaaggaaaattcaagtttgaacagttaagttga

SEQ ID NO: 30250 - protein, 561 aa, Nostoc punctiforme PCC 73102
MSEEDIRAARLEKVEQLKQLGTNPYAYRWESTHHAAQLQEQFADLASGEEVDLEVAIAGRIMARRVFGKLAFFTLQDETGTIQLYLDKNRIQESMADIDADAFNHLKQLTDAGDILGVKGTIKRTEKGELSVYVKQYTILTKSLLPLPDKWHGLTDVAKRYRQRYVDLIVNPEVRQTFRRRAQITAGIRRYLEQRDFLEIETPVLQSEAGGADARPFITHHNTLEMELYLRIATELHLKRLIVGGFEKVFELGRIFRNEGISTRHNPEFTTIEVYQAYADYNDMMALTEGIITTVAQEVLGTLQITYQGEPIDLTPPWRRVTMHDLVKEFTGLDFNSFQTLEEAKTASKNAGIPGVDEAKSIGKLLNLAFEEKVEANLIQPTFVIDYPVEISPLAKPHRSQPGLVERFELFIVGRETGNSFSELTDPIDQRERLEAQAERKAAGDLEAQGVDEDFLTALEYGMPPTGGLGIGIDRLVMLLTDSASIRDVIAFPLLKPEGSVIKQFSYEQKTQTLTIEFDSGSVYEYFKVPPSVKEDLDNAPSKGQHFNKFIKGKFKFEQLS

SEQ ID NO: 30251 - DNA, 1509 bp, Haemophilus somnus 2336
  CDS (1)..(1509): transl_table=11
atgacagaaataattcaagaattggatctcaatggcgaaatgttggttcgtcgtgaaaaattagctgcgttaagagcaaaaggcaacgcctttccaaatacattccgtcgcaatgctttagcacaggacttacatacacaatatgatgaaattgaaagtgagagcttaaaaacacagggaattgaagtaaaagtggcggggcgtattatgactcgtcgtgtcatgggtaaagcaacctttatcacattgcaagacatgagcggaaaaattcaactttatgttgctcgtgataacctagctgaaggtgtttatactgatgatgtgggcaattgggatttaggggatattgttggtgtaaaaggtactttatttaaaactaaaaccaatgagttgacaatacgtgcaacggaagttcacttattaactaaagcattacgcccgcttcctaataaatttcatggactgagcgatcaagaaactcgttaccgtcaacgctacttagatttaattgctaatgaagattcacgccgcacttttattattcgatctaaagtaatcgcaggcattcgtgaatatttcatttccaagggatttatggaagtagaaacccctatgttacaaattattccgggtggtgcatctgcacgtccatttattactcatcacaatgcgttagatgtggatatgtatttacgtattgcacctgaactttatttaaaacgtttggtagttggcggttttgaacgtgtattcgagttaaatcgtaacttccgcaatgaaggtgtttctattcgccataaccctgaatttactatgttggaatactaccaagcctatgcggattaccacgatttaatggacaatacagaagaacttttacgcaaattagcactggatattttaggtacgaccattgttccttacggcgatttaaaattcgatttcggcaaaccgtttgaacgtattaccatgcacgaggcaatcttaaaatacggtgccgagcaaggtattgtgaaagaagatttatacgatttcgatcgtgctgttgcagtagcacaaaaattgggtatcgaagtacaaaaatcatgggggctaggtagcttagtcaatgcaatttttgaagaagttgctgaacatcatttaattcaaccaactttcttaatggctcatccggcagaaatctcccctttagcacgccgcaatgatgaaaatcctgacgtaacagaccgctttgaattatttatcggaggacgtgagatcggtaacggtttctcagaattaaatgatgcagaagatcaaaatgagcgttttgatgcacaggttgcagcaaaagaagctggtgacgatgaagctatgtttaaagatgaagattttgttaccgcacttgagcatggattgccaccaacggctggtgagggtttaggaattgatcgtctagcgatgttatttgccaacgctaactcaattcgtgatgtaattttatttccagcaatgaaaacaaaaagttaa

SEQ ID NO: 30252 - protein, 502 aa, Haemophilus somnus 2336
MTEIIQELDLNGEMLVRREKLAALRAKGNAFPNTFRRNALAQDLHTQYDEIESESLKTQGIEVKVAGRIMTRRVMGKATFITLQDMSGKIQLYVARDNLAEGVYTDDVGNWDLGDIVGVKGTLFKTKTNELTIRATEVHLLTKALRPLPNKFHGLSDQETRYRQRYLDLIANEDSRRTFIIRSKVIAGIREYFISKGFMEVETPMLQIIPGGASARPFITHHNALDVDMYLRIAPELYLKRLVVGGFERVFELNRNFRNEGVSIRHNPEFTMLEYYQAYADYHDLMDNTEELLRKLALDILGTTIVPYGDLKFDFGKPFERITMHEAILKYGAEQGIVKEDLYDFDRAVAVAQKLGIEVQKSWGLGSLVNAIFEEVAEHHLIQPTFLMAHPAEISPLARRNDENPDVTDRFELFIGGREIGNGFSELNDAEDQNERFDAQVAAKEAGDDEAMFKDEDFVTALEHGLPPTAGEGLGIDRLAMLFANANSIRDVILFPAMKTKS

SEQ ID NO: 30253 - DNA, 1482 bp, Fusobacterium nucleatum subsp. vincentii ATCC 49256
  CDS (1)..(1482): transl_table=11
atggagaaatattttgacagattagagaaagaacctctaattgctgaaagatggaaaaaaattgaagagttggaaagctatggtataaagccatttggtaaaaaatatgataaacaaataatgataggagatattttaaaacataagccagaagaaaatttaaagtttaaaactgctggaagaataatgtctttaaggggaaaaggaaaagtatattttgctcatatagaagaccaatctggtaaaatccaaatttatataaagaaagatgaattaggagaagaacaatttgaccatattgttaaaatgttaaatgttggagatataattggacttgaaggagaattatttataactcatacagaagaattaactttaagagttaaaagtattgctcttttaacaaaaaatgtaaggtctcttcctgaaaaatatcatggacttacagatgttgaaatcagatatagaaaaagatatgttgacttaataatgaacccagaggttagggatacttttataaaaagaactaaaataataaaagctataaggaaatatttagatgatagaggatttttagaagtagaaactcctataatgcacccgattttaggtggagctgctgcaaaaccttttataactcaccataatactttaaatattgatttatatctaagaattgcacctgaattatatttaaaaaaattaatagttggtggctttgaaagagtatatgacttaaatagaaattttagaaatgaaggaatatctacaaggcataatcctgaatttactatggttgaattataccaagcccatgcagattttcatgatatgatggatttatgtgaaggaataatctcatctgtgtgtaaagaagtgaatggaacaactgatattgaatatgatggagttaaattatcacttaaaaactttgcaagagtacatatggttgatatgataaaagaagttacaggggttgatttctggaaagaaatgacttttgaagaagctaaacaaatagctaaggagcatcatattgaggttgcagatcatatgaatagtgttggacatattataaatgaattctttgaacaaaaatgtgaagaaaaagttatacaaccaacatttgtatatggacatcctgttgaaatatctccacttgcaaaaagaaatgaagataatccaaactttacagatagatttgaattattcattaataaaagagaatatgcaaatgctttcactgaattaaatgacccagcagaccaaagaggaagatttgaatcacaagttgaagaagcaatgcatggaaatgaagaagcaacacctgaaatagatgaaagttttgtagaagctcttgaatatggtttaccacctactggtggactaggaataggtatagatagacttgtaatgttacttacaggggcaccatctataagagatgttattcttttcccacaaatgaaaccaagagattaa

SEQ ID NO: 30254 - protein, 493 aa, Fusobacterium nucleatum subsp. vincentii ATCC 49256
MEKYFDRLEKEPLIAERWKKIEELESYGIKPFGKKYDKQIMIGDILKHKPEENLKFKTAGRIMSLRGKGKVYFAHIEDQSGKIQIYIKKDELGEEQFDHIVKMLNVGDIIGLEGELFITHTEELTLRVKSIALLTKNVRSLPEKYHGLTDVEIRYRKRYVDLIMNPEVRDTFIKRTKIIKAIRKYLDDRGFLEVETPIMHPILGGAAAKPFITHHNTLNIDLYLRIAPELYLKKLIVGGFERVYDLNRNFRNEGISTRHNPEFTMVELYQAHADFHDMMDLCEGIISSVCKEVNGTTDIEYDGVKLSLKNFARVHMVDMIKEVTGVDFWKEMTFEEAKQIAKEHHIEVADHMNSVGHIINEFFEQKCEEKVIQPTFVYGHPVEISPLAKRNEDNPNFTDRFELFINKREYANAFTELNDPADQRGRFESQVEEAMHGNEEATPEIDESFVEALEYGLPPTGGLGIGIDRLVMLLTGAPSIRDVILFPQMKPRD

SEQ ID NO: 30255 - DNA, 1509 bp, Haemophilus influenzae R2846
  CDS (1)..(1509): transl_table=11
atgtcagaacaagaagttaaagaattagatctcaatggcgaaatgctcgttcgtcgtgaaaaattagccgcattgcgtgcaaaaggtaatgcatttccaaacaaatttcgtcgtgatgctctcgcacaagatttgcacaatcaatatgatgcagaagacggtgaaatcttaaaagagaaaggcgttgaggtacaagttgctgggcgtattatgactcgccgtgcaatgggtaaagcaacttttatcactattcaagatatgagcggtaaaatccagctttatgttgcacgcgataatttgcctgaaggtgtttataaagatgacgttggtacttgggatttgggcgacatcgttggcgttaaaggcactttatttaaaacaaaaacagatgaactcactgtaaaaaccactgaagttcaacttttaaccaaagcacttcgcccattaccagacaaattccacggtttaactgaccaagaagttcgttatcgccaacgttatttagatttaatttctaacgaagaatctcgccgcacttttattattcgttctaaagttgtcgcgggtattcgtgaatatttcatttctaaaggctttatggaagtggaaacgccaatgttacaagtcattccaggcggtgcatctgcacgtcctttcgtaacccatcacaacgcgttagacgttgatatgtatttacgtatcgcacctgaactttatttaaaacgcttagtcgttggtggttttgaacgagtatttgaattaaaccgtaacttccgtaatgaaggggtttctgttcgccataatccagaatttactatgcttgaatactaccaagcgtatgcggattaccatgatttaatggataacaccgaagaactgcttcgtaaattagcgattgatattcttggtactactattgtgaaatacggcgaatacgaatttgattttggtaaaccattcgaacgtattacgttacacgatgcaaccattaaatacggtgcagacaaaggtatcgtaaaagaagatttatatgactttgatcgtgcaaaagccacggcagaacgcttaggtattgaagtacaaaaatcttggggtttaggcagcattgttaatgcaatttttgaagaagtggctgaacatcacttaattcaaccaacattcttaatggctcatcctgcggaaatttctccacttgcacgtcgtaatgatgaaaatccagatgtaacagatcgttttgagctctttatcggtggtcgtgaaatcggtaatggtttctctgaattaaatgacgctgaagatcaaaatgaacgttttgatgcacaagtggctgcaaaagaagcaggcgatgatgaagcgatgtttaaagatgaagactttgttgttgcattagagcacggcttaccaccaacagctggggaaggtttaggtatcgaccgcctagcgatgctttatgcaaatgcaccgtcaattcgtgatgtgatcttattccctgcaatgcgtcagaaataa

SEQ ID NO: 30256 - protein, 502 aa, Haemophilus influenzae R2846
MSEQEVKELDLNGEMLVRREKLAALRAKGNAFPNKFRRDALAQDLHNQYDAEDGEILKEKGVEVQVAGRIMTRRAMGKATFITIQDMSGKIQLYVARDNLPEGVYKDDVGTWDLGDIVGVKGTLFKTKTDELTVKTTEVQLLTKALRPLPDKFHGLTDQEVRYRQRYLDLISNEESRRTFIIRSKVVAGIREYFISKGFMEVETPMLQVIPGGASARPFVTHHNALDVDMYLRIAPELYLKRLVVGGFERVFELNRNFRNEGVSVRHNPEFTMLEYYQAYADYHDLMDNTEELLRKLAIDILGTTIVKYGEYEFDFGKPFERITLHDATIKYGADKGIVKEDLYDFDRAKATAERLGIEVQKSWGLGSIVNAIFEEVAEHHLIQPTFLMAHPAEISPLARRNDENPDVTDRFELFIGGREIGNGFSELNDAEDQNERFDAQVAAKEAGDDEAMFKDEDFVVALEHGLPPTAGEGLGIDRLAMLYANAPSIRDVILFPAMRQK

SEQ ID NO: 30257 - DNA, 1509 bp, Haemophilus influenzae R2866
  CDS (1)..(1509): transl_table=11
atgtcagaacaagaagttaaagaattagatctgaacggcgaaatgctcgttcgtcgtgaaaaattagccgcattacgtgcaaaaggtaatgcatttccaaacaagtttcgtcgtgatgctctcgcacaagatttacacaatcaatatgattcagaagacggggaaatcttaaaagaaaaaggcattgaagtacaagttgctggtcgtattatgactcgccgtgcaatgggtaaagcaacttttatcactattcaagatatgagcggtaaaatccagctttacgttgcacgcgataatttgcctgaaggtgtttatgctgaagatgtaggtaactgggatttaggcgatatcattggagtgaaaggtacacttttcaaaactaaaaccaatgaattaaccatcaaaacaactgaagttcaacttttaaccaaagcacttcgtccattaccagacaaattccatggtttaaccgaccaagaagttcgttatcgccaacgttatttagatttaatttctaacgaagaatctcgccgcacttttattattcgttctaaagttgtcgcgggtattcgtgaatatttcatttctaaaggttttatggaagtggaaacgccaatgttacaagttattccaggcggtgcatctgcgcgtcctttcgtaacccatcacaacgcgttagacgttgatatgtatttacgtattgcacctgaactttatttaaaacgcttagtagtgggtggctttgaacgagtatttgaattaaaccgtaacttccgtaatgaaggggtttctgttcgtcataatccagaatttactatgcttgaatattatcaagcctatgcagattaccatgatttaatggataacaccgaagaactgcttcgtaaattagcgattgatattcttggtactactattgtgaaatacggcgaatacgaatttgattttggtaaaccattcgaacgtattacgttacacgatgcaaccattaaatatggtgctgacaaaggtatcgtaaaagaagatttatatgactttgatcgtgcaaaagccacagcagaacgcttaggtattgaagtacaaaaatcttggggtttaggcagcattgtcaatgcaatttttgaagaagtggctgaacatcacttaattcaaccaaccttcttaatggctcaccctgcggaaatttcgccacttgcacgtcgtaatgatgaaaatcctgatgtaacagatcgttttgagctatttatcggtggccgtgaaatcggtaatggtttctcagaattaaatgatgcagaagatcaaaatgaacgctttgatgcacaggttgcagcaaaagaagcgggcgatgatgaagcgatgtttaaagatgaagactttgttgttgcactagaacacggcttacctccaacagctggggaaggtctaggtatcgaccgtctagcgatgctttatgcaaatgcaccgtcaattcgtgatgtgatcttattccctgcaatgcgtcagaaataa

SEQ ID NO: 30258 - protein, 502 aa, Haemophilus influenzae R2866
MSEQEVKELDLNGEMLVRREKLAALRAKGNAFPNKFRRDALAQDLHNQYDSEDGEILKEKGIEVQVAGRIMTRRAMGKATFITIQDMSGKIQLYVARDNLPEGVYAEDVGNWDLGDIIGVKGTLFKTKTNELTIKTTEVQLLTKALRPLPDKFHGLTDQEVRYRQRYLDLISNEESRRTFIIRSKVVAGIREYFISKGFMEVETPMLQVIPGGASARPFVTHHNALDVDMYLRIAPELYLKRLVVGGFERVFELNRNFRNEGVSVRHNPEFTMLEYYQAYADYHDLMDNTEELLRKLAIDILGTTIVKYGEYEFDFGKPFERITLHDATIKYGADKGIVKEDLYDFDRAKATAERLGIEVQKSWGLGSIVNAIFEEVAEHHLIQPTFLMAHPAEISPLARRNDENPDVTDRFELFIGGREIGNGFSELNDAEDQNERFDAQVAAKEAGDDEAMFKDEDFVVALEHGLPPTAGEGLGIDRLAMLYANAPSIRDVILFPAMRQK

SEQ ID NO: 30259 - DNA, 1476 bp, Exiguobacterium sibiricum 255-15
  CDS (1)..(1476): transl_table=11
atgaacgatcaaatgcaggtgcgtctcggtaagatgaacgccatgcgtgaacaaggactcgatccgtttggtgcccgtttcgaacgtacaacagatacgacgagtattcgtgccgcttacggcgaacatgaaaaagaagaattggcagagctgaagccggacgtctcaatcgcgggtcgcgtcatgacgacacgccgtaaagggaaagttggctttacaaacgtccaggacgtcaatggtcaaatccaactgtatgtacgtaaagacgatgttggcgaagaagcgtacgaaatctataaaacatgtgacttaggtgatatcgtcggaatcagcggttacgtgttcaaaacgaatgtcggggaactgtctgttcacgtcacgtcgtttacattactgacgaaagcattgcgtccgcttccggataaatatcacggattaaaagacgtcgaacaacgctaccgtcagcgttacctggatttgatcacgaatacagaatcacgggaaacatttattgcacgcagtaaagtcattcgcggcattcgtcagtatctcgacagcctcggatacttggaagtcgaaacaccgatgttgcatacgattgcaggtggcgcttcggcacgtccgtttatcacgcatcataacgcactggatatgacgctttacatgcggatcgcgattgagttacatctcaaacgtttgattgtcggtggacttgaaaaagtttacgaaatcggccgcgtcttccggaatgaaggaatctcgacgcgtcataaccctgagtttacaatgattgagttatatgaagcctatgcagactataacgacatcatgaatctgacggaaaacttgattgcccacgtcgctcaagaagtacttggcacaacacaagtcacttacggtgaagatgtgattgatctgtctgtcggatggaaacgggcacacatggcggatctcgttaaagaagcaacgggtgttgatttctttgaagagatttcaaaagaacgtgcacatgaactcgcacatgaacatggcgttgaagtacaagcccatatgacgacaggacatattctcaatgaattcttcgagcagaaaatcgaagagtcgttggttcaaccgacattcgtctatggtcatccggttgaaatttcaccgcttgcgaagaagaatccggaagatcctcgctttacggatcgatttgaattgttcatcgttcgccgggaacatgccaatgcctttacggaattgaacgatccaatcgaccaacgtgaacgtttcgaagcccagcttgtcgaaaaagaagcagggaatgatgaagcgcatgaaatggacaatgatttcattgaagcgcttgagtacggtatgccgccgacaggaggtcttggtatcggaatcgaccgtcttgtcatgttgttgacaaacgctccttcgattcgtgatgtcttgctcttcccgacaatgcgtcaccagcaaaactaa

SEQ ID NO: 30260 - protein, 491 aa, Exiguobacterium sibiricum 255-15
MNDQMQVRLGKMNAMREQGLDPFGARFERTTDTTSIRAAYGEHEKEELAELKPDVSIAGRVMTTRRKGKVGFTNVQDVNGQIQLYVRKDDVGEEAYEIYKTCDLGDIVGISGYVFKTNVGELSVHVTSFTLLTKALRPLPDKYHGLKDVEQRYRQRYLDLITNTESRETFIARSKVIRGIRQYLDSLGYLEVETPMLHTIAGGASARPFITHHNALDMTLYMRIAIELHLKRLIVGGLEKVYEIGRVFRNEGISTRHNPEFTMIELYEAYADYNDIMNLTENLIAHVAQEVLGTTQVTYGEDVIDLSVGWKRAHMADLVKEATGVDFFEEISKERAHELAHEHGVEVQAHMTTGHILNEFFEQKIEESLVQPTFVYGHPVEISPLAKKNPEDPRFTDRFELFIVRREHANAFTELNDPIDQRERFEAQLVEKEAGNDEAHEMDNDFIEALEYGMPPTGGLGIGIDRLVMLLTNAPSIRDVLLFPTMRHQQN

SEQ ID NO: 30261 - DNA, 1545 bp, Prosthecochloris aestuarii DSM 271
  CDS (1)..(1545): transl_table=11
atgacagacgcacaggacacgaatctccatgacagcccgtatagccaggagagcgaacacaaagccctcaatgatcagatgcacagacgccttgaagaacgaaagctgcttgaagaagaaggcgtcagaccatacccctacgggttcgacgtaacgaggcattccagagatatcaaagagaacttccttgaagaaacacctgaaacggtatcagttgccggtcgtatcatggccgtcagaaaaatgggaaaagcctcgtttttcaacattcaggatgcaaagggacgcatacaggtctacatgaaacgcgacgatgtcgggcaggatgcatacaggatattcaaactgcttgatatcggtgatattgtcggcgtcaaagggttcacgttcagaaccaaaaccggtgaaatctcgatccacgccgaagagttcatgcttctgagtaaatcgctcaggcctatacctgtcgccaaagaaaaagaagttgacggccagaaagtcacctatgacgcattcagcgacaaggaactgcgctaccgtcagcgttacgtcgacctgattgtcaatcctgaagtaagaaatacgtttgtcaagcgctccgcgatcgtcaccttcatgcgtaccttcttttctgaaaaaggataccttgaagtcgaaacgcctattctccagccggtctacggtggtgcagcagcacggccgttcacaacacaccataacgcgctggacatggagctctacctcaggatcgccaatgagctgtatctcaagcggcttatcgtaggcggttttgacggtgtctttgaatttgccaaagacttccgcaacgaaggcattgaccgctttcacaatcctgaattcactcaggtagaactctatgtcgcctacaaggattactactggatgatggaactggtcgaacagctcatctaccgggccaaccttgctgtcaacaacagcgagaacacaacgtttctcgacaatgagatctcgctcaagcctccattcacgaggctctcgatcgctgatgccatcatgcagtactgtgaccgcgatatcagcgggaagtctgaatccgaactgagaaacatcgccaaggatctcggactggaactcgacccgaaaatcagcagcggaaaaatcattgatgaaatcttcggtgagttcgttgagccaaagctcatccagccgacattcattatggattatccgacagaaatgtcaccgctggcaaaagaacaccgttcaaaagagggtgtcgtcgagcgatttgagctgatcgtcggaggcaaagagctctgtaattccttctccgaactcaatgatccggtcattcagcgcaacagactcgaagaacaggcaaaactccgtcttcgcggggacgatgaagccatggtggtcgatgaagattttcttcgcgccctcgagtacggcatgccgccgtgcgctggcctcggcatcggcatcgatcgactggtcatgcttctgtgcggcgaagaatcgatcagggatgtcattttctttcctcatctgaaaccggaataa

SEQ ID NO: 30262 - protein, 514 aa, Prosthecochloris aestuarii DSM 271
MTDAQDTNLHDSPYSQESEHKALNDQMHRRLEERKLLEEEGVRPYPYGFDVTRHSRDIKENFLEETPETVSVAGRIMAVRKMGKASFFNIQDAKGRIQVYMKRDDVGQDAYRIFKLLDIGDIVGVKGFTFRTKTGEISIHAEEFMLLSKSLRPIPVAKEKEVDGQKVTYDAFSDKELRYRQRYVDLIVNPEVRNTFVKRSAIVTFMRTFFSEKGYLEVETPILQPVYGGAAARPFTTHHNALDMELYLRIANELYLKRLIVGGFDGVFEFAKDFRNEGIDRFHNPEFTQVELYVAYKDYYWMMELVEQLIYRANLAVNNSENTTFLDNEISLKPPFTRLSIADAIMQYCDRDISGKSESELRNIAKDLGLELDPKISSGKIIDEIFGEFVEPKLIQPTFIMDYPTEMSPLAKEHRSKEGVVERFELIVGGKELCNSFSELNDPVIQRNRLEEQAKLRLRGDDEAMVVDEDFLRALEYGMPPCAGLGIGIDRLVMLLCGEESIRDVIFFPHLKPE

SEQ ID NO: 30263 - DNA, 1491 bp, Streptococcus suis 89/1591
  CDS (1)..(1491): transl_table=11
atgtcaactgaacattttgaagaattaaatgaccaacagattgtccgtcgtgagaaaatgacggctcttgctgaacaaggcattgacccatttggaaaacgttttgagcgttctgccaattcagctgaattgaaggcccagtacgaagataaatcgaaagaagaattagaagaattgggacaaacagcaatcattgcaggtcgtattatgaccaagcgtggtaagggtaaggcaggtttcgcgcacattcaagaccgcgaaggccagattcaaatctacgttcgtaaggatgatgttggcgaagaaaactatgaaatcttcaaaaaagcagaccttggtgactttatcggtgtcgagggagatgtcttcaagacaaacgttggtgagttgtctatccatgctcgcaagttgactcacttgtctaaagcgctccgcccattgccagaaaaattccacggtttgacagacatcgagacccgctaccgcaaacgttatttggacttgattactaaccgcgagagctttgatcgctttgtgacccgctcaaaaattatctcagaaatccgccgttaccttgacggacttggtttcttggaagtggaaacacctgtccttcacaatgaagctggtggtgctgcagctcgtccattcatcacccaccacaatgcccaaaacattgacatggtccttcgtatcgcgacagaactccacctcaaacgcttgattgtcggtggtatggaacgcgtttatgaaatcggacgtatcttccgtaacgagggtatggatgcgactcacaaccctgagttcacgtcaatcgaggtctaccaagcttatgcagattacttggacatcatggacttgaccgaaggtattatacagcacactgccaaggctgttgtcggcgatggtcctgttacttatcaaggcactgaaattgctatccacgagccattcaagcgtatccacatggttgatgccattaaggaacaaactggcgtggacttctggcaagagatgagcttcgaggaagcaaaagcccttgcagctgagcacaaggtccctgtggaaaaacaccatacagaagttggtcaaatcatcaacagcttctttgaagaatacgttgaagcaactcttatccaaccaaccttcgtctatggtcacccagtagccgtatccccactggctaagaaaaacgatgaagacccacgcttcacagatcgcttcgagctcttcatcatgaccaaggaatacggaaatgcctttacagaattgaacgacccaatcgaccaattggaacgcttcgaagcccaagccaaagctaaagaactcggtgacgacgaagcgacaggcgttgactacgactacatcgaagccctcgaatacggtatgccaccaacaggtggacttggaatcggtatcgaccgcctctgcatgctcttaacagacacaacaactattcgggatgtactcctatttccgactatgaagtaa

SEQ ID NO: 30264 - protein, 496 aa, Streptococcus suis 89/1591
MSTEHFEELNDQQIVRREKMTALAEQGIDPFGKRFERSANSAELKAQYEDKSKEELEELGQTAIIAGRIMTKRGKGKAGFAHIQDREGQIQIYVRKDDVGEENYEIFKKADLGDFIGVEGDVFKTNVGELSIHARKLTHLSKALRPLPEKFHGLTDIETRYRKRYLDLITNRESFDRFVTRSKIISEIRRYLDGLGFLEVETPVLHNEAGGAAARPFITHHNAQNIDMVLRIATELHLKRLIVGGMERVYEIGRIFRNEGMDATHNPEFTSIEVYQAYADYLDIMDLTEGIIQHTAKAVVGDGPVTYQGTEIAIHEPFKRIHMVDAIKEQTGVDFWQEMSFEEAKALAAEHKVPVEKHHTEVGQIINSFFEEYVEATLIQPTFVYGHPVAVSPLAKKNDEDPRFTDRFELFIMTKEYGNAFTELNDPIDQLERFEAQAKAKELGDDEATGVDYDYIEALEYGMPPTGGLGIGIDRLCMLLTDTTTIRDVLLFPTMK

SEQ ID NO: 30265 - DNA, 1494 bp, Synechococcus sp. WH 7805
  CDS (1)..(1494): transl_table=11
atggcgccgactgcattctgctccgtgtctgatctgcgtgagacccgccttgagaaggtgtctgccctgcgcgaccagggccgggagccctacgccctcacctttgaccccaccgaccggatggctcggctgcagaccgatcatgccgatttgcccaagggagaggagaaggattgcgctgtggctgttgccggtcgggtgatgacccggagggtgatgggcaagcttgctttcttcacccttgccgacgaaaccggcacgatccagctgtttctggagaaggcggcgctcggtgaggcctttgctcagatcacgtctcttgtcgacgccggcgatctgatcggcgtgcgtggcacgttgcgccgcaccgacaggggggagttgtcggtgaaggtggcggagtggaccatgctcaccaagtccctgcagcccctgccggataagtggcatggtctggcggacgtggagaagcgttaccgccagcgctatctggatttgatcgtcacgccccagtcgcgtgagaccttccgtcgccgggcgttgaccgtgagtgcgatccggcgctggctcgacgagcgcgagttcctggagattgaaacgcccgtgttgcaggcggaggcgggtggagctgatgcgcgcccgttcatcacccaccacaacacactggatctgccgctttacctgcgcatcgccaccgagttgcatctgaagcgcttggtggtgggcggttttgagcgggtgtacgagctgggtcgtatcttccgcaacgaggggatgagcacccgccacaaccctgagttcacctcggtggaggtgtatcaggcttataccgattacctgggaatgatcgacctcaccgagtcgatgattgcgtcgatttgccagcaggtttgtggcagcacgcggctcgcctatcaaggcacggagatcgatctcaccccgccctggcgccgggcgacgatgcatgagttggtggaagaggccacaggcctcgacttcacgaccttctccgatcgtgaggcggcggctgaggccatggcggccaaggggcttcccgttccagagaaggccgattccgtaggtcgtctgctcaatgaagcgtttgagcatgccgtggaagccaacctgacccagcccacgttcgtgctcgattatcccgaggagatttcacctctggcccgcaaacaccgcagcaagcccggcctggtggagcgtttcgagttgttcattgttggacgggagacggccaatgctttcagcgagttgattgatccggtcgaccagcgcgggcgcctggaggctcagcaggcccgccgggcggccggcgatgaggaagcccagggggtggatgaggactttctgcaggcgctggaagtgggcatgcctcccacaggaggccttggcatcggcatcgatcgcctggtgatgcttctcactgacagtccctccatccgtgatgtgatcgccttcccgctgctgcgtccggaggggtga

SEQ ID NO: 30266 - protein, 497 aa, Synechococcus sp. WH 7805
MAPTAFCSVSDLRETRLEKVSALRDQGREPYALTFDPTDRMARLQTDHADLPKGEEKDCAVAVAGRVMTRRVMGKLAFFTLADETGTIQLFLEKAALGEAFAQITSLVDAGDLIGVRGTLRRTDRGELSVKVAEWTMLTKSLQPLPDKWHGLADVEKRYRQRYLDLIVTPQSRETFRRRALTVSAIRRWLDEREFLEIETPVLQAEAGGADARPFITHHNTLDLPLYLRIATELHLKRLVVGGFERVYELGRIFRNEGMSTRHNPEFTSVEVYQAYTDYLGMIDLTESMIASICQQVCGSTRLAYQGTEIDLTPPWRRATMHELVEEATGLDFTTFSDREAAAEAMAAKGLPVPEKADSVGRLLNEAFEHAVEANLTQPTFVLDYPEEISPLARKHRSKPGLVERFELFIVGRETANAFSELIDPVDQRGRLEAQQARRAAGDEEAQGVDEDFLQALEVGMPPTGGLGIGIDRLVMLLTDSPSIRDVIAFPLLRPEG

SEQ ID NO: 30267 - DNA, 1536 bp, Pseudoalteromonas tunicata D2
  CDS (1)..(1536): transl_table=11
atgactgatcaaatccaagacgaaaataagttaattgctgagcgtcgtgccaagttagatgcaattcgcgccaactgcccggccaatggtcatccaaataccttccgccgtgaagattacacagcagatttagaagctaagtttggtgataaatcgaaagaggaattaacagagcttcaccacgaagtggccattgctggtcgtattttagcaaaacgtggcccgttctttttattgcaagatatgaaaggccgcattcaagcgtacgcttcaaaagacgcacagcaagaccttaaagcaaaatatggccaactagacattggtgacattatctctgttaaaggcccgttaaataaatcaggtaaaggcgatttgtatgttgatatggttgaatatcaactattaactaaatcattacgcccattaccagaaaaattccatggtttatcagaccaagaaacgaaatatcgtcagcgttatgttgatttaatcacgaatatggatacccgtgagacgttccgtattcgttctaaagtgattgatggcattcgtcgtttcttagttgaccgtgacttcatggaagtagaaacgccgatgttgcatatcatcccaggtggcgcatcagctcgtccgtttgtgactcatcacaatgcccttgatatcgatatgtatttacgtattgcacctgagctttatttaaagcgtttggttgtaggtggttttgagcgtgtatttgaaattaaccgtaacttccgtaacgaagggttatcaacacgtcacaatcctgaattcactatgattgagttctaccaagcgtatgcagattacatcgatatgatgaatctaacagaagacatgctgcgtactgtggcacaagatgtacttggtacaacgttaattgtaaacacagttaaaaatgcagacggcgaagtgacggacaccattgagtatgactttggtcaaccgtttacgcgtttatcgatgtcagatgcgattttaaaatacaacccagactttaagcctgaagtatttaaagatcctgaaaaccattttgaagagttaaaagcatacgcgaagcagcttcatgtgaaaattcctgaaaactgtgtttggggtcctggcaagtttttatgtgaaatctttgaagaaacggcagagcataaactaatacaacctacatttattaccgaatacccgtgggaagtatcaccattagctcgtcgtaacgacgaaaatggattcattaccgatcgttttgagttttttgttggtggtcgtgagctggcaaatggtttctctgagcttaatgatgcacaagatcaagctgagcgtttctctcgtcaagtagaagagaaagatgcgggtgatgatgaagcaatgcattatgacgaagattatatccgcgcacttgagtttggtttaccaccaacagcaggtgagggaattggtattgaccgtttagtgatgttattcactaattcatcaacaattaaagatgttcttttgttcccacacatgcgtccagaagctgaataa

SEQ ID NO: 30268 - protein, 511 aa, Pseudoalteromonas tunicata D2
MTDQIQDENKLIAERRAKLDAIRANCPANGHPNTFRREDYTADLEAKFGDKSKEELTELHHEVAIAGRILAKRGPFFLLQDMKGRIQAYASKDAQQDLKAKYGQLDIGDIISVKGPLNKSGKGDLYVDMVEYQLLTKSLRPLPEKFHGLSDQETKYRQRYVDLITNMDTRETFRIRSKVIDGIRRFLVDRDFMEVETPMLHIIPGGASARPFVTHHNALDIDMYLRIAPELYLKRLVVGGFERVFEINRNFRNEGLSTRHNPEFTMIEFYQAYADYIDMMNLTEDMLRTVAQDVLGTTLIVNTVKNADGEVTDTIEYDFGQPFTRLSMSDAILKYNPDFKPEVFKDPENHFEELKAYAKQLHVKIPENCVWGPGKFLCEIFEETAEHKLIQPTFITEYPWEVSPLARRNDENGFITDRFEFFVGGRELANGFSELNDAQDQAERFSRQVEEKDAGDDEAMHYDEDYIRALEFGLPPTAGEGIGIDRLVMLFTNSSTIKDVLLFPHMRPEAE

SEQ ID NO: 30269 - DNA, 1506 bp, Photobacterium sp. SKA34
  CDS (1)..(1506): transl_table=11
atgactgatcaattacaagatgagaataagctgattgccgagcgtcgcgctaaattagatatgatccgcgaaaactgcaaagcaaatggccacccaaatgatttccgtcgcgatagcttagcggcagatctaaatgcaaaatacggcgaaatgaccaaagaagagcttgaagaagcgggtcatgtatttgcaatcgcgggccgtattatggctaagcgtggtcctttcttagctattcaagatgtatctggtcgtattcaggcttacgcatcaaaagatgtgcagaaagagctaaaagagaagtattcaggcttagatatcggtgacattatcggtatcaaaggtacgcttcataagtcaggtaaaggtgatctttacgtgaatatggatgagtacgagctgctaactaaagcactgcgtcctttacctgaaaaatttcatggcttaactgatcaagaaatgcgttaccgtcagcgttacgttgatcttatcgttaacgacgactcacgtcatgcatttgtggttcgttcaaaagtggtatctgcgatccgtagcttcatggtaacgaaaggcttcatggaagttgaaacaccaatgatgcatgtgatccctggtggtgcaacagcacgtccatttatcacacaccataacgcactagatatcgatatgtacctacgcgttgcaccagagctttaccttaagcgtctagtagttggtggttttgagcgtgtattcgaaattaaccgtaacttccgtaacgaaggtctatctcctcgtcataaccctgaattcacaatgatggaattctacatggcgtacgcagattacaacgatctgatggatctgaccgaagaaatgcttagcagcatcgcgattgatgttcttgggtcttctaaaatgccatacggtgagtttgaagttgaatttgcaggcccatacacacgtatgagcatgctagatgcaatcaagcagtacaacccagagcacgaagaaatccaagcattaacttacgaaggcgttgctgatcgtgagctaatggtgaagattgctaaatctgtacacgttgatgttgaagatttctggacttgtggtcagctgttagaagagatcttcggtgaaaccgctgaacctcaattaatgcaaccaaccttcattactgagtacccagcagatatttctccacttgctcgtcgtaacgatgaaaacccattcattacagaccgttttgaattcttcatcggcggtcgtgaagttgcgaatggtttctctgagcttaatgatgcacaagatcaagaccaacgctttaaagcacaggttgatgctaaagatgcgggtgatgatgaagcaatgtactacgatgcagattacattactgcactagagcatggcttaccaccaacagcgggtcaaggtattggtatcgatcgcctagtgatgttatttaccaatacacatactattcgtgacgtgattctattcccagcgatgcgccctcaaagcaactaa

SEQ ID NO: 30270 - protein, 501 aa, Photobacterium sp. SKA34
MTDQLQDENKLIAERRAKLDMIRENCKANGHPNDFRRDSLAADLNAKYGEMTKEELEEAGHVFAIAGRIMAKRGPFLAIQDVSGRIQAYASKDVQKELKEKYSGLDIGDIIGIKGTLHKSGKGDLYVNMDEYELLTKALRPLPEKFHGLTDQEMRYRQRYVDLIVNDDSRHAFVVRSKVVSAIRSFMVTKGFMEVETPMMHVIPGGATARPFITHHNALDIDMYLRVAPELYLKRLVVGGFERVFEINRNFRNEGLSPRHNPEFTMMEFYMAYADYNDLMDLTEEMLSSIAIDVLGSSKMPYGEFEVEFAGPYTRMSMLDAIKQYNPEHEEIQALTYEGVADRELMVKIAKSVHVDVEDFWTCGQLLEEIFGETAEPQLMQPTFITEYPADISPLARRNDENPFITDRFEFFIGGREVANGFSELNDAQDQDQRFKAQVDAKDAGDDEAMYYDADYITALEHGLPPTAGQGIGIDRLVMLFTNTHTIRDVILFPAMRPQSN

SEQ ID NO: 30271 - DNA, 1503 bp, Oceanospirillum sp. MED92
  CDS (1)..(1503): transl_table=11
atgtctgataacactcagaagcaagatgaaaaccgcctgattgcagagcgccgtgagaaacttaacggccttcgcgaagagggtaatgctttcccaaataccttccgtcgtgacagctatgcgcaggatctgcaagagaagtacggcgataaatcgaaggaagagctggctgaagcaggcatcaaagtcagcattgctggccgtgttatgctgaaccgtggcgctttcggcgttattcaggatatgacaggccgtattcagttctatgtgaataaagaagcgcgtaagtttgcgaaaagtctggatctgggtgacatcattggtgtgaccggtgagcttcacaaatcaggtaaaggtgatctttacgttgatttgggcgaataccagttgctgacgaaaaacctgcgtcctctgccagacaagcataaaggtttgcaggacactgagatccgctatcgtcagcgttacgttgatctgattactaacgaagattcccgcaaagtctttgaaatgcgttcaaagatcgtttccggtatccgtaactatctgactgagcgtcgctttattgaagctgagacacctatgctgcaggtgattccaggtggtgcgactgcacgtccgtttatcacgcatcacaacgcgctggatcgtgatatgtatctgcgtattgcgccagaactgtatctgaagcgtttggttgtgggtggctttgagcgtgttttcgaaatcaaccgtaacttccgtaacgaagggctttcaacacgccacaatccagaattcacaatgatcgaattctaccaggcgtatgcggattaccgtgatctgatggacctgacggaagatatgctacgtacggttgctcaggatgtgctgggtacaacgacgattgttaatacagtacgtaatgacgaaggtgaagtgctggaaacatttgagtatgacctggaaaaacctttccgtcgtatcagtgttttcgattctattttgcactacaacgaagatatcactgctgaagcgctggcagatgaaactgctgctcgccagattgcgcagcgtatggatatcgatgtaaaagatagttggggcctgggtaaggttcagattgaaatcttcgagaaaacagtagagcatcgtctggatcagcctacctttattactgagtatccggcggaagtttctccactggcgcgccgtaatgatgagaacccattcattacggatcgttttgaattcttcgtaggcggccgtgagctggcaaatggtttctccgaattgaatgattcagaagaccaggctgagcgtttccagcagcaggttgctgagaaagatgcgggtgatgatgaagcgatgcactacgatgccgattacatcaacgcactggaatatggcttgccaccaacagcgggtgagggtatcggtattgaccgtctggtcatgctattcactgattcgccgtctatcagagacgtaatcctgttccctgcgatgcgccctcgcggctaa

SEQ ID NO: 30272 - protein, 500 aa, Oceanospirillum sp. MED92
MSDNTQKQDENRLIAERREKLNGLREEGNAFPNTFRRDSYAQDLQEKYGDKSKEELAEAGIKVSIAGRVMLNRGAFGVIQDMTGRIQFYVNKEARKFAKSLDLGDIIGVTGELHKSGKGDLYVDLGEYQLLTKNLRPLPDKHKGLQDTEIRYRQRYVDLITNEDSRKVFEMRSKIVSGIRNYLTERRFIEAETPMLQVIPGGATARPFITHHNALDRDMYLRIAPELYLKRLVVGGFERVFEINRNFRNEGLSTRHNPEFTMIEFYQAYADYRDLMDLTEDMLRTVAQDVLGTTTIVNTVRNDEGEVLETFEYDLEKPFRRISVFDSILHYNEDITAEALADETAARQIAQRMDIDVKDSWGLGKVQIEIFEKTVEHRLDQPTFITEYPAEVSPLARRNDENPFITDRFEFFVGGRELANGFSELNDSEDQAERFQQQVAEKDAGDDEAMHYDADYINALEYGLPPTAGEGIGIDRLVMLFTDSPSIRDVILFPAMRPRG

SEQ ID NO: 30273 - DNA, 1530 bp, Rickettsiella grylli
  CDS (1)..(1530): transl_table=11
atgagtttggaaaaaattactatgagtcaagaaaaaataacgaccgtgaataatgcggacgatctattttcacaacgtttggagaagctaaacgacttgcggcaatgttcagacgcttatcctaattcttttcggcgcaatcatttaaccgctgatttgcatcatcgctttgagcaagtagacagtgaccgcttacaacaaaaaaattgttctgtccgagtggcaggtcggattatgttaaaacgagacatgggaaaaagtttattctttgatattcaagatatgtcagggaaaatgcaaatctatgttaaacaagatacagtcggtgtagaacattatgaaatgataaaacgtttagatttaggtgatattgttgggattgtgggtgttttatttcggactaaaacgaatcaactttctgtgaaagcagaaaaagttgatttattaagtaaagcgttacgtcctttacccgataaatttcatggtctttctgaatcggataaagagcaacgttaccgacatcgttatttagatttaatgaccaacgaaaaaacgcgaaaaacgtttcaaatccgatcacagcttattcaagaaattcggcaatttttaaatcgtcgtggattccttgaagttgaaacacccatgatgcatgtgttaccgggtggtgccttagcgcgaccttttattacccaccataatgcattaaatatgccattatttttacgtgtggcaccggagttacatctaaaacggcttgtcgttggtggcatggaaaaggtttttgaaattaaccgaagttttcgtaacgaaggcctttcgacacgacataatcctgaattcaccatgttagaattttatcaggcttattcggattatcatgatttaatggatttaacagaacaattaattcgtgaattagcaaaaactattttaacgactgaacaattgacctatcaaggtgaaatctatgatttgtctaaaccttttaagcgtttaacaatgattgatgctttacttgaatataatccggaatggcaattaaacgatgttactgaatttgctcgtttaaaaaaaattgctgcggatttagaaattcagccaaaagaatctattggacaactccaattcgcagtatttgaagagactgtcgaagaaaaattaaaacaacctacctttattacccaataccccattgttgtatcgccgttggcgagacgtaatagtgaaaatccggattttgccgatcgttttgaactttatattggagggcgcgagttagccaatgggttttccgaactaaatgacccagaagatcaaagagcgcgtttcaagcaacaattattagcgaaatcaaaaggtgattcagaagcgatgccctatgatgaagagtatattcaagcgctagaatatggtttgccccccacagcgggtgaaggaatgggtattgatcgtttaaccatgttatttacggattcagtatcaattcgcgatgttattttatttccattgatgcggccagagtcagattaa

SEQ ID NO: 30274 - protein, 509 aa, Rickettsiella grylli
MSLEKITMSQEKITTVNNADDLFSQRLEKLNDLRQCSDAYPNSFRRNHLTADLHHRFEQVDSDRLQQKNCSVRVAGRIMLKRDMGKSLFFDIQDMSGKMQIYVKQDTVGVEHYEMIKRLDLGDIVGIVGVLFRTKTNQLSVKAEKVDLLSKALRPLPDKFHGLSESDKEQRYRHRYLDLMTNEKTRKTFQIRSQLIQEIRQFLNRRGFLEVETPMMHVLPGGALARPFITHHNALNMPLFLRVAPELHLKRLVVGGMEKVFEINRSFRNEGLSTRHNPEFTMLEFYQAYSDYHDLMDLTEQLIRELAKTILTTEQLTYQGEIYDLSKPFKRLTMIDALLEYNPEWQLNDVTEFARLKKIAADLEIQPKESIGQLQFAVFEETVEEKLKQPTFITQYPIVVSPLARRNSENPDFADRFELYIGGRELANGFSELNDPEDQRARFKQQLLAKSKGDSEAMPYDEEYIQALEYGLPPTAGEGMGIDRLTMLFTDSVSIRDVILFPLMRPESD

SEQ ID NO: 30275 - DNA, 1542 bp, Oceanobacter sp. RED65
  CDS (1)..(1542): transl_table=11
atggcagatcaacaacaggacgaaaacaaactgattgcggagcgccgcgagaaactttctgctttgcgtgacggctgtaaagccaatggtcaccgcaacgactttgaccgtaaagatttagctgctgaccttcaggctaaatttggcgaattcagtaaggaagaattagaagcgcaggacaatcaggttgctgttgcgggtcgcatcatgttccaacgtggcccatttactaaaatcaatgacgcttctggcggtattcagttttacgtccctaaagatgtgcaaaaagaaattaactacaagtctaaatttgatttaggtgacatcgtaggtgcacgcggcgctttacataagtcaggtaaaggcgaactttatgttaatgtggcgactgcagacgacttgatcatgttaaccaaatcactgcgtccattgcctgataagttccatggtttagcggatcaagaaattaaatatcgtcagcgctatgtggatttaattatcaaccaagaaacccgtgatttgttcatggtgcgttctaaaattattgaagccatgcgcaaatacctaagcgatcgcaactttatggaagtggaaacgcccatgctacaagcgattcctggtggtgccacagcaaaaccatttgaaacacaccacaatgcgctgggtattgatatgtacttacgtatcgcgccagagttgtatttgaagcgcttgctagtaggcggcttcgaacgtgttttcgaaattaaccgtaacttccgtaacgaaggtttgtctactcgacataacccagagttcaccatgattgaattctaccaagcgtatgcgacgtatcatgatttgatggacactacagaagatatgctgcgtaacatcgcgcaagacgtgctgggtacgaccgacattgtatcaacggaaaaagacgctgaaggcaatgtggtcaacgaaaccgtatacgattttgctaagccgtttgcgcgcctcactatgatggaagcggtattgaaatataaccctgacttcgatgaagctgtgattaacgacccagaaaataacttggataaactaattgcatacggtcgccaagtaggtatcagagaagatgctaagcaaagtgcttggggtgccggtaagtggttatgtgagatttttgaggagaccgcagagcacaaacttgatcagccaacctttattacggcttatccatgggaagtttcgccgcttgcccgtcgtaatgatgaaaacccattcataactgatcgcttcgaattctttgttggaggtcgcgagttggctaatggcttctcagagcttaacgacgccgaagatcaagcagagcgtttccgtaagcaagtggaagaaaaagatgccggtgatgatgaagccatgcactatgatgcggattacgtgcaggcacttgagtacggcatgccacctgccgctggtgaaggcattggtatcgaccgtttggtgatgctatttaccgatagcccaaccattaaggacgtgattttgttcccacacatgcgtcctcgtggatga

SEQ ID NO: 30276 - protein, 513 aa, Oceanobacter sp. RED65
MADQQQDENKLIAERREKLSALRDGCKANGHRNDFDRKDLAADLQAKFGEFSKEELEAQDNQVAVAGRIMFQRGPFTKINDASGGIQFYVPKDVQKEINYKSKFDLGDIVGARGALHKSGKGELYVNVATADDLIMLTKSLRPLPDKFHGLADQEIKYRQRYVDLIINQETRDLFMVRSKIIEAMRKYLSDRNFMEVETPMLQAIPGGATAKPFETHHNALGIDMYLRIAPELYLKRLLVGGFERVFEINRNFRNEGLSTRHNPEFTMIEFYQAYATYHDLMDTTEDMLRNIAQDVLGTTDIVSTEKDAEGNVVNETVYDFAKPFARLTMMEAVLKYNPDFDEAVINDPENNLDKLIAYGRQVGIREDAKQSAWGAGKWLCEIFEETAEHKLDQPTFITAYPWEVSPLARRNDENPFITDRFEFFVGGRELANGFSELNDAEDQAERFRKQVEEKDAGDDEAMHYDADYVQALEYGMPPAAGEGIGIDRLVMLFTDSPTIKDVILFPHMRPRG

SEQ ID NO: 30277 - DNA, 1518 bp, Vibrio sp. Ex25
  CDS (1)..(1518): transl_table=11
atgactgatgctgttcaaaacgaaactgtactagaagaaaataagctgattgctgaacgccgcgctaaactggatgaaatccgaaagagctgcaaagcaaacggccacccaaacgacttccgtcgtgacgcactagcgggcgaccttcaaaaagagttcggtgaaaagacgaaggaagagctagaagagcttaaccacgtggttgcaattgctggccgtattatggctaagcgtggtccattcctagtaattcaagaaacatctggccgtatccaagcttacgctgctaaagacgtacaaaaagagctaaaagagaaataccaaggtcttgatatcggtgacatcatcggtgttaaaggtgcgctgcacaaatctggtaagggtgacctatacgtgaacatggaagaatacgagttgctaactaaagcacttcgtccacttcctgagaaattccacggtcttactgaccaagaaatgcgttaccgtcagcgttacgttgatctgattgtgaacgaagattcacgtaaagcatttattgtacgttctaaagtaatgtctgcaattcgtaacttcatgatctcaaaacagttcatggaagtagaaacgccgatgatgcacgtgatccctggtggtgcaagtgcacgcccattcatcacgcatcacaacgcgctagacatgccaatgtacctacgtattgcacctgagctatacctgaagcgtctagtggttggtggcttcgatcgcgtattcgaaattaaccgtaacttccgtaacgaaggtctttctccacgtcataacccagaattcactatgatggaattctacatggcgtacgcggattacaaagatctgatggactttactgaagaactactaagctcggtagcgcaagaagttctaggttcaacatcaatgccttacggtgatgaaacggttgaatttggtggcacttacactcgtatgagcatgtttgaagcaatcaagcagtacaacccagatcacgcgcaaatccaagcgctaaccgaagaagatctacaaaaccgtgaactgatggtttctatcgcgaaatcagtacatgttgaagtagaagacttctggacatgtggtcagcttctagaagaaatcttcggtgaaacagcagaacctaagctaatgcagccaacgttcatcactggctacccagcggacatctctccattggctcgccgtagcgatgacaacccgttctttacagaccgctttgaattcttcatcggcggccgtgaagtggcgaatggcttctcagagcttaacgatgcagaagatcaagacgcgcgctttaaagcacaggttgaagctaaagagtctggtgatgacgaagctatgttctacgatgcagattacatcactgcactagagcacggcctaccaccaacggcaggccaaggtatcggtatcgaccgtctggttatgctactgactaacacgcacactatccgtgacgtgatcttattcccagcaatgcgcccacaagcgtaa

SEQ ID NO: 30278 - protein, 505 aa, Vibrio sp. Ex25
MTDAVQNETVLEENKLIAERRAKLDEIRKSCKANGHPNDFRRDALAGDLQKEFGEKTKEELEELNHVVAIAGRIMAKRGPFLVIQETSGRIQAYAAKDVQKELKEKYQGLDIGDIIGVKGALHKSGKGDLYVNMEEYELLTKALRPLPEKFHGLTDQEMRYRQRYVDLIVNEDSRKAFIVRSKVMSAIRNFMISKQFMEVETPMMHVIPGGASARPFITHHNALDMPMYLRIAPELYLKRLVVGGFDRVFEINRNFRNEGLSPRHNPEFTMMEFYMAYADYKDLMDFTEELLSSVAQEVLGSTSMPYGDETVEFGGTYTRMSMFEAIKQYNPDHAQIQALTEEDLQNRELMVSIAKSVHVEVEDFWTCGQLLEEIFGETAEPKLMQPTFITGYPADISPLARRSDDNPFFTDRFEFFIGGREVANGFSELNDAEDQDARFKAQVEAKESGDDEAMFYDADYITALEHGLPPTAGQGIGIDRLVMLLTNTHTIRDVILFPAMRPQA

SEQ ID NO: 30279 - DNA, 1536 bp, Alteromonadales bacterium TW-7
  CDS (1)..(1536): transl_table=11
atgactgataaaatccaagacgaaaacaagttaatcgctgagcgtcgcggcaagttagatgctattcgcgaaaattgcccagccaacggtcatccaaaccaattccgtcgtgaacattacacggctgatttgcaagctgagtttggtgataaaacaaaagaagaattaattgagctacagcacgtagtatcaattgctggtcgtattcttgccaagcgtggtccatttatgtctattcaagacatgaaaggccgtgtacaagtttacgcatcaaaagacgtacaaaaagacttaaaagcaaaatatggtcagcttgatattggcgatattattggtgttaaaggtccacttaataaatcaggcaaaggcgatttatacgtagatatggccgagtacgaattacttactaagtcactacgcccattaccagaaaaatttcatggcctttcagaccaagaaacaaaataccgccaacgttatgttgatttaattactaacgaagcaacgcgcgaaacgttccgtattcgttcacaagtagttgaaggcattcgtcgtttcttagcagatcgtgactttatggaagtagaaacgccaatgctgcaggttattcctggcggtgcgtctgcgcgtccatttgtgactcatcataacgcgcttgatatcgacatgtatttacgtattgcgccagagctttacttaaagcgtttagtggtaggtggttttgaccgcgtatttgaaattaaccgtaacttccgtaacgaagggttatcaacgcgtcacaacccagaattcactatgattgagttctaccaagcatacgccgattacatcgatctgatgaacattaccgaagacatgctacgtacagttgcaacaaacgttttaggcagcccaattgttgttaatacaacgaaagatgaaaacggcgaagtgatcgactcagtagagtacgactttggtaagccgtttgagcgcctaagcatggctgatgctatattaaaatataaccctgagtttgacgctgcggtatttaatgatccagaaaaccactttgaagaattaaaagcgtacgcgaaacaagtgcacgttaaaattcctgaaaactgtgtttgggggccaggcaagtttttatgtgaaatatttgaagaaacggctgagcacatgcttatccaacctacatttattacaggttacccatgggaagtgtcgccacttgcacgtcgtaacgacgacaatgcatttgttaccgaccgctttgaattttttgttggcggacgtgagcttgcaaatggtttctcggagcttaacgatgcacaagaccaagcagaacgctttactcgccaagttgaagaaaaagacgcaggcgatgatgaggcaatgcattacgatgaagattacatacgcgcactagagtacggtttaccgcctactgctggtgagggtattggtattgaccgattagtaatgttatttactgactcatctacaattaaagatgttattttattcccgcatatgcgtccgcaagctgactaa

SEQ ID NO: 30280 - protein, 511 aa, Alteromonadales bacterium TW-7
MTDKIQDENKLIAERRGKLDAIRENCPANGHPNQFRREHYTADLQAEFGDKTKEELIELQHVVSIAGRILAKRGPFMSIQDMKGRVQVYASKDVQKDLKAKYGQLDIGDIIGVKGPLNKSGKGDLYVDMAEYELLTKSLRPLPEKFHGLSDQETKYRQRYVDLITNEATRETFRIRSQVVEGIRRFLADRDFMEVETPMLQVIPGGASARPFVTHHNALDIDMYLRIAPELYLKRLVVGGFDRVFEINRNFRNEGLSTRHNPEFTMIEFYQAYADYIDLMNITEDMLRTVATNVLGSPIVVNTTKDENGEVIDSVEYDFGKPFERLSMADAILKYNPEFDAAVFNDPENHFEELKAYAKQVHVKIPENCVWGPGKFLCEIFEETAEHMLIQPTFITGYPWEVSPLARRNDDNAFVTDRFEFFVGGRELANGFSELNDAQDQAERFTRQVEEKDAGDDEAMHYDEDYIRALEYGLPPTAGEGIGIDRLVMLFTDSSTIKDVILFPHMRPQAD

SEQ ID NO: 30281 - DNA, 1512 bp, marine gamma proteobacterium HTCC2143
  CDS (1)..(1512): transl_table=11
atgactgaaacacaagacactgagaataagctaatagcagagcgtcgggccaaattaacccagatacgggagcagcgcaatgcattcccgaacagtttccggcgcaatgcatacgcacaagatttacacaacgagctgggcgagaacggtaaggatgagctagaacagctggatcgaagagcggcagtcgcaggacgtattatggctaaacgcggtccgttcttggtgttgcaggatatgtcaggtcgtattcaagcctatgtggataaaaagaagctcccagaacagcaactgccagaaattaaaacatgggatattggtgatattattggctgtgaaggccctgttcacaagtcgggtaagggtgatctttatgtctacatggactcggtggaattgctgaccaaatctttgcgaccactgcctgataaatttcacggcttacaagatcaggaaatgcgttaccggcagcgatatgttgacctgattgtcagtgacgaatccagggacgtttttaaactccgctccaagatgatcagctttatgcgccgttatcttgataatgctgactttatggaagtagaaacgccgatgatgcaagtgattccaggtggtgccacagcgcgcccatttgtcactcatcataattcgttagatatggacatgtacctgcgggttgcaccagaactgtatttaaaacgcttagttgttggtggttttgagcgagtttacgaaatcaatcgaaactttcgtaatgagggcctatcgacacgccataacccggaatttacgatgctcgaattctatcagtcttacgccgactacaaggagttgatggatttaaccgaagacatgcttcgggagatggctaaagcgttactaggtaccacgatactgttaaatacagttaaaaacgaagatggggagattgtccaagagaagcattatgacctgtctcaacccttcactcgtatcagtgtttttgattcaattttacactttaatccggatatttcggcggaagcattggctgacgaacaggcagctcgccagatcgccgagcacttggatatccccttaaaagacgggtacggtttaggaaaagtacacattgaaatatttgagaaaacagtagagcatcgtttggatcagcctacatttatcactgagtatccaactgaagtttcgcctttagcgcgtcgtaatgatagcaacccaatggttactgaccggtttgagttttttgtcggtgggcgtgaaattgccaatggattttccgaattaaatgacgctgaggatcaagctgaacgttttcttgcacaagtgaaagaaaaggcggcgggggatgacgaggccatgcactacgatgccgactacgtagccgcactggaatatggattgccgcctactgctggggagggcattggtatcgatcgcttggtgatgttgtttagtgattcaccgtcaatccgcgatgtcttgctgttccctcatatgcgaccacagaactaa

SEQ ID NO: 30282 - protein, 503 aa, marine gamma proteobacterium HTCC2143
MTETQDTENKLIAERRAKLTQIREQRNAFPNSFRRNAYAQDLHNELGENGKDELEQLDRRAAVAGRIMAKRGPFLVLQDMSGRIQAYVDKKKLPEQQLPEIKTWDIGDIIGCEGPVHKSGKGDLYVYMDSVELLTKSLRPLPDKFHGLQDQEMRYRQRYVDLIVSDESRDVFKLRSKMISFMRRYLDNADFMEVETPMMQVIPGGATARPFVTHHNSLDMDMYLRVAPELYLKRLVVGGFERVYEINRNFRNEGLSTRHNPEFTMLEFYQSYADYKELMDLTEDMLREMAKALLGTTILLNTVKNEDGEIVQEKHYDLSQPFTRISVFDSILHFNPDISAEALADEQAARQIAEHLDIPLKDGYGLGKVHIEIFEKTVEHRLDQPTFITEYPTEVSPLARRNDSNPMVTDRFEFFVGGREIANGFSELNDAEDQAERFLAQVKEKAAGDDEAMHYDADYVAALEYGLPPTAGEGIGIDRLVMLFSDSPSIRDVLLFPHMRPQN

SEQ ID NO: 30283 - DNA, 1512 bp, marine gamma proteobacterium HTCC2080
  CDS (1)..(1512): transl_table=11
atgagtgactcggaattaaccgaagcagggggggtagaccccgcagaggaaaataagttgatcgctgagcggcgatcgaagctggcatcgttacgtgaggccggcgtacagccgttccccaacgattttcggcgcacggcggaagcagaggcgctgcagcaagactttgaagcgataagcaaggaagatcttgaagaaaagcacgaggtcttcgctgtagccggacgcctgattcgtaatcgaggggcattcctcctcattcaggacggcacctcgactattcagctgtacatcaatcgaaaagtgttagacgccaccaccctagaggccataaaaacttgggatttgggtgacatcgtcgctgcatcaggccccattaatcgcagtggtaaaggtgatctctatatcaatatggagagtgcgcgtctgttgaccaaggcgctgcgccctttgcctgacaaatatcatggcttgtcagatcaagaaatgcgctaccggcagcgttatgtcgatctcatcgtaaacccagatagccgggctgtgtttcggatgcgctcggcggctgtgagcttcattcgtcgttttctcgatgaccggggctttatggaggtagaaactccgatgcttcaccctataccgggtggtgcagccgccaagccctttgagacccatcacaacgcccttgatatgcctatgtacctgcgtattgcgccagagctttatttgaagcgcttgaccgttggcggattcgaaaaggtctatgagataaaccgcaattttcgtaatgaaggattatcgacgcggcacaatcctgagttcacgatgctcgagttttattgggcttatgccgattacaacgatgccatggatctcaccgaggcgttgttgcgtgagttaactcaaaaccttttgggtacgatgacagtaccttacggcgagttgcagcttgatttttcccagcccttcgcacgattgtcggtgttagacgcaatttataagtacaacccagatattacaccggagcaaatcgcttcccgagaggcggctgctgcggtagctcacgaactagggatcgaagtaaagccgagctggggcttgggtaaaatacaaatcgaaatatttgaggctacggcggagcaccgcttggaacagcccacctttatcacagcttatccaaccgaagtgtcgccactggcgcggcgtaatgacgacaaccccttcatcacagatcgctttgagttttttgttggtggccgcgagattgccaatggttttagcgagcttaatgacccagaagatcaagccgagcgcttcagagctcaggccgcggaaaaagacagtggcgatgaggaggccatgcattttgatcacgattacgtgcgtgccttagagtacggcatgccacctacggccggggagggtatcggtatcgaccgattggtgatgcttctcactgacgcagcctctattcgcgacgtattactcttccctcacatgcgaccagaagattag

SEQ ID NO: 30284 - protein, 503 aa, marine gamma proteobacterium HTCC2080
MSDSELTEAGGVDPAEENKLIAERRSKLASLREAGVQPFPNDFRRTAEAEALQQDFEAISKEDLEEKHEVFAVAGRLIRNRGAFLLIQDGTSTIQLYINRKVLDATTLEAIKTWDLGDIVAASGPINRSGKGDLYINMESARLLTKALRPLPDKYHGLSDQEMRYRQRYVDLIVNPDSRAVFRMRSAAVSFIRRFLDDRGFMEVETPMLHPIPGGAAAKPFETHHNALDMPMYLRIAPELYLKRLTVGGFEKVYEINRNFRNEGLSTRHNPEFTMLEFYWAYADYNDAMDLTEALLRELTQNLLGTMTVPYGELQLDFSQPFARLSVLDAIYKYNPDITPEQIASREAAAAVAHELGIEVKPSWGLGKIQIEIFEATAEHRLEQPTFITAYPTEVSPLARRNDDNPFITDRFEFFVGGREIANGFSELNDPEDQAERFRAQAAEKDSGDEEAMHFDHDYVRALEYGMPPTAGEGIGIDRLVMLLTDAASIRDVLLFPHMRPED

SEQ ID NO: 30285 - DNA, 1455 bp, Candidatus Desulfococcus oleovorans Hxd3
  CDS (1)..(1455): transl_table=11
atgtcggccctcaaagccggagggattgatctcttcccttccactttcaatgtcacccacacggtggccgacatgctcgggttgattgaggccggacggccgccgtcaccggagagtgataacctgccggtactggccggccgcatgatggccatcaaccgcttcggcaaggctgcctttgtccgtttcagggaccgtaccggcctgatgcaggcttacatacagaaagacaaggtgggcagtgacgcctacgcccttttcaagcagatggacgtgggcgacgttatcggtctttccgggggcctgtttcagacaaaaaccggggaatggaccgttcaggccgaaacgatccggctgctctgcaaggccacccggcccctgccggaaaaatttcacggtctcaaggatccggaaaaacggtatcggaagcggtacctggacctgatcatgaacagcgccacccgggacgtctttattcgtcggagccgggcgatccaggccattcggacctttctgctggagcgggattttctggaggtggaaacgcccatgatgcagcccattcccggcggggccgaggccagaccctttgtgacccatcacaatgccctggacatggacctgtttcttcgcatcgcgccggaactctatctcaagcggctggtggtgggcggttttgagagagtgtttgaaatcaacaggaattttcggaacgaagggatttccacccgtcacaatccggagttcaccatgctggagttctaccaggcttatgccgactaccagggcctgatggccatgaccgaagatctgttctgccatgtggctgaagcggtgaccggttcccggcaggtcgtttaccaggcgcataccattgatttttccggaccctggcccagagtgcccctgctggaggccctgcaacggatcggcggtgtggacgcggggatactgaacgaccgggaggccctgctggcccatgccgcggccagaggggtgcagatcgcccggacggacaccagcaccggcaaggtgatcaccaagttgttcgacgcgctggtggagccccacctgattcagcccacctttatcaccggctatccggtggaggtctcaccgctttcaaaagccagcgcgcaggcgccggggtttgtagaccggtttgaactgtttatcgcgggcaatgaaatcgccaacggattttcagagctcaatgatcccgaagagcagcgccagcggttcgcggctcaggtggcggcccggaaagccggggatgacgaggcccatttcatggatgaggactatattgaggcccttgaatacggcatgccgcccacggccggcgaaggcatcggcatcgaccggctggtcatgctgctgaccgatgcgccttccattcgggaggtcattctttttccccatatgcggcgggaagaagcgccgggcaatgcctga

SEQ ID NO: 30286 - protein, 484 aa, Candidatus Desulfococcus oleovorans Hxd3
MSALKAGGIDLFPSTFNVTHTVADMLGLIEAGRPPSPESDNLPVLAGRMMAINRFGKAAFVRFRDRTGLMQAYIQKDKVGSDAYALFKQMDVGDVIGLSGGLFQTKTGEWTVQAETIRLLCKATRPLPEKFHGLKDPEKRYRKRYLDLIMNSATRDVFIRRSRAIQAIRTFLLERDFLEVETPMMQPIPGGAEARPFVTHHNALDMDLFLRIAPELYLKRLVVGGFERVFEINRNFRNEGISTRHNPEFTMLEFYQAYADYQGLMAMTEDLFCHVAEAVTGSRQVVYQAHTIDFSGPWPRVPLLEALQRIGGVDAGILNDREALLAHAAARGVQIARTDTSTGKVITKLFDALVEPHLIQPTFITGYPVEVSPLSKASAQAPGFVDRFELFIAGNEIANGFSELNDPEEQRQRFAAQVAARKAGDDEAHFMDEDYIEALEYGMPPTAGEGIGIDRLVMLLTDAPSIREVILFPHMRREEAPGNA

SEQ ID NO: 30287 - DNA, 1503 bp, Pseudomonas putida GB-1
  CDS (1)..(1503): transl_table=11
atgagcgacctcaagaccgaatcgcaagacctgcaacaggaagaaaatgccctgatcgccctgcgcaaggaaaaacttgccgccgagcgcgccaagggcaacgccttccccaacgacttccgtcgcgacagctactgcaacgacctgcagaaacagtacgcggacaagaccaaggaagagctggaagcagccgcgatcccggtcaaggttgccggccgtatcatgctcaaccgtggctcgttcatggttatccaggacatgactggccgtatccaggtctacgtcaaccgcaaaaccctgcccgaagaaaccctggctgcggtcaagacttgggacctgggcgacatcatcagtgccgaaggcaccctggcccgttccggcaagggcgacctgtacgtcgaaatgaccaatgtgcgcctgttgaccaagtcgctgcgcccgctgcccgacaagcaccacggcctgaccgacaccgagcagcgctaccgtcagcgttacgtcgacctgatggtcaacgaagaaacccgccacaccttccgtgtgcgttcgcaggtgatctcgcacatccgcaagttcctcatcgagcgtgacttcctcgaagtcgaaacgccgatgctgcagaccattccaggcggcgcggcggccaagccgttcgaaactcaccacaacgccctggacatggccatgttcctgcgcatcgcgccggagctgtacctcaagcgcctggtggtgggtggctttgaaaaggtgttcgagatcaaccgcaacttccgtaacgaaggcgtttcgactcgtcacaaccctgaattcaccatgctcgagttctaccaggcctacgctgactaccgcgacaacatggacctcaccgaggaactgttccgtgagctggcgcagctggtactgggcagcaccgacgtgccgtacggtgacaaggtgttccactttggcgagccgttcgtgcgcctgtcggtgttcgactcgatcctcaagtacaaccccgagctgaccgctgccgacctgcaggacgtcgaccgcgcccgcgacatcgccaagaaggccggtgccaaggtgctgggccacgaaggcctgggcaagctgcaggtgatgattttcgaagaactggtcgagcacaagctggagcagccgcacttcattaccgagtacccgttcgaagtgtcgccgctggcccgtcgcaacgacgacaacccagccgttaccgaccgcttcgagctgttcatcggtggccgtgaaatcgccaacgcctactccgagctcaacgatgccgaagaccaggccgagcgcttcctggcccaggtggccgagaaggacgccggtgacgacgaagccatgcactacgacgccgacttcgtgcgtgcactggagtacggcatgccgccgaccgccggtgagggtatcggcatcgaccgcctggtgatgctgctgaccaactcgccgtcgatccgcgacgtgatcctgttcccgcacatgcgtccgcaggcctga

SEQ ID NO: 30288 - protein, 500 aa, Pseudomonas putida GB-1
MSDLKTESQDLQQEENALIALRKEKLAAERAKGNAFPNDFRRDSYCNDLQKQYADKTKEELEAAAIPVKVAGRIMLNRGSFMVIQDMTGRIQVYVNRKTLPEETLAAVKTWDLGDIISAEGTLARSGKGDLYVEMTNVRLLTKSLRPLPDKHHGLTDTEQRYRQRYVDLMVNEETRHTFRVRSQVISHIRKFLIERDFLEVETPMLQTIPGGAAAKPFETHHNALDMAMFLRIAPELYLKRLVVGGFEKVFEINRNFRNEGVSTRHNPEFTMLEFYQAYADYRDNMDLTEELFRELAQLVLGSTDVPYGDKVFHFGEPFVRLSVFDSILKYNPELTAADLQDVDRARDIAKKAGAKVLGHEGLGKLQVMIFEELVEHKLEQPHFITEYPFEVSPLARRNDDNPAVTDRFELFIGGREIANAYSELNDAEDQAERFLAQVAEKDAGDDEAMHYDADFVRALEYGMPPTAGEGIGIDRLVMLLTNSPSIRDVILFPHMRPQA

SEQ ID NO: 30289 - DNA, 1545 bp, Marinobacter sp. ELB17
  CDS (1)..(1545): transl_table=11
atgactgaacagatgcacaatgcccagcccgatgcccagcctgatgagaacaagctgattgccgagcgccgcgctaaactggcggatattcgcgagcagggcaatgcgtttcccaacgattttcgtcgcgacagtaccgctgccgagctgctggaaaagtacgcggattatagcaaacaacagttggaagacatggcgattcctgtggccattgccggtcgcatgatgttggatcgcaaggcgttcaaggtggttcaggacgtgactggccgaatgcaggtgtacgcctccaaagatgtgcaaaaggccacaaagcactgggatctgggggacattatcggggttagcggcatattggcgcgctcgggtaagggcgacctgtacgtcaccatggacgattacctactgctgacaaaatctctgcgcccgctgccggaaaaacacaaaggcctgaccgataccgagtcccgctatcgtcatcgctatgtagatttgatggtcaacgaagacagtcgccgggtgttcctggcgcgctcgaaaatcattaccgccatgcgccagtttcttgctgatcgtgacttcatggaagttgaaacccccatgttgcaggtgatccccggtggcgccacagcgcggccgtttatgacacaccacaacgctctgggcattgatatgtacttgcgcatcgcgccggaactgtatctgaaacgccttgtagtaggcggtttcgagcgggtgtttgaaattaaccgtaacttccgcaacgaagggctttctacccgtcacaacccggaatttaccatggtcgagttctaccaggcttacgccgactacaacgacctgatggatctgaccgaagacatgctgcgcagcatcgccgagcaggttttgggctccagcctggtggtgaatacggcggttgacgccgacggtaacgaaacccgcattgaatacgactttggcaaaacgtttgatcggctgaccgtcgttgacgctattgtgcgctacaacgaaaacgtcagcgccgaacaactggcggacgaaacctttgcgcggcagatggcgaaagacctgggcgttaaggtgaaaaacagctggggccttggcaaagtgcacatcgagattttcgaggaaaccgccgagcaccgcttgatgcagcccacgttcattaccgaatacccgaaagaagtgtcaccgctggcccgctgcaaagacagcaatccgtttgtcaccgagcgcttcgagttctttgtcggcggccgtgaaattgccaacggcttctccgagttgaatgacgctgaagaccaggccgagcgtttccgcgcccaagtggcggaaaaagacgccggcgacgacgaagccatgttctacgatgaagactatgtgatggcgctggaatacggcatgccgcccaccgcgggcgaaggcattggtatcgaccgtttggctatgctgctcaccaactccgcgtctatccgcgacgttatcctgttcccggccatgcgcccggaacataaagcggacagcaaaaagagcgaaggctaa

SEQ ID NO: 30290 - protein, 514 aa, Marinobacter sp. ELB17
MTEQMHNAQPDAQPDENKLIAERRAKLADIREQGNAFPNDFRRDSTAAELLEKYADYSKQQLEDMAIPVAIAGRMMLDRKAFKVVQDVTGRMQVYASKDVQKATKHWDLGDIIGVSGILARSGKGDLYVTMDDYLLLTKSLRPLPEKHKGLTDTESRYRHRYVDLMVNEDSRRVFLARSKIITAMRQFLADRDFMEVETPMLQVIPGGATARPFMTHHNALGIDMYLRIAPELYLKRLVVGGFERVFEINRNFRNEGLSTRHNPEFTMVEFYQAYADYNDLMDLTEDMLRSIAEQVLGSSLVVNTAVDADGNETRIEYDFGKTFDRLTVVDAIVRYNENVSAEQLADETFARQMAKDLGVKVKNSWGLGKVHIEIFEETAEHRLMQPTFITEYPKEVSPLARCKDSNPFVTERFEFFVGGREIANGFSELNDAEDQAERFRAQVAEKDAGDDEAMFYDEDYVMALEYGMPPTAGEGIGIDRLAMLLTNSASIRDVILFPAMRPEHKADSKKSEG

SEQ ID NO: 30291 - DNA, 1692 bp, unidentified eubacterium SCB49
  CDS (1)..(1692): transl_table=11
atgcagttatctgaacttgaaattattcgtagagaaaaactcgaacaaattagaaaccttggaatcaatccttacccagcagatttatttccagtagacaccttgtcttctgaaataaaacagaattttgaagaaggtaaaaaggtggtaattgcaggacgtttaatgcgtaaaaagatacaaggaaaagcttcttttggcgaacttcaagatagtgaaggacgtattcaggtttattttaaccgtgatgaaatttgtgaaggagaagacaaaaccctttacaatgacgtgtttaaaaaactattagatcttggtgattttatagggataacaggtgagctttttacgactcaagtaggagaacctactgttttagtaaaagagtttacacttctttctaaaacgctaaaacctttaccactccctaaaacagatgcagaaggaaaaacctatgatgagtttaacgacccagagctacgttatagacaacgttatgtagatcttgtagtaaaccctaaagtaaaagaagtgtttaaaaaacgtacgaagctatttaatgcgatgcgtactttttttaacgagcgcgattattttgaggtagaaacacctatactacaacctattgctggtggtgctgcggcacgcccattcatcacgcaccacaactcgcttgacattccattatatatgcgaattgcaaatgaattgtacttaaaaagactgattgttggtggttttgatggggtatatgagttttctaaaaactttagaaacgaagggatggatcgcacacacaatccagaatttacagccatggaaatctatgtttcttacaaagattacaactggatgatggatttttgtgagcagttattagagttctgtgcaatacaagtaaacggaacatctaaaactacttttggcgagcacgagatagactttaaagcaccgtatgctagagtaacaatggcagattctataaagcactttacaggatttgatattactggaaaaagtgaagacgaattgagagctgctgctaaagatatgggcatcgctgttgataacacgatgggtaaaggaaaactgatcgatgaaatttttggtgaaaaatgtgaaggaaactacatacaacctacatttatcacggattaccctaaagagatgagcccgctatgtaaagagcatagagacaacccagagttaactgagcgttttgagcttatggtttgcggtaaagaaattgcaaatgcttatagtgaattaaacgacccaatagatcaacgtgagcgttttgaagcacagttaaaacttgcagaaaaaggagatgacgaagctactgcttttattgaccacgactttttacgcgcgttagaatatggtatgccacctacaagtggaatgggtattggaatggaccgtttgattatgtatttaacaaacaacccttcgatacaagaagttttattcttccctcaaatgagacctgagaaaaaagcggttgctttaaacgatgaagaaaaagctgtacttgccatcttaaaagcaaactcaccattagagcttagcacacttaaagaacaatctggcttaagcaacaagaaatgggataaaaccattaaaggtttaaccaagcacggtgttgcaaaagtagaaaagaccgatgaaggtttatttgtgaaaatagcttaa

SEQ ID NO: 30292 - protein, 563 aa, unidentified eubacterium SCB49
MQLSELEIIRREKLEQIRNLGINPYPADLFPVDTLSSEIKQNFEEGKKVVIAGRLMRKKIQGKASFGELQDSEGRIQVYFNRDEICEGEDKTLYNDVFKKLLDLGDFIGITGELFTTQVGEPTVLVKEFTLLSKTLKPLPLPKTDAEGKTYDEFNDPELRYRQRYVDLVVNPKVKEVFKKRTKLFNAMRTFFNERDYFEVETPILQPIAGGAAARPFITHHNSLDIPLYMRIANELYLKRLIVGGFDGVYEFSKNFRNEGMDRTHNPEFTAMEIYVSYKDYNWMMDFCEQLLEFCAIQVNGTSKTTFGEHEIDFKAPYARVTMADSIKHFTGFDITGKSEDELRAAAKDMGIAVDNTMGKGKLIDEIFGEKCEGNYIQPTFITDYPKEMSPLCKEHRDNPELTERFELMVCGKEIANAYSELNDPIDQRERFEAQLKLAEKGDDEATAFIDHDFLRALEYGMPPTSGMGIGMDRLIMYLTNNPSIQEVLFFPQMRPEKKAVALNDEEKAVLAILKANSPLELSTLKEQSGLSNKKWDKTIKGLTKHGVAKVEKTDEGLFVKIA

SEQ ID NO: 30293 - DNA, 1509 bp, Moritella sp. PE36
  CDS (1)..(1509): transl_table=11
atgactgaacagttacaagatgaaaacaaactgattgcagaacgtcgcgcgaaattagatcatatccgcaccaactgtaaagcaaatggccaccctaatgacttccgcgtaaaacataagtcggcagatttacaggctgaatttggcgagaaaagcaaagaagaattagttgaaatgcaacacctagtaagcatcgcgggtcgtattatggctaaacgtggtcctttccttgctatccaagatacagctggtcgcattcaagcatacgcctcgaaagacgtgcaaaaagcccaaaaagcggaccttggcggtctagatattggtgatatcgttggtattactggtgcgctaaacaaatctggtaaaggtgacctttacgttgaaatgactgactacgtgctacttactaaagcactgcgtccattaccagaaaaattccacggtctaacggaccaagaaatgcgttaccgtcaacgttatgttgatcttatcgttaatgaagaatcacgtaatgccttcatcgtacgctctaagctagtaacagccatccgtaacttcatggtatcaaaagattacatggaagttgaaacgccaatgatgcatgtgatcccgggtggtgcaactgcgcgtccatttatcactcatcataacgcgcttgatcaagcaatgtatctacgtgtagcacctgagctttatcttaagcgtttagtggttggtggttttgatcgtgtattcgaaattaaccgtaacttccgtaacgaaggtttatcaccgcgtcacaatccagaattcacaatgatggaattctaccaagcttacgctgattacaatgaccttatggatttcactgaagaaatgctaagcacggtagcggttgaggtgctaggtgcgacagctatgccttacggcgaccacatggttgagttcggtggcaaatacacacgtattagcatgttagatgcaatcaaacagtacaacccagagcacgaagttatccaagcattgactaatgaaggtgttcaagatcgtgagttaatggtttctattgcgaaatcactgaacatgaagatagagaaattctggacttgtggtcaattactggaagagatctttggtgaaacagctgaaccacaacttattcagccaacattcattactggctacccagcagacatctcgccactagcacgtcgtagcgatgacaacccgttcttcactgatcgttttgagttcttcatcggtggccgtgaagttgcgaatggtttctctgagcttaacgatgctgaagaccaagacgcacgtttcaaagcacaagttaacgccaaagatgcgggtgatgatgaagcaatgtactacgatgcggattacatcactgcactagagcacggcttaccaccaactgctggccaaggtattggtatcgaccgtctagctatgttgtttactaatacacatactattcgtgacgtgatcttattcccggcaatgcgtccacaagcaaatagctaa

SEQ ID NO: 30294 - protein, 502 aa, Moritella sp. PE36
MTEQLQDENKLIAERRAKLDHIRTNCKANGHPNDFRVKHKSADLQAEFGEKSKEELVEMQHLVSIAGRIMAKRGPFLAIQDTAGRIQAYASKDVQKAQKADLGGLDIGDIVGITGALNKSGKGDLYVEMTDYVLLTKALRPLPEKFHGLTDQEMRYRQRYVDLIVNEESRNAFIVRSKLVTAIRNFMVSKDYMEVETPMMHVIPGGATARPFITHHNALDQAMYLRVAPELYLKRLVVGGFDRVFEINRNFRNEGLSPRHNPEFTMMEFYQAYADYNDLMDFTEEMLSTVAVEVLGATAMPYGDHMVEFGGKYTRISMLDAIKQYNPEHEVIQALTNEGVQDRELMVSIAKSLNMKIEKFWTCGQLLEEIFGETAEPQLIQPTFITGYPADISPLARRSDDNPFFTDRFEFFIGGREVANGFSELNDAEDQDARFKAQVNAKDAGDDEAMYYDADYITALEHGLPPTAGQGIGIDRLAMLFTNTHTIRDVILFPAMRPQANS

SEQ ID NO: 30295 - DNA, 1833 bp, Medicago truncatula
  CDS (1)..(1833)
atggaacaacctccttccgatcctccggtcaccgcccccgcagcgagcgaaaccataagcaaaaatgcactgaagcgtgaacaaaagaaaagggagagagaagaagaaaagaggaaaaaggacgaggaaaaagccagaagggctgctgaaatgagaagtgcccaagagaacagacctgcagctgctgatgaggaagatatggatccaacgcaatacttggagaacaggctcaagtatctttctactgaaaaggaagaagggagaaacccatatccacacaaattctctgccactatgactattaaacaatatatcaaggaatatgaaggtttaagtgatgggcaacatcttgacgatgtttctgtgtctttgactggcaaaatcatgcacaaacgttcctctggtgcaaagctcgtcttttatgaccttcatgatgatggtttcaaggttcaggttatggccgatgcaagtaaatcggacttaaatgaggctgggtttgacaaagtccattctaatgtgaagcgtggtgatattgttggcatcacagggtttccaggcaaaagcaggaagggagagcttagtattttccccaaaacttttgtggtgctgtctcattgtctgcatatgatgcctaggcaaaaatctgctgctgctgctgctgctgataacgcatggctaccaggaaagaccaggaatcccgaagcatacactctgaaagaccaggaaactagatatcggttacgccatttggatttgatgcttaatacagaggttcgagaaatattcaggactaggtctaaaatcatttcttacgttaggagttttctggacaagcttgatttcttggaggttgaaacacctatgatgaacatgattgctggtggtgctgctgctcggccatttgtaactcatcataatgaccttaacatgagattattcatgagaattgctccagaactctatctcaagaagttggttgttggtggtctgaaccgtgtttatgaaattggtaaacaatttaggaatgagggcatagatttgactcataatcctgaatttactacctgtgagttctatatggcttacaaggactactacgacttaatggagataacagagaacatgttgagcggtatggtgtatgaacttacaaaaggcagctataaaatcaagtatcatgcagatggtcttgacaaggatcctattgaaatcgactttactccaccattcagaaggattgacatgattgaaggactagaggagatggcaggcctcagtattcctaaagacttgacgagtgctgaagctaatcaatatctaagggatgcctgcttgaagtacgaaatcaaatgtccccctcctgaaacaactgcacgtttgttggataagcttgtggggcactttttggaggaaacatgtgtcaatcctacattcatcataaaccacccagagataatgagtcctttggcgaagtggcacagaacaaaaccaggcctgactgaacgttttgaattgtttatcaacaaacatgagcttgctaacgcgtatactgaattgaatgaccctgtggtacaacggcaaagatttgctgatcaactcaaggatcggcaatcaggtgacgacgaagcaatggccttggacgaaacattttgcacggctttggagtatggtttgccaccaactgctggttggggtttgggtattgatcggttgactatgttattgactgattcacaaaatatcaaggaggttcttctcttccctgccatgaaacctcaagatgtcgtgtcccaattaaatcatttacaggtttgttctgcttcaagtcaataa

SEQ ID NO: 30296 - protein, 610 aa, Medicago truncatula
MEQPPSDPPVTAPAASETISKNALKREQKKREREEEKRKKDEEKARRAAEMRSAQENRPAAADEEDMDPTQYLENRLKYLSTEKEEGRNPYPHKFSATMTIKQYIKEYEGLSDGQHLDDVSVSLTGKIMHKRSSGAKLVFYDLHDDGFKVQVMADASKSDLNEAGFDKVHSNVKRGDIVGITGFPGKSRKGELSIFPKTFVVLSHCLHMMPRQKSAAAAAADNAWLPGKTRNPEAYTLKDQETRYRLRHLDLMLNTEVREIFRTRSKIISYVRSFLDKLDFLEVETPMMNMIAGGAAARPFVTHHNDLNMRLFMRIAPELYLKKLVVGGLNRVYEIGKQFRNEGIDLTHNPEFTTCEFYMAYKDYYDLMEITENMLSGMVYELTKGSYKIKYHADGLDKDPIEIDFTPPFRRIDMIEGLEEMAGLSIPKDLTSAEANQYLRDACLKYEIKCPPPETTARLLDKLVGHFLEETCVNPTFIINHPEIMSPLAKWHRTKPGLTERFELFINKHELANAYTELNDPVVQRQRFADQLKDRQSGDDEAMALDETFCTALEYGLPPTAGWGLGIDRLTMLLTDSQNIKEVLLFPAMKPQDVVSQLNHLQVCSASSQ

SEQ ID NO: 30297 - DNA, 1806 bp, Vitis vinifera
  CDS (1)..(1806)
  misc_feature (634)..(634): r is g or a
  misc_feature (1235)..(1235): r is g or a
  misc_feature (1238)..(1238): m is a or c
atggaggcgtggaaggtgtggagcgcttcatcgcagccgctgaagcaactcatccacttggcttcttctaccactcgccgcacctcttccagattcatcgtctcatgctgttctccttccaccaccaccgccaccacggccggcggcgggtccaggattgccggccggaatcggaggtcagcgtcttcgtcttcctcgtccacctccgacagagacgccattcgtgccattcgtctgaaagaaggaaaagtaaacatacttgttttacaggttgaagaattgaggaacaaggggcttgagccctatgcttataagtgggataggactcatactgctaatcagttgcaagatatatatagacatctagggaatggggaagagttaaacagtgagagtgattatgtgtcaatagcaggaagaattgtggcacgtagagcatttggaaagcttgccttcttcactttgagagatgattcggggacaatccagctttactgcgagaaggaaaggcttttaaatgagcaatttgagcagttaaagacacttgttgatattggtgatattctgggtgtaagtggctcaataaagcggacagagaaaggagagctctctgtttatgtgaattcgtttgcarttcttacaaaatctctactcccactgccagataaatatcatggtctaactgatgtggataagcgttatcgccaaaggtatgtagacatgattgctaatcctgaagtagctgatatatttcggaaaagagcaaagattgtatcagcgatacgcagaacagtggaatcatcaggctttgttgaagtcgaaactccagtcctacagggagcagctggtggagcagaagctaggccatttgtcacataccataattcacttggaagggatctttacttgaggattgcaactgagctgcatttaaagagaatgctggtagggggatttgaaaaagtatatgagatgggtcgaatattcagaaatgaaggcatttcaactcgtcataatcctgagtttaccactatagagatgtatgaagcatattcagactatgaaagcatgatgaacatggcagaggaaattgtaactcaatgtgctcttgcagtttgtgggaagcttaccattgattaccagggaacggagatatgtctagaacgaccttggagaagagaaaccatgctcaatcttgtgaaagaggccactgggattgacttcaatgagttggrcamtgatattaaagttgctaaggaagttgctctgagagcactagggattggtcatgatagtaaagacaaatcttctattgaagcctgcacatctgttggccatgttcttaatgaggtctttgagattgttgtagaaccacagctcatacaacccacgtttgtcttggattatcctattgagatatctcctctagccaaaccacatcgaaggcatgcaggcttgactgagagatttgaactattcatttgtggtcgtgaactggccaatgcattctctgaattgactgatcctatggatcagagaggacgcttggaggagcaagtgaggcagcataatgagaagagagctgcagttgtttcagagccggatcatgcagaggtgaaaacaacagaaagtgaggatgagtcgtatgaagttacacttgatgatgactttctaacggctttggaatacggaatgcctccagcttcaggaatgggtctcggagttgataggctagtgatgcttctgacaaactccgccagtattcgagatgttattgctttccccgtcctcaaagttcagcagtag

SEQ ID NO: 30298 - protein, 601 aa, Vitis vinifera
  misc_feature (212)..(212): The Xaa at location 212 stands for Ile, or Val.
  misc_feature (412)..(412): The Xaa at location 412 stands for Asp, or Gly.
  misc_feature (413)..(413): The Xaa at location 413 stands for Asn, or Thr.
MEAWKVWSASSQPLKQLIHLASSTTRRTSSRFIVSCCSPSTTTATTAGGGSRIAGRNRRSASSSSSSTSDRDAIRAIRLKEGKVNILVLQVEELRNKGLEPYAYKWDRTHTANQLQDIYRHLGNGEELNSESDYVSIAGRIVARRAFGKLAFFTLRDDSGTIQLYCEKERLLNEQFEQLKTLVDIGDILGVSGSIKRTEKGELSVYVNSFAXLTKSLLPLPDKYHGLTDVDKRYRQRYVDMIANPEVADIFRKRAKIVSAIRRTVESSGFVEVETPVLQGAAGGAEARPFVTYHNSLGRDLYLRIATELHLKRMLVGGFEKVYEMGRIFRNEGISTRHNPEFTTIEMYEAYSDYESMMNMAEEIVTQCALAVCGKLTIDYQGTEICLERPWRRETMLNLVKEATGIDFNELXXDIKVAKEVALRALGIGHDSKDKSSIEACTSVGHVLNEVFEIVVEPQLIQPTFVLDYPIEISPLAKPHRRHAGLTERFELFICGRELANAFSELTDPMDQRGRLEEQVRQHNEKRAAVVSEPDHAEVKTTESEDESYEVTLDDDFLTALEYGMPPASGMGLGVDRLVMLLTNSASIRDVIAFPVLKVQQ

SEQ ID NO: 30299 - DNA, 1782 bp, Ostreococcus tauri
  CDS (1)..(1782)
atggccgacgccgcgcccgagctcaaggagttcccggagttcccgggggaacccatgagcaagaggtgcgcgcgattcggatcgcgcgatcgagcgcgatggcggactgagtataagaagagattgaagcagcgagagaacgaggcgaagaaggcggccaaggaggcggccaaggcggaggcggccaaggcgcaaccggcgaaggagaagagcgaggaggatctcgaagtggatctggacccggcgcagtacacggcgggacggattaagaaggttgtggcggcgaagtcgaggggagaggcgccgtacccgcataaattccacgtcgacacgcgatttgaggagttcatcgccaagtactcgagcctgccggagggtggcgcggcggacgagacatgctccatcgcggggcgcatcatgtccaagcgcgcgagcggtaaaaagctgtacttttatgatttggtcgcggatggaaagaagatccagatcaccgcggacgaggcaggcgcgacggggtacgattttgcgaaggtgcacgccgccacgcgacgcggggacattgtcggcgttgtgggtaagccaggtaagacgaagcgaggcgagctctccatctttccggtagagttctccattctcactccgtgcttgcacatgcttccgggtttctctggcttgcgagacgtggagacgcgcttccgtaagcgctttttggatttgatcatgaataacgaggttcgcgacacgttctacattcgatcaaacatcatccgctacgtgcgcaaatacttggatgatcgcgatttcttggaggttgaaacgccaatgatgaatatgatcgctggtggtgccaccgcgcgaccgtttgtcacccatcacaacgacttgaacatgacgctcttcatgcgcatcgcgcccgagctctacctcaagcagctcgtcgttgggggcatcgagcgcgtgtacgagatcggtcgtcagttccgcaacgaaggcatcgatatgacgcacaacccagagttcacgacgtgcgagttctaccaagcgtacgccgattataacgatttgatgaccatgacggaggagatgatctctggcatggtgtacgccatcaagggatcgtacaagatccagtaccacgccaagggcccggaggagccgccgattgagatcgacttcactcctccgtttcgtcgcatctccatggtctctggtctcgaagaggcactgaacatcaagttcccatccaccgattttgcctccaaggaaaacgaggcattcttgcaaaagctcataaaagagaaggaagttgagctcactccgccacacacgacggcgcgtatgctcgacgccctcgtcggagagtacctcgagtctcaactcgttaacccgggtttcatctgcgatcacccgcaaatcatgtctccgttggccaagtaccaccgcagcatcccgggcatgactgagcgtttcgagctcttcgtcaacacaaaggagctgtgcaacgcatacacggagctgaacgatccgatcgatcaacgtgaacgttttgaagagcaagccgccgccaaggagagtggcgacgatgaggcgatgctcatcgacgagacattcgtggaatcattggagattggattgccgcccaccggcggttggggcttgggcgtcgatcgcctcacgatgctcctcgcggataagaacaacatcaaggaagtcttactcttccctgcgatgaagccagacgaacaagcgccgagcgaaggcgtgaagaacatgacaatttaa

SEQ ID NO: 30300 - protein, 593 aa, Ostreococcus tauri
MADAAPELKEFPEFPGEPMSKRCARFGSRDRARWRTEYKKRLKQRENEAKKAAKEAAKAEAAKAQPAKEKSEEDLEVDLDPAQYTAGRIKKVVAAKSRGEAPYPHKFHVDTRFEEFIAKYSSLPEGGAADETCSIAGRIMSKRASGKKLYFYDLVADGKKIQITADEAGATGYDFAKVHAATRRGDIVGVVGKPGKTKRGELSIFPVEFSILTPCLHMLPGFSGLRDVETRFRKRFLDLIMNNEVRDTFYIRSNIIRYVRKYLDDRDFLEVETPMMNMIAGGATARPFVTHHNDLNMTLFMRIAPELYLKQLVVGGIERVYEIGRQFRNEGIDMTHNPEFTTCEFYQAYADYNDLMTMTEEMISGMVYAIKGSYKIQYHAKGPEEPPIEIDFTPPFRRISMVSGLEEALNIKFPSTDFASKENEAFLQKLIKEKEVELTPPHTTARMLDALVGEYLESQLVNPGFICDHPQIMSPLAKYHRSIPGMTERFELFVNTKELCNAYTELNDPIDQRERFEEQAAAKESGDDEAMLIDETFVESLEIGLPPTGGWGLGVDRLTMLLADKNNIKEVLLFPAMKPDEQAPSEGVKNMTI

SEQ ID NO: 30301 - DNA, 1596 bp, Aspergillus oryzae
  CDS (1)..(1596)
atggttaatcggaagttcctgtcggaagcttggaccaccttcaccgccttcgaacgatttttcttcggcttttcgctcgttttgctttttgattcccacacactctcttaccgtccgcgatgtgacggacgacttcgtagtcttccacctcgtatccattgcaaatgcattcagttcgccccaggtgggcttcacagttggtctctgggagactttggtcaagtcggctctaccttgttgtcttttgtacttaggttagtaggtaggatacgtacgtatagacttgccggaagcaaattgatcttcttcgatatcgtccaaaatggccacaaagtccaagttatgtgcaaccttcgtcaactgcccgggataaccccggaagcctttaagaagctttaccgtttgctccgtcgcggtgacgctttctctgtaacaggtagacctcaccgcaccggacgaggagagctcacggttgtggccactgaattgccccagcttttgtctccctgtctccatgatgtccctctggatgcgaaagagcacgagaactcgccatacccccgtcatgtccagttcctcgcagaccaaaccacgaccgatattataaaggcacgctcggcgatcattcagtatctgcgtcaattcttccttgatcggtctttcatggaggtcaacactcccatcgtcaattcgatcgccggtggagctatcgctcgtcccttctatacttccgcgaccgaatttcccgaccgccagctgtctctcaggattgcaccggaactgtggctgaagcgcctggtggttggtggttttgatagggttttcgagattggaccctcgtttcgcaatgaaggcattgacaagacccataaccctgagtttacaacatgtgaattctatcatgcttatgccaacctggaagaccttttgtctatgacggagagtctactgtccggcatggcacaacatatccgcgatactaacaaagacggtactctgaagcccaccgaagttgacttctcaacgccgttccgtcgtattgatttcctcactggaattgaagaaaagatcggtcgcaagctcccagatctcacgtctccggatgccgtggcccaagtgaaacaactgtttaaggacttatcactcgagattcccgaggctccaacactcccccgacttttggatgaactctgcagcatctatgttgaacccgaatgtgtaaacccgacctttatcatcaaccctcccgaatgtctatcgcccttgtccaaatcatttattcatccagtcactggccagcgtgttgctgcacggggagaactattcatcgaaggaaaggaggtggtgaatacatacgaggaggaaaactcgccgtctgaacaaagacgcaagtttgaagaccaagtacgctacagcaaggacgcagacgagtcttcagaaatcgacgagagctacctggaggcgctggaatggggccttcccgctacaggtggctggggatgcggaatcgaccgtctttgcatgctctttaccggcgcaaagaggattgcagatgttttaccttttggaaccctacgtgccgtaacccggcgatga

SEQ ID NO: 30302 - protein, 531 aa, Aspergillus oryzae
MVNRKFLSEAWTTFTAFERFFFGFSLVLLFDSHTLSYRPRCDGRLRSLPPRIHCKCIQFAPGGLHSWSLGDFGQVGSTLLSFVLRLVGRIRTYRLAGSKLIFFDIVQNGHKVQVMCNLRQLPGITPEAFKKLYRLLRRGDAFSVTGRPHRTGRGELTVVATELPQLLSPCLHDVPLDAKEHENSPYPRHVQFLADQTTTDIIKARSAIIQYLRQFFLDRSFMEVNTPIVNSIAGGAIARPFYTSATEFPDRQLSLRIAPELWLKRLVVGGFDRVFEIGPSFRNEGIDKTHNPEFTTCEFYHAYANLEDLLSMTESLLSGMAQHIRDTNKDGTLKPTEVDFSTPFRRIDFLTGIEEKIGRKLPDLTSPDAVAQVKQLFKDLSLEIPEAPTLPRLLDELCSIYVEPECVNPTFIINPPECLSPLSKSFIHPVTGQRVAARGELFIEGKEVVNTYEEENSPSEQRRKFEDQVRYSKDADESSEIDESYLEALEWGLPATGGWGCGIDRLCMLFTGAKRIADVLPFGTLRAVTRR

SEQ ID NO: 30303 - DNA, 1815 bp, Aspergillus oryzae
  CDS (1)..(1815)
atgtcggaagctaatgcagttaaggaggctgaggcctccatggccaacctcttgctggacgaagtcactggcgagaaggtttctaagtccgaattgaagcgccgccagaagctccgtgagaaggaagccaagaagaaggagaaggaggctgctgcccctcctaagcccgcgaagaagacctctgctgaggaagacgaagctaacctgactcccaaccaatacttcgaaatccgcagcaagagaatcaacaagttgcgcgagaccaagcaacctgacccctaccctcacaagttccaagtcaccgatgacttgcgccagttcctgaaggactacgatcatcttggaaagggtgaccagctgcccgacaagaccgttcgtatcgccggtagaatctacaccaagcgttcctccggtgccaagttgattttctacgacatccgcgctgagggtgtgaaggtgcaagtagtgtgccaggctcagaacgctgccggcgatgtctctttcgaggctcagcacgagcatctccggagaggtgatgttgttggtattgtcggcttccctggtcgcagtaaccccaagaaccgccccgatggtgagttgtctattttcgcttctgagatcgtgctcttggctccttgcttgcacgctatcccatccgagcactatggtttccaggacaaggaacagcgtttccgtcaacgttaccttgacttgattatgaacgaccgctcgcgtaatgtcttcgtcacccgctccaagattgtctcctatatccgcaacttcttcgacacccgcgacttcgtcgaggtcgaaacccccatgatgaatgccatcgccggtggtgcgaccgccaagcccttcgtcactcaccacaacgacctcgacatgaacctgttcatgcgtgtggctcccgagttgtacctgaagatgcttatcgttggaggccttgagcgtgtgtacgaaatgggtcgtcaattccgtaacgaaggcattgaccttacccacaaccccgaattcacgacttgcgagttctactgggcttacgccgatgtctacgatgtcatgaacctgactgaagagctggtctccggcctggtgaagcacgtcaccggcggttacgagaccgttttccatacccagactggcgaggagtacaacgtcaactggaaggccccctggcgccgcgtggagatgatcccggccctcgaggaggccactggtgagaagttcccgccaggtgaccagctgcacaccgctgagacgggtgaattcctcaagaaggtgctgaagaagaccggcgttgagtgttctcccccattgaccaacgcccgtatgctcgataagctggtcggcgagttcatcgaggagacttgcgtcaacccaaccttcattactggccacccccagatgatgtcgccccttgccaagtaccaccgccagaacgttggtctttgcgagcgtttcgaggccttcgtctgcaagaaggagatcgtcaacgcctacaccgagttgaacgaccccttcgaccagcgtctccgtttcgaggagcaggcccgccagaaggaccagggtgacgacgaggctcagctcatcgacgagaacttctgtactagcttggaatacggtctgccccccaccggtggttggggtatgggtatcgaccgtctggtcatgttcctcaccgacaactacagtatcaaggaggtccttgccttccccttcatgaaggaagacaagtcggcggccgagaccaagagtgccgccgaggtggttggtattgagccccagccggaggaaggaattccccacaaataa

SEQ ID NO: 30304 - protein, 604 aa, Aspergillus oryzae
MSEANAVKEAEASMANLLLDEVTGEKVSKSELKRRQKLREKEAKKKEKEAAAPPKPAKKTSAEEDEANLTPNQYFEIRSKRINKLRETKQPDPYPHKFQVTDDLRQFLKDYDHLGKGDQLPDKTVRIAGRIYTKRSSGAKLIFYDIRAEGVKVQVVCQAQNAAGDVSFEAQHEHLRRGDVVGIVGFPGRSNPKNRPDGELSIFASEIVLLAPCLHAIPSEHYGFQDKEQRFRQRYLDLIMNDRSRNVFVTRSKIVSYIRNFFDTRDFVEVETPMMNAIAGGATAKPFVTHHNDLDMNLFMRVAPELYLKMLIVGGLERVYEMGRQFRNEGIDLTHNPEFTTCEFYWAYADVYDVMNLTEELVSGLVKHVTGGYETVFHTQTGEEYNVNWKAPWRRVEMIPALEEATGEKFPPGDQLHTAETGEFLKKVLKKTGVECSPPLTNARMLDKLVGEFIEETCVNPTFITGHPQMMSPLAKYHRQNVGLCERFEAFVCKKEIVNAYTELNDPFDQRLRFEEQARQKDQGDDEAQLIDENFCTSLEYGLPPTGGWGMGIDRLVMFLTDNYSIKEVLAFPFMKEDKSAAETKSAAEVVGIEPQPEEGIPHK

SEQ ID NO: 30305 - DNA, 1491 bp, Candidatus Portiera aleyrodidarum
  CDS (1)..(1491): transl_table=11
atgattataaaaaattatttaattaaagatcgtttaaataagttacaagtattgagtaaaaccgcgaataaagctggaaaaagtgcattttataataaatttcgtcgtactagtttagcaaaaagtttaaaaaaaaattttggagaaaagaataaaaaacaattggttaattttaagttaacaacagcagttgcaggacgtattatgcgtaaaagggggccttttatagttgttcaagatgtaagtagtaacattcagctttatatagataaaaaaacaatttctaatgaaattcataaagatataaaagattgggatattggagatataattggagcaataggtgacattgataaatcaaaaattggtgaactatatttattggttaaaaaagcttatattttaactaaaagcataagacatttaccaagtaaatttcacggaataaaagatcaagaaattagatataggcacagatatttagatttaattatgaataaagaggtacgtaaaacgtttaaaattcgcacacgtattatatctgcgcttagaaagtttttttatgaactttattttttagaagcagagactcctatattacattcaatgccagggggagcaatagcaaaaccttttgaaacttataattattcattaaatataaaattgtatttacgaatcgcccctgaactttatttaaaaaggttagttgttggtggttttgaacgtgtatttgaaataaataaaaactttcgtaatgaaggcatttcaacttggcataatcctgaatttactatgttagaattttattgggcttttgcgacttataaggatttgatggaaatcacagaacatatgataagatttgttgctaatgaagcgttaggtacaacaagtatttacatcggaaagattttaaacattgatttatcagaaccttttgattgtttaagtatgcgagactcgctcattaagtatggtaaaactttttcaattaataactctgatttttatgatctagaaaatttgctttttttatctaaacgaattggattgaccgtagctaactataacaattatggaaatttacttaataaactatttgaagtaattgtagaacgaaaattaattaaaccaacttttgtcacagactatccagtagaagttagtcctttagcaagaagtaaagatagtaacctgaatataacagaaagatttgaattgtttatagggggtagagaaatagctaatggtttttctgaattaaatgattatatagaacaatctaaccgattttatttgcaattgagaaacaaatatacttatgatttgagttattttgatatggactatatacgtgccttagaatatggaatgcctccaacggctggagaaggagtaggaatagatcgtcttgttatgatacttacaaataaagattcaattcgagatgtattactttttcctttgctgcgtagccggaaattttaa

SEQ ID NO: 30306 - protein, 496 aa, Candidatus Portiera aleyrodidarum
MIIKNYLIKDRLNKLQVLSKTANKAGKSAFYNKFRRTSLAKSLKKNFGEKNKKQLVNFKLTTAVAGRIMRKRGPFIVVQDVSSNIQLYIDKKTISNEIHKDIKDWDIGDIIGAIGDIDKSKIGELYLLVKKAYILTKSIRHLPSKFHGIKDQEIRYRHRYLDLIMNKEVRKTFKIRTRIISALRKFFYELYFLEAETPILHSMPGGAIAKPFETYNYSLNIKLYLRIAPELYLKRLVVGGFERVFEINKNFRNEGISTWHNPEFTMLEFYWAFATYKDLMEITEHMIRFVANEALGTTSIYIGKILNIDLSEPFDCLSMRDSLIKYGKTFSINNSDFYDLENLLFLSKRIGLTVANYNNYGNLLNKLFEVIVERKLIKPTFVTDYPVEVSPLARSKDSNLNITERFELFIGGREIANGFSELNDYIEQSNRFYLQLRNKYTYDLSYFDMDYIRALEYGMPPTAGEGVGIDRLVMILTNKDSIRDVLLFPLLRSRKF

SEQ ID NO: 30307 - DNA, 1518 bp, Citrobacter freundii
  CDS (1)..(1518): transl_table=11
atgtctgaacaacacgtacagggcgctgacgcgatagccgaccttaacaatgaactgaaaacgcgccgtgagaagctggcgagcctgcgcgagcaggggatccccttcccgaacgatttccgtcgcgatcatacctcagaccaactgcatgctgacttcgacgcgaaagaaaacgaagagctggaagcgctgaacattgaggtttccgttgctggccgtatgatgacccgccgtattatgggtaaagcatcattcgttacgctgcaggatgttggcggccgtattcagctgtacgttgctcgcgacgatctgccggaaggcgtctacaacgagcagttcaaaaaatgggatctgggcgatatcctcggcgcgaaaggtaagttgttcaagaccaagaccggtgagctgtctatccactgtaccgagctgcgtctgctgacgaaagcgttgcgcccattgcctgataaattccacggtctgcaggatcaggaagcgcgctatcgtcaacgctacctggacctcatctctaacgatgaatcccgcaatacctttaaagtgcgttcacagattatggctggtatccgccagttcatggttggtcgtggctttatggaagttgaaaccccgatgatgcaggtgatccctggcggggcggcagcgcgtccgtttatcacccatcataacgcgctggatctggacatgtacctgcgtatcgcgccggaactgtacctcaagcgcctggtggttggcggcttcgaacgcgtattcgaaattaaccgtaacttccgtaacgaaggcatctctgttcgccataatccagagttcaccatgatggaactctacatggcttatgcggactacaaagatctgatcgaactgaccgaatcgctgttccgtacgctggcgcagaacgttctgggaacgactgaagtgccttacggcgaagaagtctttgactttggtaagccgttcgaaaaactgacgatgcgcgaagcgattcagaaataccgtccggaaaccaacatggccgatctggataacttcgattctgcaaaagcgattgcggaatctatcggcatcaaagttgagaagagctggggtctgggtcgtatcgtgaccgagatctttgaagaagttgcagaagcgcacctgattcaaccgaccttcattaccgagtacccgacagaagtttctccgctggcgcgtcgtaatgatgaaaatccggaaatcaccgatcgcttcgaattcttcattggcggacgtgaaatcggtaacggcttcagcgagctgaacgatgcagaagatcaggcgcagcgtttccaggatcaggttaacgccaaagatgcaggtgacgacgaagcgatgttctacgacgaagactatgttaccgctctggaacatggtctgccgccgactgcgggcctgggcattggtatcgaccgtatggttatgctgttcacaaacagccatactatccgcgacgtaatcctgttcccggcaatgcgcccggttaagtaa

SEQ ID NO: 30308 - protein, 505 aa, Citrobacter freundii
MSEQHVQGADAIADLNNELKTRREKLASLREQGIPFPNDFRRDHTSDQLHADFDAKENEELEALNIEVSVAGRMMTRRIMGKASFVTLQDVGGRIQLYVARDDLPEGVYNEQFKKWDLGDILGAKGKLFKTKTGELSIHCTELRLLTKALRPLPDKFHGLQDQEARYRQRYLDLISNDESRNTFKVRSQIMAGIRQFMVGRGFMEVETPMMQVIPGGAAARPFITHHNALDLDMYLRIAPELYLKRLVVGGFERVFEINRNFRNEGISVRHNPEFTMMELYMAYADYKDLIELTESLFRTLAQNVLGTTEVPYGEEVFDFGKPFEKLTMREAIQKYRPETNMADLDNFDSAKAIAESIGIKVEKSWGLGRIVTEIFEEVAEAHLIQPTFITEYPTEVSPLARRNDENPEITDRFEFFIGGREIGNGFSELNDAEDQAQRFQDQVNAKDAGDDEAMFYDEDYVTALEHGLPPTAGLGIGIDRMVMLFTNSHTIRDVILFPAMRPVK

SEQ ID NO: 30309 - DNA, 1518 bp, Escherichia coli O157
  CDS (1)..(1518): transl_table=11
atgtctgaacaacacgcacagggcgctgacgcggtagtcgatcttaacaatgaactgaaaacgcgtcgtgagaagctggcgaacctgcgtgagcagggaattgccttcccgaacgatttccgtcgcgatcatacctctgaccaattgcacgcagaattcgacggtaaagagaacgaagaacttgaagcgctgaacatcgaagtcgccgttgctggccgcatgatgacccgccgtattatgggtaaagcctcttttgttaccctgcaggacgttggcggtcgtattcagctgtacgttgcccgtgacgatcttccggaaggcgtttacaacgagcagttcaaaaaatgggacctcggcgacatcctcggcgcgaaaggtaaactgttcaaaaccaaaaccggcgaactgtctatccactgtaccgagttgcgtctgctgaccaaagcactgcgtccgctgccggataaattccacggcttgcaggatcaggaagcgcgctatcgtcagcgttatctcgatctcatctccaacgatgaatcccgcaacacctttaaagtgcgctcgcagatcctctctggtattcgccagttcatggtgaaccgcggctttatggaagttgaaacgccgatgatgcaggtgatccctggcggtgccgctgcgcgtccgtttatcacccaccataacgcgctggatctcgacatgtacctgcgtatcgcgccggaactgtacctcaagcgtctggtggttggtggcttcgagcgtgtattcgaaatcaaccgtaacttccgtaacgaaggtatttccgtacgtcataacccagagttcaccatgatggaactctatatggcttacgcagattacaaagatctgatcgagctgaccgaatcgctgttccgtactctggcacaggatattctcggtaagacggaagtgacctacggcgacgtgacgctggatttcggtaaaccgttcgaaaaactgaccatgcgtgaagcgattaagaaatatcgcccggaaaccgacatggcggatctggacaacttcgactctgcaaaagcgattgttgaatctatcggtatccacgttgagaagagctggggtctgggccgtatcgttaccgagatcttcgaagaagtggcagaagcacatctgattcagccgaccttcattactgaatatccggcagaagtttctccgctggcgcgtcgtaacgacgttaacccggaaatcacagaccgctttgagttcttcattggtggtcgtgaaatcggtaacggctttagcgagctgaatgatgcggaagatcaggcgcaacgcttcctggatcaggttgccgcgaaagatgcaggtgacgacgaagcgatgttctacgacgaagattacgtcaccgcactggaacatggcttaccgccgacagcaggtctggggattggtatcgaccgtatggtaatgctgttcaccaacagccataccatccgcgacgttattctgttcccggcgatgcgtccggtgaaataa

SEQ ID NO: 30310 - protein, 505 aa, Escherichia coli O157
MSEQHAQGADAVVDLNNELKTRREKLANLREQGIAFPNDFRRDHTSDQLHAEFDGKENEELEALNIEVAVAGRMMTRRIMGKASFVTLQDVGGRIQLYVARDDLPEGVYNEQFKKWDLGDILGAKGKLFKTKTGELSIHCTELRLLTKALRPLPDKFHGLQDQEARYRQRYLDLISNDESRNTFKVRSQILSGIRQFMVNRGFMEVETPMMQVIPGGAAARPFITHHNALDLDMYLRIAPELYLKRLVVGGFERVFEINRNFRNEGISVRHNPEFTMMELYMAYADYKDLIELTESLFRTLAQDILGKTEVTYGDVTLDFGKPFEKLTMREAIKKYRPETDMADLDNFDSAKAIVESIGIHVEKSWGLGRIVTEIFEEVAEAHLIQPTFITEYPAEVSPLARRNDVNPEITDRFEFFIGGREIGNGFSELNDAEDQAQRFLDQVAAKDAGDDEAMFYDEDYVTALEHGLPPTAGLGIGIDRMVMLFTNSHTIRDVILFPAMRPVK

SEQ ID NO: 30311 - DNA, 1518 bp, Escherichia coli O6
  CDS (1)..(1518): transl_table=11
atgtctgaacaacacgcacagggcgctgacgcggtagtcgatcttaacaatgaactgaaaacgcgtcgtgagaagctggcgaacctgcgtgagcaggggattgccttcccgaacgatttccgtcgcgatcatacctctgaccaattgcacgcagaattcgacggtaaagagaacgaagaactggaagcgctgaacatcgaagtcgccgttgctggccgcatgatgacccgtcgtattatgggtaaagcgtctttcgttaccctgcaggacgttggcggtcgcattcagttgtacgttgcccgtgacgatctgccggaaggcgtttacaacgagcagttcaaaaaatgggacctcggcgatatcctcggcgcgaaaggtaaactgttcaaaaccaaaaccggcgaactgtctatccactgtaccgagctgcgtctgctgaccaaagcactgcgtccgctgccggataaattccacggcttgcaggatcaggaagcgcgctatcgtcagcgttatctggatctcatctctaacgatgaatcccgcaacacctttaaagtgcgctcgcagatcctctctggtattcgccagttcatggtgaaccgcggctttatggaagttgaaacgccgatgatgcaggtgatccctggcggtgccgctgcgcgtccgtttatcactcaccataacgcgctggatctcgacatgtacctgcgtatcgcgccggaactgtacctcaagcgtctggtggtcggtggcttcgagcgtgtattcgaaatcaaccgtaacttccgtaacgaaggtatttccgtacgtcataacccagagttcaccatgatggaactctatatggcttacgcagattacaaagatcttatcgagctgaccgaatcgctgttccgtactctggcacaggatattctcggtaagacggaagtgacctacggcgacgtaacgctggacttcggtaaaccgttcgaaaaactgaccatgcgtgaagcgatcaagaaatatcgcccggaaactgacatggcggatctggacaacttcgactctgcgaaagcgattgctgaatctatcggcatccacgttgagaaaagctggggtctgggccgtatcgttaccgagatcttcgaagaagtggcagaagcacatctgatccagccgaccttcattactgaatatccggcagaagtttctcctctggcgcgtcgtaacgacgttaacccggaaatcacagaccgctttgagttcttcattggtgggcgtgaaatcggtaacggctttagcgaactgaatgacgcggaagatcaggcgcagcgcttcctggatcaggttgccgcgaaagatgcaggtgacgacgaagcgatgttctacgacgaagattatgtcaccgcactggaacatggcttaccaccgacagccggtctgggaattggtatcgaccgtatggtaatgctgttcaccaacagccataccatccgcgacgttattctgttcccggcgatgcgtccggtgaaataa

SEQ ID NO: 30312 - protein, 505 aa, Escherichia coli O6
MSEQHAQGADAVVDLNNELKTRREKLANLREQGIAFPNDFRRDHTSDQLHAEFDGKENEELEALNIEVAVAGRMMTRRIMGKASFVTLQDVGGRIQLYVARDDLPEGVYNEQFKKWDLGDILGAKGKLFKTKTGELSIHCTELRLLTKALRPLPDKFHGLQDQEARYRQRYLDLISNDESRNTFKVRSQILSGIRQFMVNRGFMEVETPMMQVIPGGAAARPFITHHNALDLDMYLRIAPELYLKRLVVGGFERVFEINRNFRNEGISVRHNPEFTMMELYMAYADYKDLIELTESLFRTLAQDILGKTEVTYGDVTLDFGKPFEKLTMREAIKKYRPETDMADLDNFDSAKAIAESIGIHVEKSWGLGRIVTEIFEEVAEAHLIQPTFITEYPAEVSPLARRNDVNPEITDRFEFFIGGREIGNGFSELNDAEDQAQRFLDQVAAKDAGDDEAMFYDEDYVTALEHGLPPTAGLGIGIDRMVMLFTNSHTIRDVILFPAMRPVK

SEQ ID NO: 30313 - DNA, 1518 bp, Salmonella typhi
  CDS (1)..(1518): transl_table=11
atgtctgaacaaaacgcacagggcgctgacgaggtagtcgatcttaacaatgaaatgaaggcacgtcgcgagaagctggctgcactgcgtgagcagggtatcccgttcccgaacgatttccgtcgtgaccgtacctcagaccaactgcacgcagagtttgacgcgaaagaagctgaagaactggaagcgctgaatattgaagtgtccgtcgcgggccgtatgatgactcgccgtattatgggtaaagcctcttttgttaccctgcaagacgtaggcggccgcattcagctgtatgtggcgcgcgatgatctgccggaaggcgtttacaacgagcagttcaagaagtgggatcttggcgatatcctcggcgcgaaaggtaagctgttcaaaaccaaaaccggcgagctgtctatccactgcaccgaactgcgcctgctgacgaaagcgctgcgtccgttgccggataaattccacggcctgcaggaccaggaagcgcgctatcgccagcgttatctggatctcatctctaacgatgaatcccgtaataccttcaaaacccgttcgaagatcctggccggtattcgccagtttatggttgctcgcggctttatggaagtcgaaacgccgatgatgcaggtgatcccaggcggcgcgtctgcccgtccgtttatcacccatcacaacgcgctggatctggacatgtacctgcgtatcgcgccagaactgtacctgaagcgtctggtggttggcggcttcgaacgcgtattcgaaattaaccgtaacttccgtaacgaaggcatctccgtgcgccataatcctgagttcaccatgatggaactctatatggcgtatgcggactacaaagacctgatcgagctgactgagtctctgttccgtacgctggcgcaggatgttctgggcaccacccaggttccatacggtgatgaagtgtttgacttcggtaagccgttcgaaaaactgaccatgcatgaagcgatcaagaaatatcgtccggaaacggatatggctgatctggacaacttcgactccgcgaaggcgattgctgaaagcatcggcattcacgtcgagaagagctggggtctgggccgtatcgtcaccgagatctttgacgaagtcgctgaagcgcatctgattcagccgaccttcatcaccgaatatccggctgaagtgtctccgctggcgcgtcgtaatgatgtgaacccggaaatcactgaccgcttcgagttctttatcggcggtcgtgaaatcggcaatggctttagcgagttgaacgatgcggaagaccaggcgcagcgtttcctggatcaggttaatgcaaaagcggcgggcgacgacgaagccatgttctacgacgaagactacgtgacggcgctggaacacggtttaccgccgacagcgggtctgggaattggtatcgaccgtatggtgatgctgtttactaacagccacacgattcgcgacgttattctgttcccggcgatgcgtccggtgaaataa

SEQ ID NO: 30314 - protein, 505 aa, Salmonella typhi
MSEQNAQGADEVVDLNNEMKARREKLAALREQGIPFPNDFRRDRTSDQLHAEFDAKEAEELEALNIEVSVAGRMMTRRIMGKASFVTLQDVGGRIQLYVARDDLPEGVYNEQFKKWDLGDILGAKGKLFKTKTGELSIHCTELRLLTKALRPLPDKFHGLQDQEARYRQRYLDLISNDESRNTFKTRSKILAGIRQFMVARGFMEVETPMMQVIPGGASARPFITHHNALDLDMYLRIAPELYLKRLVVGGFERVFEINRNFRNEGISVRHNPEFTMMELYMAYADYKDLIELTESLFRTLAQDVLGTTQVPYGDEVFDFGKPFEKLTMHEAIKKYRPETDMADLDNFDSAKAIAESIGIHVEKSWGLGRIVTEIFDEVAEAHLIQPTFITEYPAEVSPLARRNDVNPEITDRFEFFIGGREIGNGFSELNDAEDQAQRFLDQVNAKAAGDDEAMFYDEDYVTALEHGLPPTAGLGIGIDRMVMLFTNSHTIRDVILFPAMRPVK

SEQ ID NO: 30315 - DNA, 1518 bp, Salmonella typhimurium
  CDS (1)..(1518): transl_table=11
atgtctgaacaaaacgcacagggcgctgacgaggtagtcgatcttaacaatgaaatgaaggcacgtcgcgagaagctggctgcactgcgtgagcagggtatcccgttcccgaacgatttccgtcgtgaccgtacctcagaccaactgcacgcagagtttgacgcgaaagaagctgaagaactggaagcgctgaatattgaagtgtccgtcgcgggccgtatgatgactcgccgtattatgggtaaagcctcttttgttaccctgcaagacgtaggcggccgcattcagctgtatgtggcgcgcgatgatctgccggaaggcgtttacaacgagcagttcaagaagtgggatcttggcgatatcctcggcgcgaaaggtaagctgttcaaaaccaaaaccggcgagctgtctatccactgcaccgaactgcgcctgctgacgaaagcgctgcgtccgttgccggataaattccacggcctgcaggaccaggaagcgcgctatcgccagcgttatctggatctcatctctaacgatgaatcccgtaacaccttcaaaacccgttcgaagatcctggccggtattcgccagtttatggttgctcgcggctttatggaagtcgaaacgccgatgatgcaggtgatcccaggcggcgcgtctgcccgtccgtttatcacccatcacaacgcgctggatctggacatgtacctgcgtatcgcgccggaactgtacctcaagcgtctggtggttggcggcttcgaacgcgtattcgaaattaaccgtaacttccgtaacgaaggcatctccgtgcgccataatcctgagttcaccatgatggaactctatatggcgtatgcggactacaaagacctgatcgagctgacggagtctctgttccgtacgctggcgcaggatgttctgggcaccacccaggttccgtacggtgatgaagtgtttgacttcggtaagccgttcgaaaaactgaccatgcgtgaagcgatcaagaaatatcgtccggaaacagatatggctgatctggacaacttcgattccgcgaaggcgattgctgaaagcatcggcattcacgtcgagaagagctggggtctgggccgtatcgtcaccgagatctttgacgaagtcgctgaagcgcatctgattcagccgaccttcatcaccgaatatccggctgaagtgtctccactggcgcgtcgtaatgatgtgaacccggaaatcactgaccgcttcgagttctttatcggcggtcgtgaaatcggcaatggctttagcgagttgaacgatgcggaagaccaggcgcagcgtttcctggatcaggttaatgcaaaagcggcgggcgacgacgaagccatgttctacgacgaagactacgtgacggcgctggaacacggtttaccgccgacagcgggtctgggaattggtatcgaccgtatggtgatgctgtttactaacagccacacgattcgcgacgttattctgttcccggcgatgcgtccggtgaaataa

SEQ ID NO: 30316 - protein, 505 aa, Salmonella typhimurium
MSEQNAQGADEVVDLNNEMKARREKLAALREQGIPFPNDFRRDRTSDQLHAEFDAKEAEELEALNIEVSVAGRMMTRRIMGKASFVTLQDVGGRIQLYVARDDLPEGVYNEQFKKWDLGDILGAKGKLFKTKTGELSIHCTELRLLTKALRPLPDKFHGLQDQEARYRQRYLDLISNDESRNTFKTRSKILAGIRQFMVARGFMEVETPMMQVIPGGASARPFITHHNALDLDMYLRIAPELYLKRLVVGGFERVFEINRNFRNEGISVRHNPEFTMMELYMAYADYKDLIELTESLFRTLAQDVLGTTQVPYGDEVFDFGKPFEKLTMREAIKKYRPETDMADLDNFDSAKAIAESIGIHVEKSWGLGRIVTEIFDEVAEAHLIQPTFITEYPAEVSPLARRNDVNPEITDRFEFFIGGREIGNGFSELNDAEDQAQRFLDQVNAKAAGDDEAMFYDEDYVTALEHGLPPTAGLGIGIDRMVMLFTNSHTIRDVILFPAMRPVK

SEQ ID NO: 30317 - DNA, 1518 bp, Shigella flexneri
  CDS (1)..(1518): transl_table=11
atgtctgaacaacacgcacagggcgctgacgcggtagtcgatcttaacaatgaactgaaaacgcgtcgtgagaagctggcgaacctgcgtgagcagggaattgccttcccgaacgatttccgtcgcgatcatacctctgaccaattgcacgcagaattcgacggtaaagagaacgaagaactggaagcgctgaacatcgaagtcgccgttgctggccgcatgatgacccgccgtattatgggtaaagcgtctttcgttaccctgcaggatgtgggtggccgcattcagctgtacgttgcccgtgacgatctgccggaaggcgtttacaacgagcagttcaaaaaatgggacctcggcgacatcctcggcgcgaaaggtaaactgttcaaaaccaaaaccggcgaactgtctatccactgtaccgagctgcgtctgctgaccaaagcactgcgtccgctgccggataaattccacggcttgcaggatcaggaagcgcgctatcgtcagcgttatctggatctcatctctaacgatgaatcccgtaacacctttaaagtacgctcgcagatcctctctggtattcgccagttcatggtgaaccgcggctttatggaagttgaaacgccgatgatgcaggtgatcccaggcggtgccgctgcgcgtccgtttatcacccaccataacgcgctggatctcgacatgtacctgcgtatcgcgccggaactgtacctcaagcgtctggtggtcggtggcttcgagcgtgtattcgaaatcaaccgtaacttccgtaacgaaggtatttccgtacgtcataacccagagttcaccatgatggaactctacatggcttacgcagattacaaagatctgatcgagctgaccgaatcgctgttccgtactctggcacaggatattctcggtaagacggaagtgacctacggcgacgtgacgctggacttcggtaaaccgttcgaaaaactgaccatgcgtgaagcgatcaagaaatatcgcccggaaaccgacatggcggatctggataacttcgactctgcgaaagcgattgctgaatctatcggtatccacgttgagaagagctggggtctgggccgtatcgttaccgagatcttcgaagaagtggcagaagcacatctgattcagccgaccttcattactgaatatccggcagaagtttctccgctggcgcgtcgtaacgacattaacccggaaatcacagaccgctttgagttcttcatcggtggtcgtgaaatcggtaacggctttagcgagctgaatgacgcggaagatcaggcgcaacgcttcctggatcaggttgccgcgaaagacgcaggtgacgacgaagcgatgttctacgatgaagattacgttaccgcactggaacatggcttaccgccgacagcaggtctggggattggcatcgaccgtatggtaatgctgttcaccaacagccataccatccgcgacgttattctgttcccggcgatgcgtccggtgaaataa

SEQ ID NO: 30318 - protein, 505 aa, Shigella flexneri
MSEQHAQGADAVVDLNNELKTRREKLANLREQGIAFPNDFRRDHTSDQLHAEFDGKENEELEALNIEVAVAGRMMTRRIMGKASFVTLQDVGGRIQLYVARDDLPEGVYNEQFKKWDLGDILGAKGKLFKTKTGELSIHCTELRLLTKALRPLPDKFHGLQDQEARYRQRYLDLISNDESRNTFKVRSQILSGIRQFMVNRGFMEVETPMMQVIPGGAAARPFITHHNALDLDMYLRIAPELYLKRLVVGGFERVFEINRNFRNEGISVRHNPEFTMMELYMAYADYKDLIELTESLFRTLAQDILGKTEVTYGDVTLDFGKPFEKLTMREAIKKYRPETDMADLDNFDSAKAIAESIGIHVEKSWGLGRIVTEIFEEVAEAHLIQPTFITEYPAEVSPLARRNDINPEITDRFEFFIGGREIGNGFSELNDAEDQAQRFLDQVAAKDAGDDEAMFYDEDYVTALEHGLPPTAGLGIGIDRMVMLFTNSHTIRDVILFPAMRPVK

SEQ ID NO: 30319 - DNA, 1518 bp, Escherichia coli O157
  CDS (1)..(1518): transl_table=11
  misc_feature (126)..(126): s is g or c
atgtctgaacaagaaacacggggagccaatgaggctattgattttaacgatgaactgagaaatcgccgcgaaaaactggcggcactacgtcagcaaggtgtggcgtttcccaatgattttcgccgsgaccatacctctgaccagttgcacgaagagtttgatgcgaaggataaccaggaactggaatccttaaacattgaagtctcggttgctggccgaatgatgacccgtcgtatcatggggaaagcctcctttgtaacgttgcaggatgtcggtggccgtattcaactgtacgtcgcacgagatagcctgccagaaggtgtttataacgatcagtttaaaaaatgggatctgggtgacattatcggtgcccgcggtacgctgtttaagacgcaaacgggtgagctttccattcactgtactgagttgcgcctgctgactaaagcactacgtcctttaccagataaattccatggtctgcaggatcaggaagtccgttatcgtcaacgttatctggacctcatcgctaacgataaatcccgtcaaacgtttgttgtccgttcaaaaattctggccgctatccgccagttcatggtcgcgcgcggctttatggaagtagaaaccccgatgatgcaggtaattccaggtggggcatctgctcgcccgtttattacccatcataatgctctggatttagatatgtatctgcgtatcgcgccggagctgtatctgaaacgtctggttgtaggcggttttgaacgggtattcgaaatcaaccgtaacttccgtaatgaaggtatttctgttcgccataatcctgagttcacaatgatggaactctacatggcgtatgcggattaccacgatttgattgaactgacagagtccctgttccgcaccctggcacaagaggttctgggtaccactaaagtcacttatggcgagcatgtgtttgatttcggcaaaccgtttgaaaaactcaccatgcgcgaagcaatcaaaaaatatcgtccagaaaccgatatggccgacctggataattttgatgctgctaaagcattagctgaatctatcggtattacggtagagaaaagctgggggctgggacgtattgtcacggagatctttgatgaagtggcagaagcacatctgattcagccaacctttattacggaatatccggcagaagtgtcaccgctggcacgccgtaatgatgttaacccggaaatcaccgaccgttttgaattcttcatcggtggtcgtgaaatcggtaatggttttagcgaattaaacgacgcagaagatcaggctgaacgtttccaggaacaggttaacgctaaagccgcaggtgacgacgaagccatgttctatgacgaagattacgtgactgcgctggaatatggtctgccgccaaccgctggtctgggtattggtatcgaccgaatgattatgctgtttactaacagccatactattcgcgacgttattctcttcccggcgatgcgcccacagaaataa

SEQ ID NO: 30320 - protein, 505 aa, Escherichia coli O157
MSEQETRGANEAIDFNDELRNRREKLAALRQQGVAFPNDFRRDHTSDQLHEEFDAKDNQELESLNIEVSVAGRMMTRRIMGKASFVTLQDVGGRIQLYVARDSLPEGVYNDQFKKWDLGDIIGARGTLFKTQTGELSIHCTELRLLTKALRPLPDKFHGLQDQEVRYRQRYLDLIANDKSRQTFVVRSKILAAIRQFMVARGFMEVETPMMQVIPGGASARPFITHHNALDLDMYLRIAPELYLKRLVVGGFERVFEINRNFRNEGISVRHNPEFTMMELYMAYADYHDLIELTESLFRTLAQEVLGTTKVTYGEHVFDFGKPFEKLTMREAIKKYRPETDMADLDNFDAAKALAESIGITVEKSWGLGRIVTEIFDEVAEAHLIQPTFITEYPAEVSPLARRNDVNPEITDRFEFFIGGREIGNGFSELNDAEDQAERFQEQVNAKAAGDDEAMFYDEDYVTALEYGLPPTAGLGIGIDRMIMLFTNSHTIRDVILFPAMRPQK

SEQ ID NO: 30321 - DNA, 1545 bp, Escherichia coli O6
  CDS (28)..(1545): transl_table=11
ttgaaagctggatttagaggaaccaaaatgtctgaacgagaaacacggggagccaatgaggctattgattttaacgatgaactgagaaatcgccgcgaaaaactggcggcactacgtcagcaaggtgtggcgtttcccaatgattttcgccgcgaccatacctctgaccagttgcacgaagagtttgatgcgaaggataaccaggaactggaatccttaaacattgaagtctcggttgctggccgaatgatgacccgtcgtattatggggaaagcctcctttgtaacgttgcaggatgtcggtggccgtattcaactgtacgttgcaagagatagcctgccagaaggtgtttataacgatcagtttaaaaaatgggatctgggtgacattatcggtgcccgcggtacgctgtttaagacgcaaacgggtgagctttccattcactgtactgagctgcgcctgctgactaaagcactacgtcctttaccagataaattccatggtctgcaggatcaggaagtccgttatcgtcaacgttatctggacctcatcgctaacgataaatcccgtcaaacgtttgttgtccgttcaaaaattctggccgctatccgtcagttcatggtcgcgcgcggctttatggaagtagaaaccccgatgatgcaggtaattccaggtggggcatctgctcgcccgtttattacccatcataacgctctggatttagatatgtacctgcgtatcgcgccggagctgtatctgaaacgtctggttgtaggcggttttgaacgggtattcgaaatcaaccgtaacttccgtaatgaaggtatttctgttcgccataatcctgagttcacaatgatggaactctacatggcatatgcggattaccacgatttgattgaactgacggagtcactgttccgcaccctggcacaagaggtactgggtaccactaaagtcacttatggcgagcatgtgtttgatttcggcaaaccgtttgaaaaactcaccatgcgcgaagcaatcaaaaaatatcgtccagaaaccgatatggcggatctggataattttgatgctgctaaagcattagctgaatctatcggtattacggtagagaaaagctgggggctgggacgtattgttacggagatctttgatgaagtggcagaagcacatctgattcagccaacctttattacggaatatccggcagaagtgtccccgctggcgcgccgtaatgatgttaacccggaaatcaccgaccgttttgaattcttcatcggtggtcgtgaaattggtaatggttttagcgaattaaacgacgcagaagatcaggctgaacgtttccaggaacaggttaacgctaaagctgcaggtgacgacgaagccatgttctatgacgaagattacgtgactgcgctggaatatggtctgccgccaaccgctggtctgggtattggtatcgaccgaatgattatgctgtttacaaacagtcatactattcgcgacgttattctcttcccggcgatgcgcccacagaaataa

SEQ ID NO: 30322 - protein, 505 aa, Escherichia coli O6
MSERETRGANEAIDFNDELRNRREKLAALRQQGVAFPNDFRRDHTSDQLHEEFDAKDNQELESLNIEVSVAGRMMTRRIMGKASFVTLQDVGGRIQLYVARDSLPEGVYNDQFKKWDLGDIIGARGTLFKTQTGELSIHCTELRLLTKALRPLPDKFHGLQDQEVRYRQRYLDLIANDKSRQTFVVRSKILAAIRQFMVARGFMEVETPMMQVIPGGASARPFITHHNALDLDMYLRIAPELYLKRLVVGGFERVFEINRNFRNEGISVRHNPEFTMMELYMAYADYHDLIELTESLFRTLAQEVLGTTKVTYGEHVFDFGKPFEKLTMREAIKKYRPETDMADLDNFDAAKALAESIGITVEKSWGLGRIVTEIFDEVAEAHLIQPTFITEYPAEVSPLARRNDVNPEITDRFEFFIGGREIGNGFSELNDAEDQAERFQEQVNAKAAGDDEAMFYDEDYVTALEYGLPPTAGLGIGIDRMIMLFTNSHTIRDVILFPAMRPQK

SEQ ID NO: 30323 - DNA, 1536 bp, Methanosarcina acetivorans
  CDS (1)..(1536): transl_table=11
atgactatggaaattaacaatacggacccgtctgaaaatatgcctctgcctgatgatgttgatttatcgggctccagggcttttgatgactcaaaacttgcaaaattaaacggtatcataagccagggactcgatccctatccctacagattcgaaaagaacggggatatctgcgagatcctggtaaagttcgaggactttgaaaagaacgaaggcttatctgtccggactgcaggcaggctctacaatatcagaaagcacggaaaaatgatatttgccgatctaggggaccagaccggcaggattcaggttcttatcaggaaagggaacctccctgacgaggaattcgcgactttcaagaaccttatggattccggagatatcataggcattcagggcgagcttttcaggacaaaaagaggggaaaattcaatcagcgtatccgagttttctctgctctccaaatccctctgcgccctccccgagaagttccacggcttaaaagatgttgaaacaaggtacaggaagagataccttgacctcatagtcaatgccgaaaagagggagattttcgtaatgaggagcaagctcatctcggaaatcagaaggttccttgctgacagggaatttctggagtttgaaaccccaatcctccagaccgtgtacggaggagcaaatgcaaggcccttcaagactttccacaactgcctcgggcagaacctcttcctcaggatcgctccggaactttacctcaagaggcttgtcgtcggcggctacgagaaggtctttgagatttccaaaaacttcagaaacgaagacatcgacaccacccacaaccccgagttcacaatgatcgaggtctacgaggcttaccgggattataacgatatgatggatttaaccgaagccctgatctcggaactcgtgttcaggctgacaggcggctacgaagtcaaaatgggcgaaaacacaatcaacctccgctccccctggaagaggatttccatggaaggcgccttaaaagagtatgcgggtcttgacgtcttttcccattcgcttgaagaactgaagcaaatcgcaatccagaacaggatcgaggactacgaaaaggcaaagagtcatggggagttccttgccctgctttttgaaggtcttgtagaagacaagctcgtaaacccgactttcatctacgacttcccggttgaaaactcccctctcgctaaaaaccacagagaaaaagaaggttttgttgagcgtttcgaactcttcctcaacggctgggaactggcaaacggctattcagaattaaacgaccccctcgaacaggaaaagaggttcgaagaacaggacaagaaaagaaagctcggagaccttgaagcccagaccgttgattatgacttcataaacgccctcggatacggcctgcccccgaccggtggtatggggctcggaatcgaccgccttacaatgattcttgcgggccttgagtccatcaaggaagtaatccttttcccgcagatgaaaagggaggactga

SEQ ID NO: 30324 - protein, 511 aa, Methanosarcina acetivorans
MTMEINNTDPSENMPLPDDVDLSGSRAFDDSKLAKLNGIISQGLDPYPYRFEKNGDICEILVKFEDFEKNEGLSVRTAGRLYNIRKHGKMIFADLGDQTGRIQVLIRKGNLPDEEFATFKNLMDSGDIIGIQGELFRTKRGENSISVSEFSLLSKSLCALPEKFHGLKDVETRYRKRYLDLIVNAEKREIFVMRSKLISEIRRFLADREFLEFETPILQTVYGGANARPFKTFHNCLGQNLFLRIAPELYLKRLVVGGYEKVFEISKNFRNEDIDTTHNPEFTMIEVYEAYRDYNDMMDLTEALISELVFRLTGGYEVKMGENTINLRSPWKRISMEGALKEYAGLDVFSHSLEELKQIAIQNRIEDYEKAKSHGEFLALLFEGLVEDKLVNPTFIYDFPVENSPLAKNHREKEGFVERFELFLNGWELANGYSELNDPLEQEKRFEEQDKKRKLGDLEAQTVDYDFINALGYGLPPTGGMGLGIDRLTMILAGLESIKEVILFPQMKRED

SEQ ID NO: 30325 - DNA, 1776 bp, Saccharomyces cerevisiae
  CDS (1)..(1776)
atgtctcaacaagataatgtcaaagccgccgctgaaggtgttgctaacctacatctcgacgaagctaccggggaaatggtctccaagtctgaattgaagaagcgtatcaagcaaagacaagtcgaagctaaaaaggccgccaaaaaggctgccgctcaaccaaaaccggcttccaaaaaaaaaacagatttgttcgctgacctggatccatcgcaatatttcgaaacaagatctcgccaaattcaagaattgagaaagactcacgaaccaaatccatacccacacaagtttcacgtttctatatccaatcctgagttcttggccaaatatgcgcatttgaaaaaaggtgaaaccttacctgaagagaaggtttcaattgctggtagaattcatgccaaaagagaatctggctccaaattgaaattctatgttcttcacggtgatggtgttgaagttcaattgatgtcccaattgcaggactactgcgacccagactcttacgaaaaggatcacgaccttttgaaaaggggtgatatcgttggtgtcgagggttacgtcggaagaactcaaccaaagaaaggtggtgaaggtgaagtttccgtcttcgttagcagagtgcaattattgacaccatgtttgcacatgttacctgccgaccactttggtttcaaagaccaggaaaccagatacagaaagcgttatttggatttgatcatgaacaaagacgccagaaaccgttttattacccgttctgaaattatccgttacatcagaagatttttggaccaaagaaagtttattgaagtagaaactccaatgatgaacgttattgctggtggtgctaccgctaagccatttattacccaccataatgaccttgatatggacatgtacatgagaattgctccagaattgttcttgaaacaattggttgtcggtggtttggatcgtgtttacgaaattggtagacaattcagaaatgaaggtatcgatatgacacataatccagaattcaccacttgtgagttttatcaagcctacgctgatgtttatgatttgatggatatgactgaattgatgttttcagaaatggtcaaggagatcactggttcttatattatcaaataccatccggaccctgctgatccagccaaagaactagaattgaacttttctagaccatggaagagaatcaacatgattgaagaattagaaaaggtattcaacgttaagttcccatctggtgatcaattacatacagctgagactggtgaatttttgaaaaagattcttgtcgacaacaaattagaatgtccacctccactaactaatgctcgtatgttagataagcttgtcggtgaattagaagatacatgtatcaacccaactttcatttttggccaccctcaaatgatgtctccattagccaagtactcaagagatcaaccgggtctatgtgagcgtttcgaggtctttgtagctacaaaggaaatttgtaatgcctacactgaattgaacgatccatttgaccaaagggcacgtttcgaagaacaagctagacaaaaggatcaaggtgatgacgaagctcaattagtcgatgaaaccttctgtaatgctctagaatacggtttaccaccaactggtggttggggttgtggtattgatagactggccatgttcttgaccgactccaacaccattagagaagtcttattgttcccaactttgaagcctgatgttttgagagaggaagtcaaaaaggaagaagaaaattaa

SEQ ID NO: 30326 - protein, 591 aa, Saccharomyces cerevisiae
MSQQDNVKAAAEGVANLHLDEATGEMVSKSELKKRIKQRQVEAKKAAKKAAAQPKPASKKKTDLFADLDPSQYFETRSRQIQELRKTHEPNPYPHKFHVSISNPEFLAKYAHLKKGETLPEEKVSIAGRIHAKRESGSKLKFYVLHGDGVEVQLMSQLQDYCDPDSYEKDHDLLKRGDIVGVEGYVGRTQPKKGGEGEVSVFVSRVQLLTPCLHMLPADHFGFKDQETRYRKRYLDLIMNKDARNRFITRSEIIRYIRRFLDQRKFIEVETPMMNVIAGGATAKPFITHHNDLDMDMYMRIAPELFLKQLVVGGLDRVYEIGRQFRNEGIDMTHNPEFTTCEFYQAYADVYDLMDMTELMFSEMVKEITGSYIIKYHPDPADPAKELELNFSRPWKRINMIEELEKVFNVKFPSGDQLHTAETGEFLKKILVDNKLECPPPLTNARMLDKLVGELEDTCINPTFIFGHPQMMSPLAKYSRDQPGLCERFEVFVATKEICNAYTELNDPFDQRARFEEQARQKDQGDDEAQLVDETFCNALEYGLPPTGGWGCGIDRLAMFLTDSNTIREVLLFPTLKPDVLREEVKKEEEN

SEQ ID NO: 30327 - DNA, 1731 bp, Saccharomyces cerevisiae
  CDS (1)..(1731)
atgaatgtgctgttaaaaagacgcagtttaacgtttgcaccgagatggctgtggtgcaagtgtcgaagtagcaggagcaggccgtattctctggcacacgcggtcgacacaagtaagatggaggcaaccaggaggaacggtcagattgtgaaggacctgggtagatactatccgtcaatgtcagaatcagcactccacgatctttgccaggagtataaagaagtcactatcgcagactttaatgagagattcttgggcaacccagccacattacaccatgaggataatcctaatttgttacttagtattaatggcaggattaaaagcattaggttttcaggccagaagattgtttttatagatctttacaacggcagtagcggattgaagaatgatacgcaactgcagttgatcgtaaactacaataaaattggtgggagtagtgaggataaggcgaatttctcagaatatatgaactttttgaagaaaggagattatattaaggcgctcggttatcccgggttttcccaatccagagtcaagatgctgtccttgatatgtaataagctacctatagtattgtctgtttcgcaactgccgttaccttccagactgaatgatgaaaccaagatcaaatctaatagagttgttgactaccaattaaacggcactcagacactgctagtaagggcgcgtatcatcaaacttttgaggaagtttctcgacgacagaaacttcgttgaggttgaaacgcctatactgtcatcaaagtccaacggtgccatggcgaagccctttataacgtcgtccaaggacttcgaccatttggagttgcgtattgcaccagaattatggctgaagaggcttataattagtggtttacaaaaagtatacgaaataggaaaggtctttcgaaacgaaggcattgattccacgcataatgctgagttttccactttagaattctatgaaacttacatgtcaatggacgatatagtcacaaggactgaagatttgttcaaatttttgattactaacttgcaaaagttctttcaagatacccgtctgcctgtccctaagacgtttagtgaattacatctggcactatccgagaataattggaagtttagaaaagtcgaattcctgcccactttgaacaaagagcttggcattgatctaatgaactctggattggatatcaataagccgagcgaacttttgaaggctttaccgaaagacattgcgaagaagtattttccttctgcagataacactgggcaattatcttcgctgcaaatcctaaataaactatcggacgtgttcctcgagcagcgccattgtcaatcaaccttgcctacggtaatataccatcaacctgcaatattatcgcccttagccaagacggatccgcaaaataagcaagtcacgaagagattcgaagtcttcatcaaaggtaaggaatacatcaatgcttacgaagaggaaaattgcccccaattacaactgcagaagtttctacaacaaaagcagattaacgaattgacaggaaacaaaactgagaccttatcgcctgttattgactaccagtatgttgagacgatgaaatacggtatgcctccagtaggtggctttggccttggcatagatagattgtgcatgctattttgcgacaagaagaggatagaagaggttctgccctttggctgtgtggatgatgtaaacaggcagtaa

SEQ ID NO: 30328 - protein, 576 aa, Saccharomyces cerevisiae
MNVLLKRRSLTFAPRWLWCKCRSSRSRPYSLAHAVDTSKMEATRRNGQIVKDLGRYYPSMSESALHDLCQEYKEVTIADFNERFLGNPATLHHEDNPNLLLSINGRIKSIRFSGQKIVFIDLYNGSSGLKNDTQLQLIVNYNKIGGSSEDKANFSEYMNFLKKGDYIKALGYPGFSQSRVKMLSLICNKLPIVLSVSQLPLPSRLNDETKIKSNRVVDYQLNGTQTLLVRARIIKLLRKFLDDRNFVEVETPILSSKSNGAMAKPFITSSKDFDHLELRIAPELWLKRLIISGLQKVYEIGKVFRNEGIDSTHNAEFSTLEFYETYMSMDDIVTRTEDLFKFLITNLQKFFQDTRLPVPKTFSELHLALSENNWKFRKVEFLPTLNKELGIDLMNSGLDINKPSELLKALPKDIAKKYFPSADNTGQLSSLQILNKLSDVFLEQRHCQSTLPTVIYHQPAILSPLAKTDPQNKQVTKRFEVFIKGKEYINAYEEENCPQLQLQKFLQQKQINELTGNKTETLSPVIDYQYVETMKYGMPPVGGFGLGIDRLCMLFCDKKRIEEVLPFGCVDDVNRQ

SEQ ID NO: 30329 - DNA, 1530 bp, Acinetobacter sp
  CDS (1)..(1530): transl_table=11
atggcgcaaccaaacgttcaatcgacttccgaacctattctttccgaaaacgatttaattgcacagcgtcatgccaaattaaaacaaattcaagacaaagccaaagaaactggcaaaagcgtttggccgaatacctttaaacgtgagcattatgctgctgacctgcaagagcagtttaaagatattgataaggcacagattgaaggttcagacaaaacctatgtaaaagttgctggtcgtgtcatgctcaatcgtggatcatttatggtgatccaggatatgacgggtcgtatccagctctacgttgaccgtaaaggcctaccagcagatactttagaaaccattaagagtcttgaccttggcgatattattgctgcggaaggttatattgggcgttcgggtaaaggtgatctatatgttcaccttgaaggttttgagttattaaccaagtctttgcgtccactaccagataagtttcatggtctgactgatacagaggcgaaatatcgcaagcgttatcttgatttgatcgtgaacgaagaaacacgtaaaacgtttgagattcgtgctcaagttgttgctggtattcgtgcatttttgaccaatcaacgttttatggaagttgaaacgccaatgatgcatgtgattccaggtggtgcatctgcacaaccatttgtgacacatcataatgctttggatatggagctgtatttacgtattgcaccagaactttatcttaagcgtttggttgtgggtggttttgagcgtgtctttgaaatcaaccgtaacttccgtaatgaaggggtttcaacacgtcataatcctgaatttaccatgattgagttttatcaggcatatgcagattataaagatttaatgcaactgactgaaaatatgcttgaaaaacttgcattagatattttgggaacaaccgatgttccttatggcgatgaagtgtatagctttaaagggccattcaaaaaaatctcgatgtttgatgcgattttggaacataacccagatttcacccctgaaaatgtcaatgatcgtgagtttttagccaaattcactcaagacgtgcttaaagagcaagttaaacctggttttggtttaggcaagttacaaacgattgtgtttgaagaaaccgttgaaactaaattgcgtcagcctacatttattaccgaatatccagcagaaacctcaccgctggcacgtcgtaatgatgataatcctcacatcacagaccgtttcgaattctttattggtggtcgtgaacttgcaaatggtttctcggagctgaatgatccgattgatcaggcagaacgttttcaggctcaagttgccgaaaaagatgcaggtgatgatgaagccatgcattatgatgcagactttattgaagcacttgaatacggtttaccgccaacagcgggtcagggtatcgggattgatcgtctggttatgatttttgccaatgcaccaagtattcgtgatgtactgttatttccgcatatgcgtcgtaaagatgtataa

SEQ ID NO: 30330 - protein, 509 aa, Acinetobacter sp
MAQPNVQSTSEPILSENDLIAQRHAKLKQIQDKAKETGKSVWPNTFKREHYAADLQEQFKDIDKAQIEGSDKTYVKVAGRVMLNRGSFMVIQDMTGRIQLYVDRKGLPADTLETIKSLDLGDIIAAEGYIGRSGKGDLYVHLEGFELLTKSLRPLPDKFHGLTDTEAKYRKRYLDLIVNEETRKTFEIRAQVVAGIRAFLTNQRFMEVETPMMHVIPGGASAQPFVTHHNALDMELYLRIAPELYLKRLVVGGFERVFEINRNFRNEGVSTRHNPEFTMIEFYQAYADYKDLMQLTENMLEKLALDILGTTDVPYGDEVYSFKGPFKKISMFDAILEHNPDFTPENVNDREFLAKFTQDVLKEQVKPGFGLGKLQTIVFEETVETKLRQPTFITEYPAETSPLARRNDDNPHITDRFEFFIGGRELANGFSELNDPIDQAERFQAQVAEKDAGDDEAMHYDADFIEALEYGLPPTAGQGIGIDRLVMIFANAPSIRDVLLFPHMRRKDV

SEQ ID NO: 30331 - DNA, 1500 bp, Agrobacterium tumefaciens
  CDS (1)..(1500): transl_table=11
atgaccgacaccaagaccgaaaccaccgccctctcctccgacgcgacagaagtgcgccgccagaaacttgcgctgctgcgcgagcagatcggcgacgtctatccggcgcatttccaccgcacgctgagcaatgccgagcttgcggaaaaatatgccgatatcgaagccgacgttgagaccggcgatacggtgacggtggcgggtcgcgtttattcctcgcgcaattccggcatgttcatggatatccatgacgcctcgggcaaggtgcagatcttctcccacaaggatacgacaccggaagcggcgcgcaacctgctgccgatgatcgatattggcgacatcatcggcgtgaccggcaaggtgcgccgcaccaagcgtggcgagctgacgatcaacgccgaagaaatcaccatgctgaccaagtcgctgctgcccatgccggaaaagtggcatggcgtctccgacatcgagctgcgttaccgcaagcgccatctcgatattctggcgaacgaagactccaagctgcgcttcctgcaacgctcgaaaatcctctccggtatccgccgtttcatggaggccgaaggcttcctcgaagtggaaacgccgatgctgcagaccgtttatggcggtgcgacggccgatccgttcaagaccttccacaacacgctgaagatggacatgtatctgcgcatcgcgccggaattgttcctgaagcgcacgctggtatcaggcctttccgacaaggtgttcgaaatcaaccgcaacttccgcaacgaaggcgtctccacaaggcacaatcctgaattcaccatgatggagtgctactgggcctatgccgattacgaagacatcatgggtctcgtggagcggctgttcgagacgctggcgattgctctgcacggcacgaccgaagtggaattccagggccagacgatctccttcaagggtccgttcaagcgcgtgccgatgcctgatgccgtgaaggaagcgaccggcatcgatttcctcgccatcaagaccgacgaagaggcccgcgctgccgccaaggccgccggttttgccgtcgagaaggactggacctggggcgaatgccttgccttcatcttcgaagagaaggtggaagccacgctgatccagccgagccacgtcacgcattttccgaaggacatctcgccgtttgccaaggaagtgccgggcgaaccgcgcctcgtcgagcgtttcgagagctattgcaacgcctgggaagtgggcaacgccttctcggaactcaacgatcccgaagaacagcgccgccgcatggtggaacagctggaacaggcgcacgcccgcggcgagaaggacaagcagctggacgacgagttcctcgacgccatcgaccagggcatgccacccgccggcggcctcggcatcggtgtcgatcgcctgatcatgctcttgaccaacgccccgtcgatccgcgacgtgatcctcttcccggcccgccgcaacaaggcggattga

SEQ ID NO: 30332 - protein, 499 aa, Agrobacterium tumefaciens
MTDTKTETTALSSDATEVRRQKLALLREQIGDVYPAHFHRTLSNAELAEKYADIEADVETGDTVTVAGRVYSSRNSGMFMDIHDASGKVQIFSHKDTTPEAARNLLPMIDIGDIIGVTGKVRRTKRGELTINAEEITMLTKSLLPMPEKWHGVSDIELRYRKRHLDILANEDSKLRFLQRSKILSGIRRFMEAEGFLEVETPMLQTVYGGATADPFKTFHNTLKMDMYLRIAPELFLKRTLVSGLSDKVFEINRNFRNEGVSTRHNPEFTMMECYWAYADYEDIMGLVERLFETLAIALHGTTEVEFQGQTISFKGPFKRVPMPDAVKEATGIDFLAIKTDEEARAAAKAAGFAVEKDWTWGECLAFIFEEKVEATLIQPSHVTHFPKDISPFAKEVPGEPRLVERFESYCNAWEVGNAFSELNDPEEQRRRMVEQLEQAHARGEKDKQLDDEFLDAIDQGMPPAGGLGIGVDRLIMLLTNAPSIRDVILFPARRNKAD

SEQ ID NO: 30333 - DNA, 1881 bp, Arabidopsis thaliana
  CDS (1)..(1881)
atggaaggtgcggctgatcaaactacgaaagcgttatctgaattagccatggattcttctaccaccttgaatgctgctgagtctagcgctggtgatggagctggacctcggagtaaaaatgctttgaagaaggaacagaaaatgaagcagaaagaggaagagaagagacgaaaggacgaagagaaagctgaaaaggctaaacaagcacctaaagcaagctcccagaaggcagtggcagcagatgatgaagagatggatgcaacgcaatactatgagaacagattgaaatatcttgcggctgagaaggctaaaggggagaatccatatcctcacaagttcgctgtgtcaatgtcgattcctaaatacattgagacgtatggtagtttgaacaatggagatcatgttgaaaacgctgaggagtctttagctgggcggataatgagcaagcgatcttcctcttccaagctcttcttctatgatctacacggtgatgatttcaaggtccaagtcatggctgatgcaagtaagtcaggattggatgaagctgagttcttaaagctccattcgaatgctaagcgtggtgatattgttggagtcattgggtttccaggaaaaactaagaggggagaattgagtatctttccccgatcatttattcttctgtcccattgcctccacatgatgccgagaaaggctgataatgttaatgcaaagaaacctgaaatctgggttccaggtcaaacgagaaatcctgaagcatatgttctgaaagaccaggaatcaagatatcgtcagcgtcatcttgatatgattttgaacgtggaggttcgtcagatattcaggactagagctaaaatcatctcctatgtccgcagattcctcgacaacaaaaatttcttggaggtcgagacacctatgatgaacatgattgctggtggagcagctgctagaccttttgtgacacatcacaatgatctagatatgaggctgtacatgcgaatcgcacctgaactctatctcaagcaacttattgttggtggcttggaacgtgtttacgagataggaaagcaattcagaaacgagggtatagacctgacccacaatccggagttcaccacttgcgagttctatatggcttttgcagactacaatgacctgatggaaatgactgaggttatgttgagtggcatggttaaggaattaacaggtggttataaaatcaagtataatgctaatgggtatgacaaggatccaattgaaatcgactttactccaccattcaggaggattgagatgataggagagttagagaaggttgctaagctcaatataccaaaagacttggctagcgaagaagctaacaagtatctgattgatgcatgtgcgaggtttgatgtcaaatgccctcctcctcagacaacagctcgtctgttagataaacttgttggagaatttctggaaccgacatgtgtgaacccaactttcatcatcaaccagcccgagatcatgagtcctttggctaaatggcacagatcgaagagtggattgacagagagattcgagctgttcatcaacaaacatgaactctgcaatgcctacacggagctaaacgatcctgtggtacagcgccagcgttttgctgatcagctcaaggatcgacagtctggagacgatgaagcgatggctttagatgaaacattttgtaatgctttagaatatgggttggctcctacaggtggctggggattaggaatagacagactctctatgcttttgaccgactcactgaacatcaaggaggttcttttcttcccggcaatgaggccaccacaggaggagtcagcagccgctcaagctcctttaacagaagagaagaaataa

SEQ ID NO: 30334 - protein, 626 aa, Arabidopsis thaliana
MEGAADQTTKALSELAMDSSTTLNAAESSAGDGAGPRSKNALKKEQKMKQKEEEKRRKDEEKAEKAKQAPKASSQKAVAADDEEMDATQYYENRLKYLAAEKAKGENPYPHKFAVSMSIPKYIETYGSLNNGDHVENAEESLAGRIMSKRSSSSKLFFYDLHGDDFKVQVMADASKSGLDEAEFLKLHSNAKRGDIVGVIGFPGKTKRGELSIFPRSFILLSHCLHMMPRKADNVNAKKPEIWVPGQTRNPEAYVLKDQESRYRQRHLDMILNVEVRQIFRTRAKIISYVRRFLDNKNFLEVETPMMNMIAGGAAARPFVTHHNDLDMRLYMRIAPELYLKQLIVGGLERVYEIGKQFRNEGIDLTHNPEFTTCEFYMAFADYNDLMEMTEVMLSGMVKELTGGYKIKYNANGYDKDPIEIDFTPPFRRIEMIGELEKVAKLNIPKDLASEEANKYLIDACARFDVKCPPPQTTARLLDKLVGEFLEPTCVNPTFIINQPEIMSPLAKWHRSKSGLTERFELFINKHELCNAYTELNDPVVQRQRFADQLKDRQSGDDEAMALDETFCNALEYGLAPTGGWGLGIDRLSMLLTDSLNIKEVLFFPAMRPPQEESAAAQAPLTEEKK

SEQ ID NO: 30335 - DNA, 1500 bp, Bacillus anthracis
  CDS (1)..(1500): transl_table=11
atggataacatgaaccacgaagaattaaacgaccaattgcttgttcgtcgtgaaaagctacataacttacgtgagcaaggaatcgatcctttcggtaaacgatttgaacgtacaaatgcaacaaatgacttattaagcctatatggagagttctctaaagaagaattagaagagaaagaaatctctgtttctatcgctggtcgtattatgacaaagcgtggtaaaggaaaagctggatttgcacatattcaagatttacatggacaagttcaaatttatgttcgtaaagatgctgttggagatgaagaatacgaattatttaaaacagcagatttaggtgacttagtaggtattgaaggtaaagtttttaaaacgaacgttggagaactttcagtgaaagcaacaggctttacactattaacgaaatctcttcgtccattaccggataaatatcatgggttaaaagatgttgaacaacgctaccgtcaacgttacttagacttaattacaagtatggaaagtcgtgaaacattcgtcactcgcagtaagatcattcgcgaaatgagaagatacttagatgacaacggttatcttgaagtggaaacacctatgatgcatgcaattgcaggtggagcttctgctcgtcctttcatcacgcatcataatgcgttagatatggaattatatatgcgtatcgcaattgaacttcatttaaaacgccttattgtgggtggattagaaaaagtttatgaaatcggccgtgtattccgtaatgagggtgtatcaactcgtcataatcctgaatttacgatgattgaattatatgaagcgtatgctgattataaagatattatgaaactaacagaaaatatggttgctcatatcgcgaagcaagtactaggtacaacaacaatccaatatggtgattatgaaattaatctagaaccagaatggacacgccttcatatggtagatgcaattaaagaacattctggagcagatttctggaatccgatgagtgtagaagaagcgcgtgaacttgcaaaagaacataatgtagaaattaaggatacaatggaagttggtcatattattaatgaattcttcgagcaaaaagtagaagataaattaatccaaccaacatttatttacggtcatccggtagaaatttcgccacttgcgaaaaagaatgatgaagatccacgattcacagatcgtttcgaattgtttatcgttgcacgtgaacatgcaaatgcgttcactgagctaaatgatccaatcgatcagaaagaacgttttgaagcgcaattaaaagaacgcgaacaaggtaatgacgaagctcacatgatggatgatgattatatcgaagctcttgagtatggtatgcctcctacaggtggactaggaattggtattgatcgccttgttatgttattaacgaatgcaccatctattcgtgatgtattattattccctgctatgcgtcataaacaagactaa

SEQ ID NO: 30336 - protein, 499 aa, Bacillus anthracis
MDNMNHEELNDQLLVRREKLHNLREQGIDPFGKRFERTNATNDLLSLYGEFSKEELEEKEISVSIAGRIMTKRGKGKAGFAHIQDLHGQVQIYVRKDAVGDEEYELFKTADLGDLVGIEGKVFKTNVGELSVKATGFTLLTKSLRPLPDKYHGLKDVEQRYRQRYLDLITSMESRETFVTRSKIIREMRRYLDDNGYLEVETPMMHAIAGGASARPFITHHNALDMELYMRIAIELHLKRLIVGGLEKVYEIGRVFRNEGVSTRHNPEFTMIELYEAYADYKDIMKLTENMVAHIAKQVLGTTTIQYGDYEINLEPEWTRLHMVDAIKEHSGADFWNPMSVEEARELAKEHNVEIKDTMEVGHIINEFFEQKVEDKLIQPTFIYGHPVEISPLAKKNDEDPRFTDRFELFIVAREHANAFTELNDPIDQKERFEAQLKEREQGNDEAHMMDDDYIEALEYGMPPTGGLGIGIDRLVMLLTNAPSIRDVLLFPAMRHKQD

SEQ ID NO: 30337 - DNA, 1485 bp, Bacillus stearothermophilus
  CDS (1)..(1485): transl_table=11
atgagccatgaagaattgaacgaccaattgcgcgtccgcagggaaaagctgaaaaaaattgaggaattgggtgtcgatccgtttggcaaacggttcgagcgcacgcataaagcggaagagctgtttgaactgtatggagatttgtcaaaagaggaactcgaagagcaacaaatcgaagtcgccgtcgccggccgcatcatgacaaagagaggcatgggaaaagcgggctttgctcacatccaggacgtgacgggacaaattcaaatttacgtccgccaagacgatgttggcgaacagcaatacgagctgtttaaaatctccgacctcggcgacatcgtcggcgtgcgcggcacgatgtttaaaacaaaggtcggcgaactttcgatcaaagtatcgtcgtatgaatttttaacaaaagcgctgcgtccgctgccggaaaaataccacggcttaaaagatatcgagcagcgctaccgccaacgctacctcgatttaattatgaatccggagagcaaaaagacgttcatcacccgcagtctcattattcaatcgatgcgccgctatcttgacagccatggctacttggaagtcgaaacaccgatgatgcacgccgtagcaggcggtgcggcggcgcgcccgttcattacgcatcataatgcgctcgatatgacgctgtatatgcggatcgccatcgagctgcatttgaaacggctcatcgtcggcggcttggaaaaagtgtatgaaatcgggcgcgttttccggaatgaaggcatttccacccgccataacccggagtttacgatgctcgaattgtacgaggcgtatgccgacttccgcgatatcatgaaattaacggagaacttgatcgctcatattgccacggaagtgcttggcacaacaaaaattcagtacggcgaacatcttgtcgacttgacgcctgaatggcggcgcctccatatggtcgatgcgatcaaggaatatgtcggcgtcgatttctggcggcagatgagcgacgaagaggcgcgggagctggccaaagaacacggtgtcgaagtcgcgccgcacatgacgttcggccatatcgtcaatgaattttttgaacaaaaagtagaggataaactgatccagccgacgttcatttacggccacccggtcgaaatctcgccattagccaagaaaaacccagacgacccgcgctttaccgatcggtttgagctgttcatcgtcgggcgcgaacatgcgaacgcctttacggaactaaacgacccgatcgatcagcgtcaacggtttgaggagcagctgaaggagcgcgaacaaggaaacgatgaagcgcatgaaatggacgaagatttcctcgaagcgctcgaatacggcatgccgccgacgggcggactcgggatcggggtcgacaggttagtcatgcttttgaccaattcaccgtctattcgcgatgtattgctcttcccgcaaatgcgccataaataa

SEQ ID NO: 30338 - protein, 494 aa, Bacillus stearothermophilus
MSHEELNDQLRVRREKLKKIEELGVDPFGKRFERTHKAEELFELYGDLSKEELEEQQIEVAVAGRIMTKRGMGKAGFAHIQDVTGQIQIYVRQDDVGEQQYELFKISDLGDIVGVRGTMFKTKVGELSIKVSSYEFLTKALRPLPEKYHGLKDIEQRYRQRYLDLIMNPESKKTFITRSLIIQSMRRYLDSHGYLEVETPMMHAVAGGAAARPFITHHNALDMTLYMRIAIELHLKRLIVGGLEKVYEIGRVFRNEGISTRHNPEFTMLELYEAYADFRDIMKLTENLIAHIATEVLGTTKIQYGEHLVDLTPEWRRLHMVDAIKEYVGVDFWRQMSDEEARELAKEHGVEVAPHMTFGHIVNEFFEQKVEDKLIQPTFIYGHPVEISPLAKKNPDDPRFTDRFELFIVGREHANAFTELNDPIDQRQRFEEQLKEREQGNDEAHEMDEDFLEALEYGMPPTGGLGIGVDRLVMLLTNSPSIRDVLLFPQMRHK

SEQ ID NO: 30339 - DNA, 1500 bp, Bacillus subtilis
  CDS (1)..(1500): transl_table=11
atgagtcaagaagagcataaccatgaagaattgaatgatcagctgcaagtcagacgcgataaaatgaatcagctgagagataacggcatcgatccattcggcgcacgttttgaaagaactcatcagtctcaagaagttatttcggcatatcaagatctaaccaaagaagagttagaagaaaaagcgattgaagttacaatcgcaggccgcatgatgacaaaacgcggcaaaggaaaagccggctttgcccatcttcaggatttagaaggccaaatccaaatctacgtaagaaaagacagtgtcggtgacgaccaatatgaaatcttcaagtcttctgacctcggtgatcttatcggcgtaaccggaaaagtcttcaaaacaaatgtaggcgaattgtctgttaaagcaacttcctttgaattgctgacaaaagcgcttcgtccgcttcctgacaaataccatggtttaaaagacgttgagcagcgctaccgtcagcgctatctggatcttatcgtaaacccagacagcaaacatacgttcattacacgaagcaagatcattcaagctatgagaaggtaccttgatgatcatggatacttagaagtagaaacacctacaatgcacagcattcctgggggagcttctgcacgtccgtttatcactcaccacaacgcgttagacattccactctatatgcgtattgctatcgaactgcacctaaaacgtctaattgtcggcggtttagaaaaagtatatgaaatcggccgtgttttccgtaacgaaggtgtctctacacgccataaccctgaatttacaatgattgagttatatgaagcatatgcggactataaagatatcatgagcttaactgaaaaccttgtcgctcatatcgcccaagaagtgcttggcacaactacgattcaatacggggaagagcaaatcgaccttaaaccggagtggaaaagaatccatatggttgacgcagtcaaagaagcgaccggcgttgatttctgggaagaggttactgttgagcaggcgcgtgaatatgcaaaagaacatgaagtagaaattaaagactctatgacagtaggccatatcatcaacgaattcttcgaacaaaaaattgaagaaacgcttattcagccaacgtttatttacgggcatcctgtagaaatttctcctcttgctaagaaaaaccctgaggacccgcgttttacagaccgttttgagctgtttatcgttggccgtgaacatgccaacgcgtttacagagctgaatgatcctattgatcaaagagaacgctttgaagcgcaattaaaagagcgtgaagccggtaatgatgaagctcatttaatggatgaagactttgttgaagctctggaatacggtatgccgccaacaggaggtttaggcatcggtatcgaccgtctggttatgctgctgacgaatgccccttctattcgcgatgtgctgttattcccgcaaatgagacaacgctaa

SEQ ID NO: 30340 - protein, 499 aa, Bacillus subtilis
MSQEEHNHEELNDQLQVRRDKMNQLRDNGIDPFGARFERTHQSQEVISAYQDLTKEELEEKAIEVTIAGRMMTKRGKGKAGFAHLQDLEGQIQIYVRKDSVGDDQYEIFKSSDLGDLIGVTGKVFKTNVGELSVKATSFELLTKALRPLPDKYHGLKDVEQRYRQRYLDLIVNPDSKHTFITRSKIIQAMRRYLDDHGYLEVETPTMHSIPGGASARPFITHHNALDIPLYMRIAIELHLKRLIVGGLEKVYEIGRVFRNEGVSTRHNPEFTMIELYEAYADYKDIMSLTENLVAHIAQEVLGTTTIQYGEEQIDLKPEWKRIHMVDAVKEATGVDFWEEVTVEQAREYAKEHEVEIKDSMTVGHIINEFFEQKIEETLIQPTFIYGHPVEISPLAKKNPEDPRFTDRFELFIVGREHANAFTELNDPIDQRERFEAQLKEREAGNDEAHLMDEDFVEALEYGMPPTGGLGIGIDRLVMLLTNAPSIRDVLLFPQMRQR

SEQ ID NO: 30341 - DNA, 1458 bp, Blochmannia floridanus
  CDS (1)..(1458): transl_table=11
atgagtaaatttgaaaaagaacaaattgcttttcctaatgattttcggcgtaattatatttctgatcaattacatcaaaaatatgatcataaaactaatacagaattgattcatcttaatgtaaaagttagtgtcgcaggtcgtataatgactcgtcggattatgggaaaatcatcttttatgacattacgtgatggaggaggttgtattcagttatattttactattcatgatatgaaatcacagacgatgtattttaaggttataaaaacatgggatataggagatttaattggagtgaaaggagtattatttaaaactcgtactggagaattatcaatacattgcaaggaaatggttttattaactaaatcgttgagatcattaccagataaatttcatggattacgtaatatagaaacgaaatatcgtcaaaggtatttagatttaatagttaatgaagaatctatgaaaacatttaaaatacgttctttaattatatctgaaatacgtcgttttatgcatcaacatcattttatagaagtagaaactcctatgatgcatcatattcctggaggtgcattagctcgaccttttgttacatatcataataaattaaacatgaatatgtatcttcgtattgctccagaattatatttaaaaaaattaataattggaggttttgaaaaaatatttgaaataaatcgtaattttcgtaatgaaagtatatctccatatcataatcctgaatttactatgatggaaatttatgaagcgtatgttgattataataatatgataatttttgttcaggaattatttcgaacattaacagaacggattctcaggaagagtgttattgaatatggtgattatagtttagattttgaaaaaccttttattaaaatgagtataaaagaagctattatgtattatttaccagatattcgaacaaaaaatatcgatgatatattagttgtttttgatatcttaaaattttttaaagtacccagtgataatcaatggacattagaaaagttgcatatggttctttttgaagagatagtatcaaaaaaaattattcaaccaacttgtattactcattatccaatagaagtatccccattagctcgttgcagtaatgataatgcaaaaattgctgatcgatttgagttatttattgctggtcatgaaataggaaatggattttcggagttaaatgatccggatgatcaacgtaatcgatttttaaagcaagcaacagaaaaaatgattaataatgatattgatcaagatgaatcaaatatgccttatgataaggattatatagttgcattagagtatggtttaccgccaacagcaggtgtcggtataggtattgatcgtttagtaatgttgttaactaataaacataatattcgggatgtaattttatttccaactttacgatcaaagtaa

SEQ ID NO: 30342 - protein, 485 aa, Blochmannia floridanus
MSKFEKEQIAFPNDFRRNYISDQLHQKYDHKTNTELIHLNVKVSVAGRIMTRRIMGKSSFMTLRDGGGCIQLYFTIHDMKSQTMYFKVIKTWDIGDLIGVKGVLFKTRTGELSIHCKEMVLLTKSLRSLPDKFHGLRNIETKYRQRYLDLIVNEESMKTFKIRSLIISEIRRFMHQHHFIEVETPMMHHIPGGALARPFVTYHNKLNMNMYLRIAPELYLKKLIIGGFEKIFEINRNFRNESISPYHNPEFTMMEIYEAYVDYNNMIIFVQELFRTLTERILRKSVIEYGDYSLDFEKPFIKMSIKEAIMYYLPDIRTKNIDDILVVFDILKFFKVPSDNQWTLEKLHMVLFEEIVSKKIIQPTCITHYPIEVSPLARCSNDNAKIADRFELFIAGHEIGNGFSELNDPDDQRNRFLKQATEKMINNDIDQDESNMPYDKDYIVALEYGLPPTAGVGIGIDRLVMLLTNKHNIRDVILFPTLRSK

SEQ ID NO: 30343 - DNA, 1521 bp, Bordetella bronchiseptica
  CDS (1)..(1521): transl_table=11
atgaccgaccaatcgcccgccccgaccgcccaggatgaaaaccgcttgatcgccgaacggcgcgccaagctggccagactgcgtgaaaccggcgttgcgttccccaacgatttcgtgcccgatgcgcacgccgccgacctgcacgccaggtacgacggcctggaccaggaggcgctgacggccgcggcggtcacggtcaaggtggccggccgcatgatgctcaagcgcgtcatgggcaaggccagcttcgccacgctgcaggacggcagcggccgcatccagatctacctcgagcgcggcacgctcggcgaagaggcctacgccgctttcaagcaatgggacatcggcgacatcatcgccatcgaggggccggtcttcaagaccaacaagggcgagctgtcggtgcacgccaactcggcgcgcctgctgtcgaagtcgctgcgtccgctgcccgacaagttccatggcgtggccgaccaggagctgcgctaccgccagcgctacgtcgacctcatcatgaccgacgccacccgccgcaccttcgaggcgcgcagcaaggccgtcggcggcatccgccagaccatgctcaatgcgggctttctcgaagtcgagacgccgatgctgcacccgattcccggtggcgcggcggccaagcccttcgtgacccaccacaatgcgctggacatgcagatgttcctgcgcatcgcgcccgagctttacctcaagcgcctgatcgtcggcggcttcgagcgcgtgttcgaaatcaaccgcaacttccgcaacgagggggtgagcccgcgccacaaccccgagttcaccatgatggagttctacgccgcgtacgccgactatcgctggctgatggacttcaccgaggacctgatccgccaggccgcgatcgcggccaccggcagcgccgtgctcagctaccaggaccgcgagctggacctgtcccagccgttcgaccgcctgacgatctgcgaagccatcctgaagtacgccgagggctatacccaggcgcagctcgacgaccccgcgttcgtgcgcgccgagctcaggaaactgggagccaacgtcgagggtccaccgctggcgcgcgccggcctgggcgcgctgcaactggcgctgttcgaggaaaccgccgaagccaagctgtggcgccccacctacatcatcgactacccggtcgaggtctcgcccctggcgcgcgcctccgacacccgcgacggcattaccgagcgcttcgaactgttcatcaccggacgcgaaatcgccaacggcttctccgagctcaacgaccctgaagaccaggccgagcgtttccgcgcccaggtcgaggccaaggacgccggcgacgaagaagccatgtacttcgacgccgactacatccgcgcgctcgaatacggcatgccccccaccggcggctgcggcatcggcatcgaccgcctggtcatgctgctgaccgacagccccagcatccgcgacgtcatcctcttcccgcacctgcgccgggaagactga

SEQ ID NO: 30344 - protein, 506 aa, Bordetella bronchiseptica
MTDQSPAPTAQDENRLIAERRAKLARLRETGVAFPNDFVPDAHAADLHARYDGLDQEALTAAAVTVKVAGRMMLKRVMGKASFATLQDGSGRIQIYLERGTLGEEAYAAFKQWDIGDIIAIEGPVFKTNKGELSVHANSARLLSKSLRPLPDKFHGVADQELRYRQRYVDLIMTDATRRTFEARSKAVGGIRQTMLNAGFLEVETPMLHPIPGGAAAKPFVTHHNALDMQMFLRIAPELYLKRLIVGGFERVFEINRNFRNEGVSPRHNPEFTMMEFYAAYADYRWLMDFTEDLIRQAAIAATGSAVLSYQDRELDLSQPFDRLTICEAILKYAEGYTQAQLDDPAFVRAELRKLGANVEGPPLARAGLGALQLALFEETAEAKLWRPTYIIDYPVEVSPLARASDTRDGITERFELFITGREIANGFSELNDPEDQAERFRAQVEAKDAGDEEAMYFDADYIRALEYGMPPTGGCGIGIDRLVMLLTDSPSIRDVILFPHLRRED

SEQ ID NO: 30345 - DNA, 1521 bp, Bordetella pertussis
  CDS (1)..(1521): transl_table=11
atgaccgaccaatcgcccgccccgaccgcccaggatgaaaaccgcttgatcgccgaacggcgcgccaagctggccagactgcgtgaaaccggcgttgcgttccccaacaatttcgtgcccgatgcgcacgccgccgacctgcacgccaggtacgacggcctggaccaggaggcgctgacggccgcggcggtcacggtcaaggtggccggccgcatgatgctcaagcgcgtcatgggcaaggccagcttcgccacgctgcaggacggcagcggccgcatccagatctacctcgagcgcggcacgctcggcgaagaggcctacgccgctttcaagcaatgggacatcggcgacatcatcgccatcgaggggccggtcttcaagaccaacaagggcgagctgtcggtgcacgccaactcggcgcgcctgctgtcgaagtcgctgcgtccgctgcccgacaagttccatggcgtggccgaccaggagctgcgctaccgccagcgctacgtcgacctcatcatgaccgacgccacccgccgcaccttcgaggcgcgcagcaaggccgtcggcggcatccgccaggccatgctcaatgcgggctttctcgaagtcgagacgccgatgctgcacccgattcccggtggcgcggcggccaagcccttcgtgacccaccacaatgcgctggacatgcagatgttcctgcgcatcgcgcccgagctttacctcaagcgcctgatcgtcggcggcttcgagcgcgtgttcgaaatcaaccgcaacttccgcaacgagggggtgagcccgcgccacaaccccgagttcaccatgatggagttctacgccgcgtacgccgactatcgctggctgatggacttcaccgaggacctgatccgccaggccgcgatcgcggccaccggcagcgccgtgctcagctaccaggaccgcgagctggacctgtcccagccgttcgaccgcctgacgatctgcgaagccatcctgaagtacgccgagggctatacccaggcgcagctcgacgaccccgcgttcgtgcgcgccgagctcaggaaactgggagccaacgtcgagggtccgccgctggcgcgcgccggcctgggcgcgctgcaactggcgctgttcgaggaaaccgccgaagccaagctgtggcgccccacctacatcatcgactacccggtcgaggtctcgcccctggcgcgcgcctccgacacccgcgacggcattaccgagcgcttcgaactgttcatcaccggacgcgaaatcgccaacggcttctccgagctcaacgaccctgaagaccaggccgagcgtttccgcgcccaggtcgaggccaaggacgccggcgacgaagaagccatgtacttcgacgccgactacatccgcgcgctcgaatacggcatgccccccaccggcggctgcggcatcggcatcgaccgcctggtcatgctgctgaccgacagccccagcatccgcgacgtcatcctcttcccgcacctgcgccgggaagactga

SEQ ID NO: 30346 - protein, 506 aa, Bordetella pertussis
MTDQSPAPTAQDENRLIAERRAKLARLRETGVAFPNNFVPDAHAADLHARYDGLDQEALTAAAVTVKVAGRMMLKRVMGKASFATLQDGSGRIQIYLERGTLGEEAYAAFKQWDIGDIIAIEGPVFKTNKGELSVHANSARLLSKSLRPLPDKFHGVADQELRYRQRYVDLIMTDATRRTFEARSKAVGGIRQAMLNAGFLEVETPMLHPIPGGAAAKPFVTHHNALDMQMFLRIAPELYLKRLIVGGFERVFEINRNFRNEGVSPRHNPEFTMMEFYAAYADYRWLMDFTEDLIRQAAIAATGSAVLSYQDRELDLSQPFDRLTICEAILKYAEGYTQAQLDDPAFVRAELRKLGANVEGPPLARAGLGALQLALFEETAEAKLWRPTYIIDYPVEVSPLARASDTRDGITERFELFITGREIANGFSELNDPEDQAERFRAQVEAKDAGDEEAMYFDADYIRALEYGMPPTGGCGIGIDRLVMLLTDSPSIRDVILFPHLRRED

SEQ ID NO: 30347 - DNA, 1512 bp, Buchnera aphidicola subsp
  CDS (1)..(1512): transl_table=11
atgattaaaaaaacagatttaaataataatatttttcaaaaagaaaaacaaataagaaaagaaaaactgattaatatgaaaaaaaacggattttcttttccaaatagtttcaaaaaaaacactaactctatcaaaatacatcaagaatatgaaaataaaacaattaatgaacttaaagttttaaatgttgaagttacgattgcaggtcgtatgatacaacgaagaattatgggaaaagcatctttttttacattacaagatatggaaggaaaaatacaaatttatacaagagaaaaagagattacatcagatttttacaacaatcattttaaaaaatgggatattggagatattctaggaatagaaggaatattgtttaaaacaaaaacaggagaattatctattttttctaaaaaattaaaaatattaactaaatctttaagacccttacctgataaatttcacggattatctaaccaagaaaaacgttatagaaaaagatacttagatttaattagtaataatcaattatttaatatttttaaaaatcgttctaaaataatcaggttcattcgaaattttatgatagaaaacaattttttagaagtagaaactcctatgttacataatattcctggtggagcaaatgctcgaccttttattacttatcataatgaaattaatgaagaaatgtacttaagaatagcacctgaattatatttaaaacaactaattgtgggtggttttgaacgtatttttgaactcaatcgaaattttcgtaatgaaggagtttctgctcgacataatccagaatttactatgatggaagcatatatagcttattctaattatgaagatatgatgaattttactgaaaatttactaaaaaatataatcaaatcaatttgtggaaaaagtgaaataaaatataataagtattacttaaattttaatattccgtttaaaaaattaacgatgaaagaatctattttgcaatttaattcaaatatttgtttatcagatttaaaaaatttacaaaaaattaaaaaaattgcaaataatattggtatcgaaataaaagacaattggaatataggttatatagaaaatgaaatttttgaaaaaacagtagaaaaaaaccttattcaacctacttttattactgaatatccagtggaagtttctcccctagctagacgtaacgattttaattctaatgtaacagatagatttgaactttttattgctggatatgaaattggaaatggattttctgaattaaacgattcagaagatcaaaaaaatagatttttaaatcaaatgaaaatagcagaaaaagaaaaaaataaagatatgttgtatgatgaaaattacatagaggcattaaaatacggtttacctcctacttcaggtttaggaattggaattgatcgtctgattatgatattaactaatcaaataagcattcgggacgttattttatttccaacattacgttcatttaaaaaataa

SEQ ID NO: 30348 - protein, 503 aa, Buchnera aphidicola subsp
MIKKTDLNNNIFQKEKQIRKEKLINMKKNGFSFPNSFKKNTNSIKIHQEYENKTINELKVLNVEVTIAGRMIQRRIMGKASFFTLQDMEGKIQIYTREKEITSDFYNNHFKKWDIGDILGIEGILFKTKTGELSIFSKKLKILTKSLRPLPDKFHGLSNQEKRYRKRYLDLISNNQLFNIFKNRSKIIRFIRNFMIENNFLEVETPMLHNIPGGANARPFITYHNEINEEMYLRIAPELYLKQLIVGGFERIFELNRNFRNEGVSARHNPEFTMMEAYIAYSNYEDMMNFTENLLKNIIKSICGKSEIKYNKYYLNFNIPFKKLTMKESILQFNSNICLSDLKNLQKIKKIANNIGIEIKDNWNIGYIENEIFEKTVEKNLIQPTFITEYPVEVSPLARRNDFNSNVTDRFELFIAGYEIGNGFSELNDSEDQKNRFLNQMKIAEKEKNKDMLYDENYIEALKYGLPPTSGLGIGIDRLIMILTNQISIRDVILFPTLRSFKK

SEQ ID NO: 30349 - DNA, 1503 bp, Buchnera aphidicola subsp
  CDS (1)..(1503): transl_table=11
atgttgataaatgaagaaaaagagcgtagggaaaaattaaattatataaaaaaacatggatataattttccaaatgattttaagccaaaaaataatttttcagatttgacacaaagatataaagattatacgagagatcaactgttttcattaaaaatttgtgttagcgtagctggacggatgacaaataagcgtattatgggtaaaagttctttttttatattaaaagattttgaaggagaaattcaattatatattcaagagaatttatttgctttgaatttttataaacagtttgttaaaaaatgggatttaggtgatattttgggagcaaaaggaaaattgtttaaaacaagaactggagagttgtctattcattgcacagaaataaaattattaactaaagcattaaaacctttgccaagtaaatttcatggattgtctgatcaagaaactagatatcgacagaggtatttagatcttattagtaataggacattatgttctatttttaaaattaggtctttaatttttattaatattagaaagtatatgttgaaaaaaaaatttttggaagtagaaacacctatgatgcaaaatattcctgggggggcttctgcacgcccgtttattactcatcataatactttagagatagatttatatttaagaatttcacctgaattgtatttaaaaagattaattgttggaggttttaataaaatttttgaaattaataaaagttttcgaaacgaaggtatatcgacacgtcataatccagagtttacaatgatggaagtgtatatggcttattctaattaccatgacatgatgaattttactgaaaagttattgatgtttttagtaaaggaaattgtgggtaatagtcaggttaaacatggtactaatattattgattttaaaaaaaaattttttaggtgtactcttaaagaggcaatattaaaatataatcctagtattagattatcagatttaaatgatgaagtaaaaatgaataaaattgtaaagaaattaggaattaatgtcaaaaaaaaattaaacgcaggtcagttgattcttgaaatatttaataaaacagttgaaaaaaaattaattcaacctacctttattttggattatccagtagaagtttctccattgtctagaagaagtgatgttaataaaaatgttgtggatcgttttgaattatttatttctggttatgaaattggtaatggattttcagagttaaatgatgcagatgatcaaaaaaaacggtttttaatgcaatgtaaactatctcataatattaataatttaaataaaattagttcttttgataaacacattttatatgatagtgattatataactgctttagaatatggattaccaccaacgtcaggtttaggaataggaatagatcgactaacaatgttattaactaatcaaaaaagtattcgtgatgtaattttttttccgatattaaagccttcagtctga

SEQ ID NO: 30350 - protein, 500 aa, Buchnera aphidicola subsp
MLINEEKERREKLNYIKKHGYNFPNDFKPKNNFSDLTQRYKDYTRDQLFSLKICVSVAGRMTNKRIMGKSSFFILKDFEGEIQLYIQENLFALNFYKQFVKKWDLGDILGAKGKLFKTRTGELSIHCTEIKLLTKALKPLPSKFHGLSDQETRYRQRYLDLISNRTLCSIFKIRSLIFINIRKYMLKKKFLEVETPMMQNIPGGASARPFITHHNTLEIDLYLRISPELYLKRLIVGGFNKIFEINKSFRNEGISTRHNPEFTMMEVYMAYSNYHDMMNFTEKLLMFLVKEIVGNSQVKHGTNIIDFKKKFFRCTLKEAILKYNPSIRLSDLNDEVKMNKIVKKLGINVKKKLNAGQLILEIFNKTVEKKLIQPTFILDYPVEVSPLSRRSDVNKNVVDRFELFISGYEIGNGFSELNDADDQKKRFLMQCKLSHNINNLNKISSFDKHILYDSDYITALEYGLPPTSGLGIGIDRLTMLLTNQKSIRDVIFFPILKPSV

SEQ ID NO: 30351 - DNA, 1506 bp, Campylobacter jejuni
  CDS (1)..(1506): transl_table=11
atgtttgataatattttagagcagcaaagaatagaaaaagctaaggaattaaaaaatttagggatcaatccttatcctcattttttagaaaaagaaatgtctttaaagacttttaaggataaattttcttatattttagagcaagttgaaaaaagagatgaaagtgtcaatgctgttgttgcaggacgtttgaaacttttgcgtatagctgggaaatcgatttttgcaaacattgaagatgaggatacaaatttacaaatttattttagtaaagatagcgtaggcgaagagctttatacgattttaaaaaagaatttagaggtgggtgatattgttttggttaaaggttttccttttgtaactaaaacaggtgagtttagtttacatgcaagtgaagtaaaactcgctacaaaagctattgttcctttacctgaaaaatatcatggattaacagatattgagcaaagatatcgtaaacgttatgttgatatgataatgaatgtcgaagttagaaaagattttttagtgcgttctaaagtggtgagtttaatccgtcatttttttgaaaataaaggctttttagaagtagaaactcctatgatgcatccgattgcaggtggagcaaacgctaagccttttgtaacttttcataattctttaggcgtagaaagatttttaagaattgctccagaactttatcttaaaagacttatagtaggtggttttgaggcggtttttgaaatcaatcgttgttttagaaacgaaggtatggatttaactcataatcccgaatttacaactatagaattttattgggcctatcataattataaagatttaatggatttaaccgaagaactttttgctttacttttggataaacttaatttaggaaaaacaatagaatttgatggaaaaatgataaatttttctaaaccttttgaaagaataacctataaagacgcactttgtaagtatggtggtttagatagggatttaatcgaagataaggaaaaaattcttactaaattaaaagcagatggttttgaagcgaatgaaaagcttgaacttggacatttgcaagctgaactttttgacaattatgtggaagaaaaattgatcaatcctacttttgtgattgattttcctatttccataagtcctttatcaagacgtagcgatgaggattctcagattgctgagagatttgagttgtttatttgcggaagagaattggcaaatggttttaatgagcttaatgatcctcttgatcaatatgagagatttttaaaacaaattgaagctaaaaatgcaggcgatgaagaggcttgtgaaatggatgaagattttgtaaatgctttgggttatggaatgcctccaacggcagggcagggcataggtatagatagacttgttatgcttttgacaaataaaaaatccattcgtgatgtgatattgtttcctgcaatgcgtccattaaaatcagaactaaaggagaaagaatga

SEQ ID NO: 30352 - protein, 501 aa, Campylobacter jejuni
MFDNILEQQRIEKAKELKNLGINPYPHFLEKEMSLKTFKDKFSYILEQVEKRDESVNAVVAGRLKLLRIAGKSIFANIEDEDTNLQIYFSKDSVGEELYTILKKNLEVGDIVLVKGFPFVTKTGEFSLHASEVKLATKAIVPLPEKYHGLTDIEQRYRKRYVDMIMNVEVRKDFLVRSKVVSLIRHFFENKGFLEVETPMMHPIAGGANAKPFVTFHNSLGVERFLRIAPELYLKRLIVGGFEAVFEINRCFRNEGMDLTHNPEFTTIEFYWAYHNYKDLMDLTEELFALLLDKLNLGKTIEFDGKMINFSKPFERITYKDALCKYGGLDRDLIEDKEKILTKLKADGFEANEKLELGHLQAELFDNYVEEKLINPTFVIDFPISISPLSRRSDEDSQIAERFELFICGRELANGFNELNDPLDQYERFLKQIEAKNAGDEEACEMDEDFVNALGYGMPPTAGQGIGIDRLVMLLTNKKSIRDVILFPAMRPLKSELKEKE

SEQ ID NO: 30353 - DNA, 1509 bp, Chromobacterium violaceum
  CDS (1)..(1509): transl_table=11
atgtctgatcacgaacaagcacaggcgcaaagccaagacgaaaaccagatcatggcggaacgccgccagaaactgcaggcgatccgcgaaaaaggcatcgcctaccccaacgacttcaaacgcagccacttcgccaaaccgctgcaggacgaccacgccgccaaagaggcagaggcgctggaagccgagaaaatcgaagtcgccgtcgccggccgcatgatgcttaaacgtgtgatgggcaaagccagcttcgccaccctgcaggacgtcagcggccgcatccaggccttcatctcccgcgacaacgtgggcgaagacgtctacgccgacttcaagcgctgggacctgggcgacatcgtcgccgtcaagggcatgctgttcaagaccaagaccggcgaactgacggtgcaggcgaccgaagtgcgcatgctgtccaagaacatccgtccgctgccggagaaattccacggcatcgccgaccaggaaacaaagtaccgccagcgctacgccgacctgatcatgagcgaggaaagccgcgaaaccttcatcaagcgctccaagatcgtgcagaaggtgcgcgacgtgatggtgggcgaaggctacctggaagtggaaaccccgatgatgcacccgatcccgggcggcgcgtcggccaaacccttcgtcacccaccacaacgcgctggacatgccgctctacctgcgcatcgccccggagctgtacctgaagcgcctggtggtcggcggcctggaacgcgtgttcgagatcaaccgcaacttccgcaacgaggggatgagcacgcgccacaaccccgagttcaccatgatcgagttctacgaagcatatagcgactaccagcgcatgatggagatgaccgaaaccatcatccgcgagtgcgcgctggttgcctgcggctccaccaccgtgacctaccaaggcaaggaagtggacctgggcaagccgttcgaccgcttcaccatcgtgcaggcgatcaagcactacaacccgcaatacaccgacgcgcaactgtccgacgccgcctgggtggccagcgagatcaagcgcctgggcggcaagctgcccccggccccgggcctgggcagcctgcagctggcgctgttcgaggaatgcgccgaatcgctgctgtggaacccgaccttcatcatcgactacccggtggaagtgtccccgctggcgcgcggctccgacacccagccgggcctgaccgagcgtttcgaactgttcatcgtcggccgcgagcacgccaacggctactcggagttgaacgatccggaagaccaggccgcgcgcttccaggcgcaagtcgcccagaaggacgccggcgacgacgaggcgatgcactacgacgccgactacatccgcgcgatggaatacggcctgccgccgaccggcggttgcggcatcggcatcgaccgcttggtgatgttgttgacggatgcgccttctatccgggatgtgatcttgttcccgcatatgcgtccggagtaa

SEQ ID NO: 30354 - protein, 502 aa, Chromobacterium violaceum
MSDHEQAQAQSQDENQIMAERRQKLQAIREKGIAYPNDFKRSHFAKPLQDDHAAKEAEALEAEKIEVAVAGRMMLKRVMGKASFATLQDVSGRIQAFISRDNVGEDVYADFKRWDLGDIVAVKGMLFKTKTGELTVQATEVRMLSKNIRPLPEKFHGIADQETKYRQRYADLIMSEESRETFIKRSKIVQKVRDVMVGEGYLEVETPMMHPIPGGASAKPFVTHHNALDMPLYLRIAPELYLKRLVVGGLERVFEINRNFRNEGMSTRHNPEFTMIEFYEAYSDYQRMMEMTETIIRECALVACGSTTVTYQGKEVDLGKPFDRFTIVQAIKHYNPQYTDAQLSDAAWVASEIKRLGGKLPPAPGLGSLQLALFEECAESLLWNPTFIIDYPVEVSPLARGSDTQPGLTERFELFIVGREHANGYSELNDPEDQAARFQAQVAQKDAGDDEAMHYDADYIRAMEYGLPPTGGCGIGIDRLVMLLTDAPSIRDVILFPHMRPE

SEQ ID NO: 30355 - DNA, 1497 bp, Coxiella burnetii
  CDS (1)..(1497): transl_table=11
atggaattaaaagaccaaatcaaagaagaaaatgaacaaatcgcgcagcgtaaattaaaattaaagaagcggcgtgaagagggtcaagcttaccctaatgattttaagcgcgatagtttagcggctgatttacatgctgtttacgatcaattcgacagtggtgcattaaccgcaaaggctatccgcgttaaaatggcgggccggatgatgacccggcggattatgggaaaagccagtttcgcccatatccaagacatgaaaggccgtatgcaaatttatgttacgcgcgatagtctgccccaaggcgtctactcagactttaaatcctgggatttgggagacatcgttggtattgaaggagagctttttaaaacaaaaacagaggagttgtcggttaaagtcgatcagattcgtttattgacaaaagcgctgcgaccaatgcctgataagtttcacggacttcatgatcaagaacagcggtttcgtcagcgctaccttgatttaattgtcaacgaatcatcccgtcatttatttcaaactcgctcgcaagttatcgcgcaaatccgccgctttcttgatgatcgcggctacattgaagttgaaacgccgatgatgcatccattaccgggaggcgctgctgcgcgcccctttgaaacgcaccacaacgcgatgaatatggatttatttttgcgaattgcgcctgaactttatttaaaaagattagtcgtcggtggctttgaaaaggtgtacgaaattaaccgtaattttcgcaatgaaggtatttcaacacggcataatcccgaattcacgatgctcgagttttatcaagcgtacgcgacttatgaagatatgatgatgcttaccgaatcgatgattcgccacctcgctgaaaaaatttttggcgttatggaaataaaataccagggggtgaggattgatttaaataaaccttttccgcgtttatctctgcgcgatgcgattttacaatttaatcctggaataacgcccgatcaaattgatcaccttgaaacggcgcgcgaattagcgcataaatatgaaattgctacccccgctcattacggattagggaaaatccaaacggaattgtttgaaaaactcgtagaagaaaagttgcaacaaccaatttttataactcattttccaaaagaagtgtcgcccttatcccgagcgaatgaagaaaatgactttatcactgatcgttttgagttttatgtgggcggccgcgaaatcgctaacggcttttcggaattaaatgatcccgaagatcaagccgctcgctttcgcgagcaattaaaagcacgaaatgctggggatttagaagcaatgagtttcgatgaagattatatcaccgcactagaatatggacttcccccgacagcaggagaaggcattggcatcgatcgtttagtgatgctttttaccgataacgcctccatccgcgatgtcattttgttccccttattgcgctcgaaatga

SEQ ID NO: 30356 - protein, 498 aa, Coxiella burnetii
MELKDQIKEENEQIAQRKLKLKKRREEGQAYPNDFKRDSLAADLHAVYDQFDSGALTAKAIRVKMAGRMMTRRIMGKASFAHIQDMKGRMQIYVTRDSLPQGVYSDFKSWDLGDIVGIEGELFKTKTEELSVKVDQIRLLTKALRPMPDKFHGLHDQEQRFRQRYLDLIVNESSRHLFQTRSQVIAQIRRFLDDRGYIEVETPMMHPLPGGAAARPFETHHNAMNMDLFLRIAPELYLKRLVVGGFEKVYEINRNFRNEGISTRHNPEFTMLEFYQAYATYEDMMMLTESMIRHLAEKIFGVMEIKYQGVRIDLNKPFPRLSLRDAILQFNPGITPDQIDHLETARELAHKYEIATPAHYGLGKIQTELFEKLVEEKLQQPIFITHFPKEVSPLSRANEENDFITDRFEFYVGGREIANGFSELNDPEDQAARFREQLKARNAGDLEAMSFDEDYITALEYGLPPTAGEGIGIDRLVMLFTDNASIRDVILFPLLRSK

SEQ ID NO: 30357 - DNA, 1578 bp, Deinococcus radiodurans
  CDS (1)..(1578): transl_table=11
atgcccgatgctcctcgccccccccgcccggaagggctgcacgaacagaccatcgcccgcctgaataacctggacgcgcaggttgacgccggcttcgaggcctatccctacagttacccccagacccaccacgcccgcgacgtgttcgccgctcaccctgccagagaagagggcacaggggaagggggaacgctggaacccggccagaagtgggaagaagaaagctactcgctcgcgggccgcgtgaccctgatgcgccacatgggcaaggccgcctttgccgacctgagcgacgaggacggcaaaatccagctgtttttctccaagcaggacaccgccggcttcgacgccaccaagaaaatcgacctcggtgacattatcggcgtgaagggtcaccccttcgtgaccaagaccgggcaactgaccctgcatgtgaccgagtggcagccgctcgtcaagagcctgcacccgctgccgagcaagtttcacggcctgcaagacgaggaactgcgcgcccggcgccgctacgtagacctgatggtgaccgagggcgcccgcgagaagttccaggcccgcagccgcatgattcggtacatccgcaacgaactggacgaacgcggcttcatggaagtggaggggcccacccttcaggtcacggcgggcggcgccgaggcccggcccttcatgacgcaccacaacgcgctctcgtacgatttcaagttgcgcatcagcctggaactgtacctcaagcggctgctcgtcggcggcttcgagcgggtgtacgagatcgggcgggtctaccgcaacgagggcatcgaccgcacccacaaccccgaattcaccatgctggaactgtactgggcctacgcggactacagcgacatcgccaagttggtcgaagacctgctgagcgggctggcaaaggaagtgcacggctcttatcagttcgagtaccagggcaagacgctggactttaccccgccgtttgcccgtgtggattacctcggcggcctgcgcgagcacgtgccgggcctcgacttcgacccgctggacctagaccggctgcgcgctttctgtgacgagcgctttccgcagtggaagggcgtgccgagctacaagctgctggacaaactgttcggtgagttcgtggagccgctgctgagcaatccgacgttcgtgatggaccaccccgccgtgatttcgccgctcgccaagaagcaccgttcccgccccgaggccgtcaccgagcgtttcgaggtgttctgctcgggcttcgaactggcgaatgcgttctccgaactcaacgacgccttcgaccagcgcgaacgctttgaggcgcagactgcccgccaggccgccggagacgacgaggcgcacccgcaggacgaggacttcctgctcgcgctggaatacgggatgccgcccgccgggggcctgggcatcggcatagaccggctggcgatgctgctcaccgactcggattccatccgcgacgtgctgctgttcccgctgctgcggcccgaaggcggcgaggcggaagaagctgacgacaccgcgcaggaaaacaccgccggctga

SEQ ID NO: 30358 - protein, 525 aa, Deinococcus radiodurans
MPDAPRPPRPEGLHEQTIARLNNLDAQVDAGFEAYPYSYPQTHHARDVFAAHPAREEGTGEGGTLEPGQKWEEESYSLAGRVTLMRHMGKAAFADLSDEDGKIQLFFSKQDTAGFDATKKIDLGDIIGVKGHPFVTKTGQLTLHVTEWQPLVKSLHPLPSKFHGLQDEELRARRRYVDLMVTEGAREKFQARSRMIRYIRNELDERGFMEVEGPTLQVTAGGAEARPFMTHHNALSYDFKLRISLELYLKRLLVGGFERVYEIGRVYRNEGIDRTHNPEFTMLELYWAYADYSDIAKLVEDLLSGLAKEVHGSYQFEYQGKTLDFTPPFARVDYLGGLREHVPGLDFDPLDLDRLRAFCDERFPQWKGVPSYKLLDKLFGEFVEPLLSNPTFVMDHPAVISPLAKKHRSRPEAVTERFEVFCSGFELANAFSELNDAFDQRERFEAQTARQAAGDDEAHPQDEDFLLALEYGMPPAGGLGIGIDRLAMLLTDSDSIRDVLLFPLLRPEGGEAEEADDTAQENTAG

SEQ ID NO: 30359 - DNA, 1497 bp, Enterococcus faecalis
  CDS (1)..(1497): transl_table=11
gtggcagaagaacaacaagcgcatttagaggatttaaatgatcaaatgctcgtgcgccgcgaaaaaatggaagctttacgtgaagaagggattgatcctttcggtaaacgtttcgatcgcactcataattcagcagaacttcatgaacaatatgataatcatacaaaagaagaacttagtgaaatgaatacagaagtcagcgttgctggacgtatgatgacaaaacgtggtaaaggaaaagctggtttcgcccatttgcaagaccgtgaaggccaaattcaaatttatgttcggaaggaccaagttggagacgaagcctatgaactatttaaacatgctgacttaggcgacttctttggtgtgacaggtcaagtaatgaaaaccaatacgggggaagttactgttaaagctcaaacaattacgttattaactaaagctttgcgtccattgccagataaataccatggattaacgaatgtggaacaacgctatcgtcaacgctatttggatttaatcagtaacaaagaaagctttgatcgtttcatgaaacgcagtcaaattattagcgaaatccgtcgttatctagatggcaatggctatgtcgaagtagaaacgcctgtcttgcataacgaagcaggaggagctgctgctcgtccatttatcacacaccataatgcgttagatatggacttatacttacgcattgccctagagttacatttaaaacgtttaattgtcggtggcatggaaaaagtatatgaaattggtcgtgtcttccgtaatgaaggaatcgataccactcataacccagaatttacaatgctagaagcttatactgcttatactgattatcaagatgtgatggatttaacagagggaattattcgtaatgctgcggaaaaagtcttaggaactactgatatcacgtacgatggtcaagcggttgacttaggaagtcctttcaaacgtctacacatggtagatgcggtcaaagaacaaacgggcgtagatttttggcaagagatgacgatagaagaagcccgtgcgttggctaaagaacataatgttgaaattacagatgccatgacagtcggtcatatcattaatgaatttttcgaaacatttgtagaagatacgttgcaacaaccaacatttatttatggtcacccagtcgctgtttcaccattagcgaagaaaaatccagaagatggtcgtttcactgaccgctttgaactatttattatcggaaaagagtttgctaatgcatttacagaattaaatgatccaattgaccaacgtgaacgttttgaagaacaagaaaaagaacgggaacaaggaaatgatgaagcacacggagtagatgaagatttcatcgaagccttagaatatggcttgccaccaaccggaggattaggtattgggattgatcgactagttatgttattaaccgatgcacaatcaattcgtgatgtcttgctattcccaacaatgagataa

SEQ ID NO: 30360 - protein, 498 aa, Enterococcus faecalis
MAEEQQAHLEDLNDQMLVRREKMEALREEGIDPFGKRFDRTHNSAELHEQYDNHTKEELSEMNTEVSVAGRMMTKRGKGKAGFAHLQDREGQIQIYVRKDQVGDEAYELFKHADLGDFFGVTGQVMKTNTGEVTVKAQTITLLTKALRPLPDKYHGLTNVEQRYRQRYLDLISNKESFDRFMKRSQIISEIRRYLDGNGYVEVETPVLHNEAGGAAARPFITHHNALDMDLYLRIALELHLKRLIVGGMEKVYEIGRVFRNEGIDTTHNPEFTMLEAYTAYTDYQDVMDLTEGIIRNAAEKVLGTTDITYDGQAVDLGSPFKRLHMVDAVKEQTGVDFWQEMTIEEARALAKEHNVEITDAMTVGHIINEFFETFVEDTLQQPTFIYGHPVAVSPLAKKNPEDGRFTDRFELFIIGKEFANAFTELNDPIDQRERFEEQEKEREQGNDEAHGVDEDFIEALEYGLPPTGGLGIGIDRLVMLLTDAQSIRDVLLFPTMR

SEQ ID NO: 30361 - DNA, 1494 bp, Gloeobacter violaceus
  CDS (1)..(1494): transl_table=11
atggccgaggaagatttgcgccgcacgcgcctggagaaggccgagcagtggcgcgtccacaaccaaaacccctacccgtaccgctacgagcgcacgcacatggcaggggatttgcaggcgaaatacaaagatctcgaaaacggccaggaagtcgaagatgccgtctcggtggcgggccgcatcgtcgcccggcgcgtgctgggcagcgtcgccttttttggcctccaggacgattcgggtaccatccagctttatttcgacaaaaagcgcatccgcgagagcatgggagccgacgccttcaagtggctcgacaagctcaccgacaccggcgattttatcggggcgcacggtaccatccgccgcaccgagcgcggcgaactgtcggtctacgtccacgagtacgagctgttgtgcaagtcgattttgcccttgccctctgagtactacggcctcaccgacgtccagaagcgctaccgtcagcgctatctcgatctgatcgccaaccccggcgtgcgtgagaccttccgcaagcgcgccctgattgtgcgggaaattcgccgctttctcgatgagcggggctttcttgaaatcgagacccccgtgctgcagaccgaggccgggggcgcggcggcgcggccctttaccacccaccacaacgccctgggcctcgatatgttcttgcgcatcgccaccgaattgcacctgaagcggctggtggtgggcgggttcgaaaaggtctacgaactggggcggatctttcgcaacgagggcatctcgacgcgccacaacccggaatttaccaccgtcgaaatctacgaagcctacagcgattacttcgacatcatggatctggtggaaaccctgctgcgcgcggtggcccacattgtcctcggctccaccgaactggtctgcgagggcaatacgatcgacctgggcgccccgtttcggcggatcaccatgttcgatctggtcgcacagatgaccggggtggccctggccggattgcgcgacggcgagaaggcggcccgccttgccgaagcagtcggtgtcgaggtaaccgcgggagcctcggtcggccagattctctaccagctattcgaagaaaagtgcgaggcgaagctcacccaacctaccttcgtgctcgactatccggtcgaaatttcgccgcttgccaaggcccaccgctcggtgccgaacatggtcgagcgcttcgagctatatatcaacggtcgtgagaccgccgacggtttttcagaactcaacgacccggtcgatcagcgcgcccgcctggaggcccaggccaaagcgaaggcggcgggagacctggaggcgcaccccttcgacgaggattttctgaccgccatcgagcacggcctgcctcccaccggcggcgtcggcatcggcatcgaccggctggtgatgctgctcaccgacagcccgagcatccgcgatgtgatcgcctttccgaccctccggccggaggcgggggaatag

SEQ ID NO: 30362 - protein, 497 aa, Gloeobacter violaceus
MAEEDLRRTRLEKAEQWRVHNQNPYPYRYERTHMAGDLQAKYKDLENGQEVEDAVSVAGRIVARRVLGSVAFFGLQDDSGTIQLYFDKKRIRESMGADAFKWLDKLTDTGDFIGAHGTIRRTERGELSVYVHEYELLCKSILPLPSEYYGLTDVQKRYRQRYLDLIANPGVRETFRKRALIVREIRRFLDERGFLEIETPVLQTEAGGAAARPFTTHHNALGLDMFLRIATELHLKRLVVGGFEKVYELGRIFRNEGISTRHNPEFTTVEIYEAYSDYFDIMDLVETLLRAVAHIVLGSTELVCEGNTIDLGAPFRRITMFDLVAQMTGVALAGLRDGEKAARLAEAVGVEVTAGASVGQILYQLFEEKCEAKLTQPTFVLDYPVEISPLAKAHRSVPNMVERFELYINGRETADGFSELNDPVDQRARLEAQAKAKAAGDLEAHPFDEDFLTAIEHGLPPTGGVGIGIDRLVMLLTDSPSIRDVIAFPTLRPEAGE

SEQ ID NO: 30363 - DNA, 1497 bp, Haemophilus ducreyi
  CDS (1)..(1497): transl_table=11
atgtctgaagaacaagaattagatcttaacggcgagatgttagcgcgccgtgagaagttagccaaaattcgtgcgatggggaatccgtttccgaaccgttttcgtcgtgatgcttatgcttatgcgttgcaggctgagtatgcggaaatggcaggagatgcattaaaagatgcggatgtgcaggtgaaggttgttggccgtattatgctaaaaagggtgatgggtaaggcatctttctttactattcaagatgttagcggtcagattcagctttatgttgcacgagataatttagccgagggggtttatgtagataatgtcggtttgtgggatttaggcgatattgttggcgtgtgtggtactttatttaaaactaaaaccggtgagttgacggttcgttgtgcggacgttgagttgttgacgaagtcattgcggccgttgccaaataaacaccaaggattggttgatcaagaaatgcgttatcgtcagcgttatttggatttaattgcaaatgagcagtcgcgccgtacttttgtgatccgttcgcaagtggtgtcgggcattcgtcaattctttttagaacgaggctttatggaagtggaaacgccgatgttgcaggtgattccgggcggtgcggcggctaagccgtttgtaacgcatcataatgcgttggacgtggatatgtatttgcgtattgcacccgagctttatttaaagcggttagtggtgggcggttttgagcgggtgtttgagttgaaccgtaatttccgtaatgagggcgtttcggtgcgccataatccagaatttacgatgattgaatattatcaagcctatgcggattatcacgatttaatggataatacggagcagttgttgcgtaagttggcgttggatattcttggcacaacggcggtgccttatggtgaatatcaatttgattttggtcagccgtttgagcggatcacgatgcacgatgcgattgttaaatatggcaatggtattgcacgagaagatttagatgatattgagaaagcggtcgaaattgctaaaaaattaggcattgaggtgcagaaatcgtggggcttgggcgctgtggttaatgctatttttgaggaagtggcagagcatcaattgattcagccgactttcttaatggcgcaccctgcggaaatttcaccgcttgctcgccgtaatgatgagaatcctgaagtaaccgatcggtttgagctgtttattggcgggcgtgagatcggtaatggtttttctgagttgaatgatgctgaagatcaagcggcacgttttgatgctcaagtggcggctaaagatgccggcgatgatgaggcgatgtttaaagatgatgattttgttgtggcgttagagcatggcttgccacccactgcgggcgaggggttaggcatcgatcgtttagttatgatttttgccaatgcgccatctattcgtgatgtgattttgttccctgcaatgcgccataaataa

SEQ ID NO: 30364 - protein, 498 aa, Haemophilus ducreyi
MSEEQELDLNGEMLARREKLAKIRAMGNPFPNRFRRDAYAYALQAEYAEMAGDALKDADVQVKVVGRIMLKRVMGKASFFTIQDVSGQIQLYVARDNLAEGVYVDNVGLWDLGDIVGVCGTLFKTKTGELTVRCADVELLTKSLRPLPNKHQGLVDQEMRYRQRYLDLIANEQSRRTFVIRSQVVSGIRQFFLERGFMEVETPMLQVIPGGAAAKPFVTHHNALDVDMYLRIAPELYLKRLVVGGFERVFELNRNFRNEGVSVRHNPEFTMIEYYQAYADYHDLMDNTEQLLRKLALDILGTTAVPYGEYQFDFGQPFERITMHDAIVKYGNGIAREDLDDIEKAVEIAKKLGIEVQKSWGLGAVVNAIFEEVAEHQLIQPTFLMAHPAEISPLARRNDENPEVTDRFELFIGGREIGNGFSELNDAEDQAARFDAQVAAKDAGDDEAMFKDDDFVVALEHGLPPTAGEGLGIDRLVMIFANAPSIRDVILFPAMRHK

SEQ ID NO: 30365 - DNA, 1509 bp, Haemophilus influenzae
  CDS (1)..(1509): transl_table=11
atgtcagaacaagaagttaaagaattagatctcaatggcgaaatgctcgtccgtcgtgaaaaattagccgcattacgtgcaaaaggtaatgcctttccaaataagtttcgtcgtgatgctctcgcacaagatttgcacaatcaatatgatgcagaagacggggaaatcttaaaagaaaaaggcattgaagtacaagttgctggtcgtattatgactcgccgtgcaatgggtaaagcaacttttatcactattcaagatatgagcggtaaaatccaactttatgttgcacgcgataatttgcctgaaggtgtttataaagatgacgttggtacttgggatttaggtgatatcgttggcattaaaggcactttatttaaaacaaaaactgatgaactcaccgttaaaactacggaagttcaacttttaaccaaagcacttcgcccattaccagacaaattccatggtttaaccgaccaagaagttcgttatcgccaacgttatttagatttaatttctaacgaagaatctcgccgcacttttattattcgttctaaagttgtcgcgggtattcgtgaatatttcatttctaaaggctttatggaagtggaaacgccaatgttacaagtgattccaggcggtgcatctgcgcgtcctttcgtgactcatcacaatgcattagatgtggatatgtatttacgtatcgcacctgaactttatttaaaacgcttagtcgttggtgggtttgaacgagtatttgaattaaaccgtaacttccgtaatgaaggggtttctgttcgtcataatccagaatttactatgcttgaatactatcaagcatatgcggactaccatgatttaatggataacaccgaagaacttcttcgtaaattagcgattgatattcttggtacaaccattgtgaaatacggtgatttagaatttgacttcggcaaaccatttgagcgtattacattacatgatgcaaccattaaatatggtgcagataaaggtatcgtaaaagaagatctttatgacttcgatcgtgcaaaagcaactgctgaacgcttaggtattgaagtacaaaaatcttggggtttaggcagcattgtcaatgcaatctttgaagaagtggctgaacatcacttaattcaaccaacctttcttaatggctcacctgcggaaatttcgccacttgcacgtcgtaatgatgaaaaccctgaagtgactgaccgttttgaattattcatcggcggacgtgaaattggtaacggtttctcagaattaaatgacgcggaagatcaaaatgaacgctttgatgcacaagtggctgcgaaagaagcgggcgatgatgaagcgatgtttaaagatgaagactttgttgttgcactagaacacggcttaccaccaacagctggggaaggtttaggtatcgaccgtctagcgatgctttatgcaaatgcaccgtcaattcgtgatgttatcttattccctgcaatgcgtcagaaataa

SEQ ID NO: 30366 - protein, 502 aa, Haemophilus influenzae
MSEQEVKELDLNGEMLVRREKLAALRAKGNAFPNKFRRDALAQDLHNQYDAEDGEILKEKGIEVQVAGRIMTRRAMGKATFITIQDMSGKIQLYVARDNLPEGVYKDDVGTWDLGDIVGIKGTLFKTKTDELTVKTTEVQLLTKALRPLPDKFHGLTDQEVRYRQRYLDLISNEESRRTFIIRSKVVAGIREYFISKGFMEVETPMLQVIPGGASARPFVTHHNALDVDMYLRIAPELYLKRLVVGGFERVFELNRNFRNEGVSVRHNPEFTMLEYYQAYADYHDLMDNTEELLRKLAIDILGTTIVKYGDLEFDFGKPFERITLHDATIKYGADKGIVKEDLYDFDRAKATAERLGIEVQKSWGLGSIVNAIFEEVAEHHLIQPTFLNGSPAEISPLARRNDENPEVTDRFELFIGGREIGNGFSELNDAEDQNERFDAQVAAKEAGDDEAMFKDEDFVVALEHGLPPTAGEGLGIDRLAMLYANAPSIRDVILFPAMRQK

SEQ ID NO: 30367 - DNA, 1506 bp, Helicobacter pylori
  CDS (1)..(1506): transl_table=11
atgttttctaaccaatacatccaacaacgcatccataaagccaatagcttgagagaagaagggaaaaacccttatcaaaatggcttgaaacgaagccttacaaacgccgcttttttagaaaaatacgcttatgttaagggtttagaagagcctaaagacaaagaaaaatgcgagagtattgtagggagggtcaagcttttgcgtttaatgggtaaggcatgttttattaaagttgaagatgaaagcacgattttgcaagtttatgtttcgcaaaatgaattgaatgatgagtttaaaagcttgaaaaagcatttagaagtgggcgatattgtgttggtgaaaggcttcccttttgctaccaaaaccggtgaattaagcattcatgccctagaatttcatattttaagcaaaaccattgtgcctttacctgaaaagtttcatggactgagcgatatagaattgcgttaccgccagcgctatttggatttgatcgtcaatcctagcgttaaagatgtgtttaaaaagcgcagtttgattgtctctagcgtgcggaaattctttgaaatggaagggtttttagaagtggaaacccctatgatgcaccccattcctggcggggcgaacgcaaggccttttatcacttaccataacgctttagaggtggagaggtatttaagaatcgccccagaattataccttaaacgcctgattgtaggggggtttgaggcggtgtttgaaatcaatcgtaatttcagaaatgagggcatggatcacagccataaccccgaattcacgatgattgagttttattgggcgtatcacacttatgaagatttgattgaactcagtaagaggctgtttgactacttgctaaagactttaaatttagattcaaaaatcatttataacgatatggaagtggatttcaaccaaacgagcgtgatttcctatttggacgctttagaaacgatagggggcattagtaaggatattttagaaaaagaagacaggcttttggcttatttgttagagcaaggcatcaaagtagagccaaaccttacttatggtaaattgctcgctgaagcgtttgatcattttgtagagcaccaactcattaaccccacttttgtaacccaataccctattgagattagccccttagccagacgcaacgatagtaaccctaatattgctgacaggtttgaattgtttatcgcagggaaagaaatcgctaacggctttagcgagttgaacgatcctttagatcaattagaacgctttaaaaaccaagtggctgaaaaagaaaaaggcgatgaagaagcccaatacatggatgaagattacgtgtgggccctagcccatggaatgcccccaaccgcagggcaaggcataggcattgaccgattagtgatgctactcactggagctaaaagcattaaagatgtgattttattcccagcgatgcgtcctgttaaaaacgattttaatgtggagagtgaagaataa

SEQ ID NO: 30368 - protein, 501 aa, Helicobacter pylori
MFSNQYIQQRIHKANSLREEGKNPYQNGLKRSLTNAAFLEKYAYVKGLEEPKDKEKCESIVGRVKLLRLMGKACFIKVEDESTILQVYVSQNELNDEFKSLKKHLEVGDIVLVKGFPFATKTGELSIHALEFHILSKTIVPLPEKFHGLSDIELRYRQRYLDLIVNPSVKDVFKKRSLIVSSVRKFFEMEGFLEVETPMMHPIPGGANARPFITYHNALEVERYLRIAPELYLKRLIVGGFEAVFEINRNFRNEGMDHSHNPEFTMIEFYWAYHTYEDLIELSKRLFDYLLKTLNLDSKIIYNDMEVDFNQTSVISYLDALETIGGISKDILEKEDRLLAYLLEQGIKVEPNLTYGKLLAEAFDHFVEHQLINPTFVTQYPIEISPLARRNDSNPNIADRFELFIAGKEIANGFSELNDPLDQLERFKNQVAEKEKGDEEAQYMDEDYVWALAHGMPPTAGQGIGIDRLVMLLTGAKSIKDVILFPAMRPVKNDFNVESEE

SEQ ID NO: 30369 - DNA, 1485 bp, Lactococcus lactis subsp
  CDS (1)..(1485): transl_table=11
ttggctgaaatcgaagaacttaatgaccaaatgaaagtccgccgtgaaaaaatggaaaacctgcgcgaagcgggaattgacccatttggacataaatttacacgtacgcacaactcacaagaactacacgaagcttatgacgaaaagacgaaagaagaattgcatgaacttgcgctttcaggaattgtcgctggtcgtttgatgactaaacgtggtaaaggtaaagtcggtttcgcccatcttcaagaccgcgaaggccaaattcaactttatgttcgtaaagatgaagtcggcgaagaaaattatgaaattttcaaaaaagctgacctcggagatttccttggtgttgaaggcgaaatcatgaaaactgacatgggtgaattgtcaattaaagcaaaaaaattgactttcctctcaaaagcgcttcgtcctttgcctgaaaaattccatggtttgactgacactgaaacacgttatcgtaaacgttatttggatttgatttcaaataaagaaagcttcaatcgttttgtcactcgttctaaaattatcagtgaaatccgtcgttatatggatggtcgtggatatcttgaagttgaaactccagtacttaacaatgaagccggtggtgctgctgctcgtccattctacacacatcataacagtcttgatattgatatggcgcttcgtattgcaactgaattacacttgaaacgtttgattgttggtggaatggaaaaagtttatgaacttggccgtgtcttccgtaacgaaggaatggatatgactcataatccagaattcacaacaatggaatcttatgaagcttatgctgattttgaagatatcatggatttgacagaaggaatcttccaacatgttgctaaaacagtggttggtcaagatgttcttgaatacgatggtaaagaaattaatgttggcggaaaattcaaacgtgttcacatggttgatgccatcaaggaagttgctggagttgatttctggcctgagatgacttttgaagaagcaacagctcttgcaaaagaacatgatattcatgttgaaaaacatttcacttctgttggtcatatcattaacgaattctttgaaaaatatgttgaagaaactttgattcaacctactttcgtttttggtcatccaaaagaaatttcaccacttgctaaaatgaatgaaaaagacccacgttttactgaccgttttgaacttttcatcaacggtaaagaatacgccaatgctttcagcgaattgaatgacccaattgaccaattggaacgttttgaagctcaagctaaagctaaagaacttggagatgatgaagcaactggtgtcgattacgattatgttgaagcactcgaacacggtatgccaccaacaggtggactcggtatcgggattgatcgcttagtgatgctctttactggcacaacttcaatccgtgacgttttgcttttcccaactatgaaataa

SEQ ID NO: 30370 - protein, 494 aa, Lactococcus lactis subsp
MAEIEELNDQMKVRREKMENLREAGIDPFGHKFTRTHNSQELHEAYDEKTKEELHELALSGIVAGRLMTKRGKGKVGFAHLQDREGQIQLYVRKDEVGEENYEIFKKADLGDFLGVEGEIMKTDMGELSIKAKKLTFLSKALRPLPEKFHGLTDTETRYRKRYLDLISNKESFNRFVTRSKIISEIRRYMDGRGYLEVETPVLNNEAGGAAARPFYTHHNSLDIDMALRIATELHLKRLIVGGMEKVYELGRVFRNEGMDMTHNPEFTTMESYEAYADFEDIMDLTEGIFQHVAKTVVGQDVLEYDGKEINVGGKFKRVHMVDAIKEVAGVDFWPEMTFEEATALAKEHDIHVEKHFTSVGHIINEFFEKYVEETLIQPTFVFGHPKEISPLAKMNEKDPRFTDRFELFINGKEYANAFSELNDPIDQLERFEAQAKAKELGDDEATGVDYDYVEALEHGMPPTGGLGIGIDRLVMLFTGTTSIRDVLLFPTMK

SEQ ID NO: 30371 - DNA, 1488 bp, Leptospira interrogans serogroup Icterohaemorrhagiae serovar
  CDS (1)..(1488): transl_table=11
atgtcagaatcaaatgaactcattgaacaaagaattcagaaaatcgaagaattaaaaaaacagggaatcaatccctacccggttcgttttttcccggattccaaatcgaaagacatagccgaaaagttcgaaaaaaatccgactggtccagaaaccaaatttaagttaggcggaagactacattccaaaagagtaatggggaaagcgagttttgctcatctcaaagacaactccggaatcatacaactttatgctactaaagacgatttaggtgaaactcaatactccatttttaaatcccttgatttgggagatattatcggtttggaaggatatctttttaaaacccaaaaaggagagattacgttacacgtcacatcggtggaactgctctcaaaatgtatccgccctcttcccgtagtaaaagaaaaagacggggttgtctacgatgcgtttgccgacgtagaacaaagatatagaatgcgttatgtggacttaatagtaaacgatcacgttagagatacatttattacaagaagtaaaatcgtttctgaaattagaagttttctgactcaagaaggatttttagaagtggaaacacctatgatgcaaccgattgcgggaggtgctgctgcaagaccgtttgtcactcatcataatactctggatatgcaattatttctaagaatcgctccagaactttatctcaaacgtttgatcgttggcggaatggatcgagtttttgaactcaaccgaaattttagaaacgaaggaatctctacaaaacacaatcctgaatttacgatgatggaagcttatatggcatttggagatatgagtacgatgctcgatcttacggaaagactcattactcacctggcccaaaaaatttgtggaactttaaaaattcaatacggcaaggatttaatcgatctttctcctccttggaaaagaactacttatgtggatattatcaaagaatacagtggaattgattttagtcagattatttctctggaagaagccaagaaaaaagcttcggaattaaaagtagacgtttccaaatgccaaacaatttggaaagtagcggatgaagttttttccgaaaaagcagaaccaaatctgattcaaccgatctttatcaccgattatccgaaagaactttctcctcttgcaaaatctaacccagataaacctggttatgtggaaagattcgaaccatacgtagccggaagagaaatcggaaacgcctttaccgagttaaatgatccttttgatcaaaaagaaagatttgaagatcaggtaaaacaaagagaggctggagacgacgaagcgtttatgatggacgaggattacatacgagctttggaatatggaatgcctcctaccggcgggctcggaattggaatcgatcgtctggtaatgcttttgacgaattctcattcgattcgagataccattttatttccgttgatgagaccagaataa

SEQ ID NO: 30372 - protein, 495 aa, Leptospira interrogans serogroup Icterohaemorrhagiae serovar
MSESNELIEQRIQKIEELKKQGINPYPVRFFPDSKSKDIAEKFEKNPTGPETKFKLGGRLHSKRVMGKASFAHLKDNSGIIQLYATKDDLGETQYSIFKSLDLGDIIGLEGYLFKTQKGEITLHVTSVELLSKCIRPLPVVKEKDGVVYDAFADVEQRYRMRYVDLIVNDHVRDTFITRSKIVSEIRSFLTQEGFLEVETPMMQPIAGGAAARPFVTHHNTLDMQLFLRIAPELYLKRLIVGGMDRVFELNRNFRNEGISTKHNPEFTMMEAYMAFGDMSTMLDLTERLITHLAQKICGTLKIQYGKDLIDLSPPWKRTTYVDIIKEYSGIDFSQIISLEEAKKKASELKVDVSKCQTIWKVADEVFSEKAEPNLIQPIFITDYPKELSPLAKSNPDKPGYVERFEPYVAGREIGNAFTELNDPFDQKERFEDQVKQREAGDDEAFMMDEDYIRALEYGMPPTGGLGIGIDRLVMLLTNSHSIRDTILFPLMRPE

SEQ ID NO: 30373 - DNA, 1488 bp, Leptospira interrogans
  CDS (1)..(1488): transl_table=11
atgtcagaatcaaatgaactcattgaacaaagaattcagaaaatcgaagaattaaaaaaacagggaatcaatccctacccggttcgttttttcccggattccaaatcgaaagacatagccgaaaagttcgaaaaaaatccgactggtccagaaaccaaatttaagttaggcggaagactacattccaaaagagtaatggggaaagcgagttttgctcatctcaaagacaactccggaatcatacaactttatgctactaaagacgatttaggtgaaactcaatactccatttttaaatcccttgatttgggagatattatcggtttggaaggatatctttttaaaacccaaaaaggagagattacgttacacgtcacatcggtggaactgctcgcaaaatgtatccgccctcttcccgtagtaaaagaaaaagacggggttgtctacgatgcgtttgccgacgtagaacaaagatatagaatgcgttatgtggacttaatagtgaacgatcacgttagagatacatttattacaagaagtaaaatcgtttctgaaattagaagttttctgactcaagaaggatttttagaagtggaaacacctatgatgcaaccgattgcgggaggtgctgctgcaagaccgtttgtcactcatcataatactctggatatgcaattatttctaagaatcgctccagaactttatctcaaacgtttgatcgttggcggaatggatcgagtttttgaactcaaccgaaattttagaaacgaaggaatctctacaaaacacaatcctgaatttacgatgatggaagcttatatggcatttggagatatgagtacgatgctcgatcttacggaaagactcattactcacctggcccaaaaaatttgtggaactttaaaaattcaatacggcaaggatttaatcgatctttctcctccttggaaaagaactacttatgtggatattatcaaagaatacagtggaattgattttagtcagattatttctctggaagaagccaagaaaaaagcttcggaattaaaagtagacgtttccaaatgccaaacaatttggaaagtagcggatgaagttttttccgaaaaagcagaaccaaatctgattcaaccgatctttatcaccgattatccgaaagaactttctcctcttgcaaaatctaacccagataaacctggttatgtggaaagattcgaaccatacgtagccggaagagaaatcggaaacgcctttaccgagttaaatgatccttttgatcaaaaagaaagatttgaagatcaggtaaaacaaagagaggctggagacgacgaagcgtttatgatggacgaggattacatacgagctttggaatatggaatgcctcctaccggcgggctcggaattggaatcgatcgtctggtaatgcttttgacgaattctcattcaattcgagataccattttatttccgttgatgagaccagaataa

SEQ ID NO: 30374 - protein, 495 aa, Leptospira interrogans
MSESNELIEQRIQKIEELKKQGINPYPVRFFPDSKSKDIAEKFEKNPTGPETKFKLGGRLHSKRVMGKASFAHLKDNSGIIQLYATKDDLGETQYSIFKSLDLGDIIGLEGYLFKTQKGEITLHVTSVELLAKCIRPLPVVKEKDGVVYDAFADVEQRYRMRYVDLIVNDHVRDTFITRSKIVSEIRSFLTQEGFLEVETPMMQPIAGGAAARPFVTHHNTLDMQLFLRIAPELYLKRLIVGGMDRVFELNRNFRNEGISTKHNPEFTMMEAYMAFGDMSTMLDLTERLITHLAQKICGTLKIQYGKDLIDLSPPWKRTTYVDIIKEYSGIDFSQIISLEEAKKKASELKVDVSKCQTIWKVADEVFSEKAEPNLIQPIFITDYPKELSPLAKSNPDKPGYVERFEPYVAGREIGNAFTELNDPFDQKERFEDQVKQREAGDDEAFMMDEDYIRALEYGMPPTGGLGIGIDRLVMLLTNSHSIRDTILFPLMRPE

SEQ ID NO: 30375 - DNA, 1497 bp, Listeria innocua
  CDS (1)..(1497): transl_table=11
atgagtaacgagaatcatgaagaactaaatgaccaactcatcgtccgtcgagaaaaagtggacacattgcgcgaagaaggcatagatccttttggtgagaaattcatccgttccatcagcccggaagaaattgaaacaaaatttgctgataaatcaaaagaagaccttgaagaagctgcgattgaagtttctgtagcaggacgaatcatgacgaagcgtgtcaaaggtaaagtaggtttcacgcatattcaagaccgtttccatcaattacaaatctacattcgtaaagatgctattggcgaagatgcctatgcaattttcaaattagctgatttaggagacattattggtataaaaggaactattttccgcactaacacaggggagttatccgtaaaagcaacagagttcactttactttctaaatcattacgcccacttcctgataaatatcacggtttaaaagacgtagaacaacgctaccgtcaacgttatttagacttaattacaaatgaagaaagtcaaaatcgttttgttatgcgtagtaaaatcttgaaatacactcgtgattacatggataatcaaggtttcttagaagtagaaacaccagtactccataccattgctggcggagctgccgcaaaaccatttattacacatcataatgcacttgatatggaattatacttacgaatcgccttagaacttcatctgaaacgcctaattgtcggcgggatggataaagtctatgaaatcggtcgtgttttccgtaatgaaggaacatccacacgccataaccctgaattcacaatgctagaatcatacgctgcttatgaagattatgaagatgttatggacttagtggaaggcttagtatcaacagtatgtaaacaagtaaatggaacaacaaaaataacatacggcgaatacgatgtagatctgactccaaattggcgtcgtatccacatggcagacgcagtaaaagaatatgtaggcgtagatttctggaatgtaacatctgatgaagaagcacacgaactagctaaaaaacatgatgtagcagtaacagaacacatgacgtatggccatattcttaatgaattttttgaaacatacgtagaagagaaactaattcaaccaacatttgtatatggtcatccagtggaaatttctcctttagctaagaaaaacaaagaagacgagcgtttcactgatcgttttgaattattcatcgttggtcgtgaacatgctaatgcgttctcagaattaaatgatccaattgatcaaagagaacgttttgaagcacaaatgaaagaacgcgaacaaggaaatgatgaggctcacggaatggatgcagatttccttgaagcattagaatatggtctaccgccaacaggtggactaggtataggtatagatcgcctagtaatgctattaacagacgctccatctatccgggatatattattattcccaacaatgaaacatcgcgattaa

SEQ ID NO: 30376 - protein, 498 aa, Listeria innocua
MSNENHEELNDQLIVRREKVDTLREEGIDPFGEKFIRSISPEEIETKFADKSKEDLEEAAIEVSVAGRIMTKRVKGKVGFTHIQDRFHQLQIYIRKDAIGEDAYAIFKLADLGDIIGIKGTIFRTNTGELSVKATEFTLLSKSLRPLPDKYHGLKDVEQRYRQRYLDLITNEESQNRFVMRSKILKYTRDYMDNQGFLEVETPVLHTIAGGAAAKPFITHHNALDMELYLRIALELHLKRLIVGGMDKVYEIGRVFRNEGTSTRHNPEFTMLESYAAYEDYEDVMDLVEGLVSTVCKQVNGTTKITYGEYDVDLTPNWRRIHMADAVKEYVGVDFWNVTSDEEAHELAKKHDVAVTEHMTYGHILNEFFETYVEEKLIQPTFVYGHPVEISPLAKKNKEDERFTDRFELFIVGREHANAFSELNDPIDQRERFEAQMKEREQGNDEAHGMDADFLEALEYGLPPTGGLGIGIDRLVMLLTDAPSIRDILLFPTMKHRD

SEQ ID NO: 30377 - DNA, 1497 bp, Listeria monocytogenes
  CDS (1)..(1497): transl_table=11
atgagtaacgagaatcatgaagaactaaatgaccaactcatcgtccgtcgtgaaaaagtggacacattgcgcgaagaaggcatagatccttttggcgaaaaattcatccgttccatcagcccggaagaaatcgaaacaaaattcgctgataaatcaaaagaagaacttgaagaagctgctattgaagtttctgtagcaggtcgtattatgacaaagcgtgtaaagggtaaggtaggtttcacacatattcaagaccgtttccatcaattacaaatctatatccgtaaagatgcgattggcgaagatgcttacgcagtcttcaaattagcagatctaggtgacattattggtataaaaggaactattttccgtactaatacaggtgaactttctgttaaagcaacggaattcactttgctttccaaatcgttacgtccacttcctgataaatatcatggtttaaaagacgtagaacaacgctatcgtcaacgctatttagacttaatcacaaacgaagaaagtcaaaatcgctttgtgatgcgcagtaaaatcttgaaatacactcgtgattatatggataaccaaggattcttagaagtagaaactccggtgcttcatacaattgctggtggtgctgctgcaaaaccatttatcacgcaccataatgcgcttgatatggaattatacttgcgaatcgctttagaactacacttaaaacgtctaatcgttggtgggatggataaagtgtacgaaattggccgtgttttccgtaatgaaggaacatccacgcgtcataacccagaatttacaatgctagaatcctatgcagcatacgaagattatgaagatgttatggatctggtagaaggtttagtatccacggtatgtaaacaagtaaatggaacaacagaaataacatacggtgaatacaaagtagatttaactcctaactggcgccgtatccacatggcagatgctgtaaaagaatacgtaggagtggatttttggaacgtaacttccgatgaagaagcgcgtgaactagcaaaaaaacatgatgtgccagtaacggaacacatgacatacgggcacattcttaatgagtttttcgaaacatacgtagaagaaaagctcattcaaccaacctttgtttacgggcatccggtggaaatttccccattagcgaagaaaaacaaagaagatgaacgttttactgaccgttttgaattatttatcgttggtcgtgaacatgcaaatgcattctcagaattaaacgatccaattgatcaaagagaacgctttgaagcgcaaatgaaagaacgtgagcaaggtaatgatgaagcacacggaatggatgcagatttccttgaagctttagaatacggtctaccgccaactggtggacttggaataggtattgatcgtctagtaatgctattaacagatgccccgtctattcgtgatatcctattattcccaactatgaaacaccgcgactaa

SEQ ID NO: 30378 - protein, 498 aa, Listeria monocytogenes
MSNENHEELNDQLIVRREKVDTLREEGIDPFGEKFIRSISPEEIETKFADKSKEELEEAAIEVSVAGRIMTKRVKGKVGFTHIQDRFHQLQIYIRKDAIGEDAYAVFKLADLGDIIGIKGTIFRTNTGELSVKATEFTLLSKSLRPLPDKYHGLKDVEQRYRQRYLDLITNEESQNRFVMRSKILKYTRDYMDNQGFLEVETPVLHTIAGGAAAKPFITHHNALDMELYLRIALELHLKRLIVGGMDKVYEIGRVFRNEGTSTRHNPEFTMLESYAAYEDYEDVMDLVEGLVSTVCKQVNGTTEITYGEYKVDLTPNWRRIHMADAVKEYVGVDFWNVTSDEEARELAKKHDVPVTEHMTYGHILNEFFETYVEEKLIQPTFVYGHPVEISPLAKKNKEDERFTDRFELFIVGREHANAFSELNDPIDQRERFEAQMKEREQGNDEAHGMDADFLEALEYGLPPTGGLGIGIDRLVMLLTDAPSIRDILLFPTMKHRD

SEQ ID NO: 30379 - DNA, 1491 bp, Mycoplasma gallisepticum
  CDS (1)..(1491): transl_table=4
ttaaaaataattatgtctaaaaaacttaacgatcaggaactagttcgtttagataaactaaaccgtttaattgaatctaaacaaaacccatacgaggttacaaaagttgctaacactcataacacaaaaagcttaaaagaaaaatacgaccaattttctaaagaacagttagcagagatgcaactggataagccaattactgttagtgggcgtgtaatcttgattagaagaacatttattctaattcaagattttcattcagaattacaactatatataaataaaaataaacaacctgatctgtttaagtatttcaatgactatttagatttaggtgatgtcgtttgtgctactggtaaaccaatgaaaaccaatactaatgaactttcattagatctggaatcattaaagattatcagtaaatctttaagagtaccacctgaaaaattccacgggatcgctgatgaagaaatccgttcacgaaaacgttatttagacctagtttataataaggaatcaaaagaaagattcgtttatcgttcaaagattattgcagcaatgcgccaatactttaatgaaaacggttttttagaagtagaaacaccatttttacatgcgcagatcggcggagctgctgctaagccttttgtaacaagatataacgcacttgatcgtgattattatttaagaattgctcctgaattacctcttaaaaaacttatcgttggaagttttgaaaagatatatgagattggtaagtgttttagaaacgaagggatggattcaactcacaaccctgagtttactagtgttgaaacttacgtagcttatgttgattatatctacatgatggaactaaccgaggctataattaagtatattgccaaagcaattggtattagtcacactaatatcaagaatgaaacgattgattggaataaaccattcaaacgaattaagatgactgaattagttaaacaagaaactggaatcgattttacgcaagtaaaaaaaatagatcaagcgttagatttagctaaaaaacataaggttcatgttaaagagcatgagaagacaattggtcatattatcaatttatttttcgaagaattttgcgagaaaaaattggttgaaccaacgtttgtaacccaccatccagtagagatctcaccgttatcaaaattagattattcagatccaagatataccgaaagattcgagctatttgcgtttggtaaagaattagctaacgggtttagtgaattaaacgatccaatcgatcaaagacaacgatttgaaaagcaattagaagaaaaacaaaagggtaatgatgaagcttctgaaatggatgaagatttcctagaagctctagaaaatggcctaccaccaactggtggtttgggcattggcgtagaccgtttagtgatgatgttaacagggacaacatcaatcagagatatcttgtttttcccgcacgtacgtgaagaataa

SEQ ID NO: 30380 - protein, 496 aa, Mycoplasma gallisepticum
MKIIMSKKLNDQELVRLDKLNRLIESKQNPYEVTKVANTHNTKSLKEKYDQFSKEQLAEMQLDKPITVSGRVILIRRTFILIQDFHSELQLYINKNKQPDLFKYFNDYLDLGDVVCATGKPMKTNTNELSLDLESLKIISKSLRVPPEKFHGIADEEIRSRKRYLDLVYNKESKERFVYRSKIIAAMRQYFNENGFLEVETPFLHAQIGGAAAKPFVTRYNALDRDYYLRIAPELPLKKLIVGSFEKIYEIGKCFRNEGMDSTHNPEFTSVETYVAYVDYIYMMELTEAIIKYIAKAIGISHTNIKNETIDWNKPFKRIKMTELVKQETGIDFTQVKKIDQALDLAKKHKVHVKEHEKTIGHIINLFFEEFCEKKLVEPTFVTHHPVEISPLSKLDYSDPRYTERFELFAFGKELANGFSELNDPIDQRQRFEKQLEEKQKGNDEASEMDEDFLEALENGLPPTGGLGIGVDRLVMMLTGTTSIRDILFFPHVREE

SEQ ID NO: 30381 - DNA, 1467 bp, Mycoplasma hominis
  CDS (1)..(1467): transl_table=3
  misc_feature (735)..(735): n is a, g, c or t
atggaaagaaaacttagtgaacaagaagaaattagacgtaataaaattgctgaattagaaaaaaacaatttacaagcatttcataaaactataaaaccaacagcgaattcaaaagagttaaatgaaaaatataaaaatttaagccgtgaagatcttgacaaacaaaatctagaatttgtatttaacggaagaattatgactattcgtggcccatttattgttttgcaagataattgtggacaaatgcaaatttatgcaaacaaaaaaacattgaatgagtcttctgcaaaaaccttttctttaatggatttcggtgatattttaagtgtaagaggaacattgtcaaaaactaatactgatgctttggttataaaggctcaagacatagttctattgacaaaatcattgaaaccgttgcctgataaatttcatggtttagttgatcctgaagaaagacgtcgccaacgttatgtagatttaataatgaatgaaaaaacaagaaatacatttgttatgagaacccaaattatcaaaggcattagagaatattttgatagtttaaattacattgaagttgatacaccaattttaaacccaatattaggaggcgcagctgctaaaccttttattactttctataatgcacttaatagaaacttttatttaagaattgcaactgaattgccattaaaaaaattgattgttggtggattagatagagtttatgaaatcggnagaatatttagaaatgaaggcgtagatacaactcataatccagaatttacctcaattgaattttacgaagcgtattcagatttatgaggaatgatggaaagaactgaaggcgttttcaaacatttaataaataaattcaacattaaagaagttaaatttaatggttttgatataacatttaattttccatttaagagagtcaatatgattgatgctatatcggaaaaaattaatgttgacattagaaaattaaatgaagaacaaatgtttgaattagctaaaaaacatggtattaaaattgaaaaattctttagatatggtcacattatcaatgagttatttgaaaaatatgttgaagaaacattaatagaacctacatttgtatatggacacccaattgaaatttctcctcttgcagcaattgaccctgatgataaaagatttacactacgtgctgaactatttattggaacaaaagaatttgcaaatatgtttaccgaattaaacgatccaattgatcaattgcaacgttttgaaaatcaattgttagaaaaagaaaacggcaatgaagaagcaaatgaaattgattgagattttgttaatgctttggaatacggaatgcctccaacaggtggttctggtatagggattgatcgtctaattatgctattaactcaaaatgattcaattagagatgtagttttatttcctcaattaaaagatttaaaataa

SEQ ID NO: 30382 - protein, 488 aa, Mycoplasma hominis
MERKTSEQEEIRRNKIAELEKNNLQAFHKTMKPTANSKELNEKYKNLSREDTDKQNTEFVFNGRIMTIRGPFIVLQDNCGQMQIYANKKTLNESSAKTFSLMDFGDILSVRGTLSKTNTDALVMKAQDMVTLTKSLKPLPDKFHGLVDPEERRRQRYVDLMMNEKTRNTFVMRTQIIKGIREYFDSLNYIEVDTPILNPMLGGAAAKPFITFYNATNRNFYLRIATELPLKKLIVGGLDRVYEIGRMFRNEGVDTTHNPEFTSIEFYEAYSDLWGMMERTEGVFKHLMNKFNIKEVKFNGFDMTFNFPFKRVNMIDAMSEKINVDIRKLNEEQMFELAKKHGIKIEKFFRYGHIINELFEKYVEETLMEPTFVYGHPIEISPTAAIDPDDKRFTTRAETFIGTKEFANMFTELNDPIDQLQRFENQLLEKENGNEEANEIDWDFVNALEYGMPPTGGSGMGIDRTIMTLTQNDSIRDVVLFPQLKDLK

SEQ ID NO: 30383 - DNA, 1524 bp, Mycobacterium leprae
  CDS (1)..(1524): transl_table=11
gtgaacgctgacccgttggagactgacgctgctcttcctgagcagtttcggattcgccgggacaagcgtgctcgtttgttggcggaggggcgtgacccgtatccggtcgccattgaacgcacccataccctagctgaggttcgcgcagcctatcccgacctggcgaccgactccgccaccgatgacatcgttggtatcgcgggtagggtaatattcgcgcgtaattcggggaaactgtgctttgcgacactgcaggacggtgacggcaccaacttgcaggtgatgattagtctcaacaaggttggttccgaaacgcttgacgcgtggaaagtcgacgtcgatcttggcgacattgtttatgtacacgggaacgtgattagctcgcgtagcggcgagttatcagttcttgctgattcctggcagatggtatctaagtcgttgcggccactgcccgtcgcgcataaagagatgagtgaagagtcgcgggtgcgacagcgttatgttgaccttattgtctgtccgcaagtgcgaatagtagctcatcagagaattgccgttatccgcgccatacggactgcgttagaacgacgcggttttctcgaagttgagacgcctatgttgcagactctggccggtggcgctgcggcccggccattcgtcacacattccaatgccctggacatcgatctgtacctgcgtatcgcacctgaactgttcctcaagcgatgcatcgtcggtggtttcgacaaggtcttcgaacttaatcgagtgtttcgaaacgaaggcgccgattctacgcattccccggaattttccatgctagagacctaccagacctacggaacctatgacgattcggcggtcgttacccgagaaattattcaagaggtggccgatgaggcgatcgggaccagacaactgcagatgcctgatgacagcgtctacgacatagatggagaatgggagacgatacaaatgtatccgtctctgtcggctgtgttgggtgaagaaatcacgccgcagacgtcagtcgatcggctgcgagccatcgcggatcggcttggccgtgggattggtccagagattcttgacaagcccagttacggacatggaagactcgtcgagcaactgtgggagtacacagtgggcaacaccctgagcgcgcccacatttgtcaaagattttccggtcgaaacaactcctttgacccgtcagcatcgaagcatccccggagtgaccgagaagtgggatctctacctgcgtggagttgaactggccacggggtactccgaattaaacgatccggtcgtgcagcgggaaagatttggtcaacaagtccgtgctgcagccgccgaggaagatgaggcgatggcacttgatgaggaatttctggcggcactggagtacgcgatgccgccatgcactggaactggaatgggtatcgaccggttgttgatgtctttgactggactgtcaattagggagactgttttgttcccgattgttcggccgcactccaactga

SEQ ID NO: 30384 - protein, 507 aa, Mycobacterium leprae
MNADPLETDAALPEQFRIRRDKRARLLAEGRDPYPVAIERTHTLAEVRAAYPDLATDSATDDIVGIAGRVIFARNSGKLCFATLQDGDGTNLQVMISLNKVGSETLDAWKVDVDLGDIVYVHGNVISSRSGELSVLADSWQMVSKSLRPLPVAHKEMSEESRVRQRYVDLIVCPQVRIVAHQRIAVIRAIRTALERRGFLEVETPMLQTLAGGAAARPFVTHSNALDIDLYLRIAPELFLKRCIVGGFDKVFELNRVFRNEGADSTHSPEFSMLETYQTYGTYDDSAVVTREIIQEVADEAIGTRQLQMPDDSVYDIDGEWETIQMYPSLSAVLGEEITPQTSVDRLRAIADRLGRGIGPEILDKPSYGHGRLVEQLWEYTVGNTLSAPTFVKDFPVETTPLTRQHRSIPGVTEKWDLYLRGVELATGYSELNDPVVQRERFGQQVRAAAAEEDEAMALDEEFLAALEYAMPPCTGTGMGIDRLLMSLTGLSIRETVLFPIVRPHSN

SEQ ID NO: 30385 - DNA, 1470 bp, Mycoplasma penetrans
  CDS (1)..(1470): transl_table=4
atggaaagaaaatttaatgatcaagaattaataagaagagaaaagttaaaaaatttacaagaagcaaatcaagatccttatgaaattgaaaaagtttctagaacaatgactataggagattttaatagtaagtttgcaaaattaaaaactcataacactaataacaatattaagttagctggaagagttgttgctttaagacaaacttttggtgttattagagatttttatggagatactcaattttatttaaataagaaaaaagtaagcaaatcaatgcttgagtattttaataaagtattagatttaggtgatattgtagaaatttttggatctccttttagaacacaaaaaggtgaattaactttagatgttaaaaaaattaaaatagtatcaaaagctttaaaaccactacctgaaaaatggcatggtttagaagatgaagaattaagagcaagacacagatatgttgatttaattgttaataaagattctatgaaagtgtttgtagacagaattagaattcttaaaataattcgtcaattcatggattctcaaaattatctagaagttgaaactccagttcttcaccctattttaggtggtgctaatgctagaccttttataacttttcataatactttggaaagaaacttttatttaagaattgctactgaattaccactaaaaaaattgatagttggtggttttgataaagtttatgagattggtagaatatttagaaatgaagggatggattcaactcataaccctgagtttactagtatggaagtttatgctgcatatgaaaacatggaatatatgatgagattaactgaaaaccttttcaaatatgttgctaaatcactgaaaaaaccagttgttaaaatgggggaaaatgaaatatatttaactcaaaaattcagaagaattcatatggttgattttattaagcaagaaactggagtagatttttgagaagtaaaatctaatcaagaagcacaagaacttgctaaaaaacataatgtaaaatttgaaaagcaccaatcaacattaggtcatattattaatttattttttgaagaattctgtgaagctaaatgtattcaaccaacatttgtttatggacatccaattgatgtttctccattatctaaaaaagattataaaaacccagggtttacaaaaagatttgaattatttattaatactaaagaatatgcaaatgcatttgctgagttaaatgatccaattgatcaatatgaaagatttgaagctcaagtaaaagaaaaatcattaggtaatgatgaagctgttgaaatggatatggatttcattgaggctttagaatatggtcttccaccaactgcaggattaggtgtgggaattgatagaatgattatgttatttactgaaaaatcaagtattagagatgtattgctattccctcacatgaaagataaaaaataa

SEQ ID NO: 30386 - protein, 489 aa, Mycoplasma penetrans
MERKFNDQELIRREKLKNLQEANQDPYEIEKVSRTMTIGDFNSKFAKLKTHNTNNNIKLAGRVVALRQTFGVIRDFYGDTQFYLNKKKVSKSMLEYFNKVLDLGDIVEIFGSPFRTQKGELTLDVKKIKIVSKALKPLPEKWHGLEDEELRARHRYVDLIVNKDSMKVFVDRIRILKIIRQFMDSQNYLEVETPVLHPILGGANARPFITFHNTLERNFYLRIATELPLKKLIVGGFDKVYEIGRIFRNEGMDSTHNPEFTSMEVYAAYENMEYMMRLTENLFKYVAKSLKKPVVKMGENEIYLTQKFRRIHMVDFIKQETGVDFWEVKSNQEAQELAKKHNVKFEKHQSTLGHIINLFFEEFCEAKCIQPTFVYGHPIDVSPLSKKDYKNPGFTKRFELFINTKEYANAFAELNDPIDQYERFEAQVKEKSLGNDEAVEMDMDFIEALEYGLPPTAGLGVGIDRMIMLFTEKSSIRDVLLFPHMKDKK

SEQ ID NO: 30387 - DNA, 1509 bp, Nitrosomonas europaea
  CDS (1)..(1509): transl_table=11
atgacccaggaagagatatccggtatttcccaggatgaaaacaacctcattgcagaacgtcgttcgaaactgactgcattgcgccagaccggcaatgcgttcccgaacgattatcgccgggataacctggctcgtatcctgcacgaaaaatatgacagctgctccagagaggagctggaaagcagccaggtaacggtaaaagttgccggacgcatgttgttcaagcgcgtaatggggaaggcgagttttgcaacgattcaggatatgagcgggcggatacagctctatatctctaatgatcatactggtgaaaccgctcatgaagcattcagacattatgatctgggtgacattctcggggcggaaggggttttgttcaaaaccaggacggatgaattgtcgttacgagtgacacagcttcatcttctgaccaaatctttgcggcccttaccggaaaaattccacgggctggccgatcaggaacagaaataccggcgccggtatctcgatctgatcacgaatgaagatacacgcagggtgtttgcgattcgttcgaagatcattcaggcgatccgtgagttcctcgtcgatcgggattatctcgaagttgaaacaccgatgatgcattccattcccggcggtgccactgcgcgtccttttgtaactcatcataatgcgctggatatgtccctgtatctgcgcattgccccggaactttacctgaagcggctggtggtgggcggtatggaaaaggtttttgaaatcaaccggaatttcaggaatgaagggatatctacccgccacaatcctgaatttaccatgctggagttttatgaagcttatcaggatcacaattatctgatggatctgacggaatccatgctgcgtgaagtcgcgttgaaagtatcgggaacaactcgcatcgtttatcagcagcgcgaaatggatctggcacaacctttcgcccggctgaccattgcgcaggcgatcctgaaatatcatcccgaatattctgatgcacagctcaatgatcgggattttcttactaaagcgctacaggcaaaaggggttactgtaaaccctgatagtggaattggcgggctgcaactggctcttttcgatgaaacgaccgagcacttgctgtttgagccggtatttatcgttgattatccggctgaggtttctccgctggcacgttgtaacgatgccaatccggaaattaccgatcgtttcgagctttatatcgccgggcgggaaattgcgaacgggttttccgagttgaatgaccctgaagatcaggccaaccgcttccttgagcaggccagagcgaaagaggctggtgatctggaagccatgcactatgatgctgattatattcaggcattggaatatgggctgccgccaaccgcgggagaaggaatcgggatcgatcgactggtgatgttgctgactgattcccccagcattcgtgatgtgattctgttcccgcagttgcgcaaggaagattga

SEQ ID NO: 30388 - protein, 502 aa, Nitrosomonas europaea
MTQEEISGISQDENNLIAERRSKLTALRQTGNAFPNDYRRDNLARILHEKYDSCSREELESSQVTVKVAGRMLFKRVMGKASFATIQDMSGRIQLYISNDHTGETAHEAFRHYDLGDILGAEGVLFKTRTDELSLRVTQLHLLTKSLRPLPEKFHGLADQEQKYRRRYLDLITNEDTRRVFAIRSKIIQAIREFLVDRDYLEVETPMMHSIPGGATARPFVTHHNALDMSLYLRIAPELYLKRLVVGGMEKVFEINRNFRNEGISTRHNPEFTMLEFYEAYQDHNYLMDLTESMLREVALKVSGTTRIVYQQREMDLAQPFARLTIAQAILKYHPEYSDAQLNDRDFLTKALQAKGVTVNPDSGIGGLQLALFDETTEHLLFEPVFIVDYPAEVSPLARCNDANPEITDRFELYIAGREIANGFSELNDPEDQANRFLEQARAKEAGDLEAMHYDADYIQALEYGLPPTAGEGIGIDRLVMLLTDSPSIRDVILFPQLRKED

SEQ ID NO: 30389 - DNA, 1482 bp, Oceanobacillus iheyensis
  CDS (1)..(1482): transl_table=11
atgtcagaagagttaaatgaacatatgcaggttcgaagagataaattggcagaacacatggaaaaagggttggatccatttggtggtaaattcgaacgtagccatcaggctacagatcttattgaaaaatatgattcctattcaaaagaagaattagaggaaactacagatgaagttaccattgctggacgattaatgacaaagcgtggaaaaggaaaagctggatttgctcatattcaagatttaagtggacaaattcaattatatgtacgaaaagatatgatcggtgacgatgcttatgaagtgtttaagtcggcagatttaggagatatcgtcggcgttactggtgttatgtttaaaacaaatgtaggagaaatatctgttaaagcaaaacaatttcaactattaacgaaatccttacgacctttaccagaaaagtatcatggattaaaggatattgaacagcgttatcgtcaacgttatctggacttaattacaaatcctgatagtagaggaacttttgtatctcgtagtaaaatcattcagtcgatgagagagtatttaaacggacaaggctttttagaagttgaaacaccgatgatgcatagtattcctggtggagcttctgcccgtccatttattacacatcataacgctttagatatagaattgtatatgcgaatagctattgaattacacctaaaacgtttaatggttggcggactagaaaaagtgtatgaaatagggcgcgttttccgaaatgaaggagtatctacaaggcacaaccctgaattcacgatgattgagctatatgaagcgtacgctgattatcatgacattatggaacttacagagaatctcgtagctcatattgcaaaacaagtccatggttcaacaacaattacttatggagaacatgaaattaatctagagccaaaatggacaagactgcatatcgtagatgctgttaaagatgctacaggtgtggatttttggaaagaagtttcagatgaggaagctcgagcacttgctaaagagcatggtgtgcaagtaactgaatctatgagttatggacatgtggttaatgaattttttgaacaaaaagtagaagagactcttattcaacctacatttatacacggacatccagtggaaatttctccacttgcaaagaaaaataaagaagatgagcgattcacagatcgttttgagttgtttattgtaggaagagaacatgcgaatgcgtttagtgaattgaatgatccaattgaccaacgcgctcgttttgaggctcaagtaaaagaaagagcagaaggaaacgatgaagcacattatatggatgaggatttcttagaagcacttgaatatggaatgccaccaactggaggactcggtattggtgttgaccgcttagtaatgttattaacaaactcaccatccattcgtgacgtattacttttcccgcaaatgcgtacaaagtaa

SEQ ID NO: 30390 - protein, 493 aa, Oceanobacillus iheyensis
MSEELNEHMQVRRDKLAEHMEKGLDPFGGKFERSHQATDLIEKYDSYSKEELEETTDEVTIAGRLMTKRGKGKAGFAHIQDLSGQIQLYVRKDMIGDDAYEVFKSADLGDIVGVTGVMFKTNVGEISVKAKQFQLLTKSLRPLPEKYHGLKDIEQRYRQRYLDLITNPDSRGTFVSRSKIIQSMREYLNGQGFLEVETPMMHSIPGGASARPFITHHNALDIELYMRIAIELHLKRLMVGGLEKVYEIGRVFRNEGVSTRHNPEFTMIELYEAYADYHDIMELTENLVAHIAKQVHGSTTITYGEHEINLEPKWTRLHIVDAVKDATGVDFWKEVSDEEARALAKEHGVQVTESMSYGHVVNEFFEQKVEETLIQPTFIHGHPVEISPLAKKNKEDERFTDRFELFIVGREHANAFSELNDPIDQRARFEAQVKERAEGNDEAHYMDEDFLEALEYGMPPTGGLGIGVDRLVMLLTNSPSIRDVLLFPQMRTK

SEQ ID NO: 30391 - DNA, 1506 bp, Pasteurella multocida
  CDS (1)..(1506): transl_table=11
atgtcagaacaaactcaagaacttgatcttaatggcgagatgttagtccgccgtgaaaaattagccgcgttgcgcgctaaaggtaacccatttccaaatacatttcgtcgtgatgcgcttgcacaagatttacacgcaaactacgatgcacttgaaggcgaagcattaaaagcacaagaagtcgaagtaaaagtcgctggacgtattatgacgcgtcgtgcaatgggtaaggcgacttttatcaccttgcaagatatgtctggtcgtattcaactctatgtcgcacgtgataatttgccagaaggtatttatgctgacgatgtgggacagtgggatttaggcgatatcattggcgtaaaaggcaccttatttaaaaccaaaaccaatgaattaaccgtacgttgtactgaagtgcagttattaaccaaagcattacgcccattaccagataaattccatggtctaagcgatcaagaaacacgctatcgtcaacgttatttagatttaattgcaaacgaagactcacgtcgtactttcattattcgttctaaagtgattgcgggtattcgtgaatattttctgtcaaaaggctttatggaagtagaaaccccgatgttacaaattattccgggtggggcttctgcacgtccatttgtaacacatcataatgcattagatgtggatatgtatttacgtattgcgcctgagctttatttaaaacgcttagtggttggtggctttgaacgtgtctttgaattaaaccgcaacttccgtaacgaaggagtgtctgttcgccataacccagaatttaccatgctcgaatactaccaagcctatgcggattaccatgatttaatggataatactgaagaattgttacgtaaactggcaatggacattttaggcacgacgattgtcccttatggtgagcttgaatttgattttggcaaaccatttgaacgtatcacgatgcatgatgccattttgaaatacggcgcagaaaaaggtatcgtcaaagaggatctatatgactttgatcgtgctgttgccgttgcgaaaaaattaggtattgaagtacaaaaatcgtgggggttaggcagtctagtcaatgtaatttttgaagaggtggcggagcatcacttaattcagccaacgttcttaatggcacaccctgccgaaatttcgccattagcgcgtcgtaatgatgaaaatccagaagtcactgaccgttttgaattattcatcggtggacgtgaaattggtaacggtttctctgagttaaacgatgccgaagatcaaaacgaacgctttgacgcacaagttgcggcgaaagaagcgggggatgatgaagcgatgtttaaagacgaagatttcgtgactgctcttgaacatggcttaccaccaacagcaggcgaagggttaggtatcgaccgcttagcgatgctattcgcgaatgcggcctccattcgagatgtgatactcttcccagcaatgaagcagaaataa

SEQ ID NO: 30392 - protein, 501 aa, Pasteurella multocida
MSEQTQELDLNGEMLVRREKLAALRAKGNPFPNTFRRDALAQDLHANYDALEGEALKAQEVEVKVAGRIMTRRAMGKATFITLQDMSGRIQLYVARDNLPEGIYADDVGQWDLGDIIGVKGTLFKTKTNELTVRCTEVQLLTKALRPLPDKFHGLSDQETRYRQRYLDLIANEDSRRTFIIRSKVIAGIREYFLSKGFMEVETPMLQIIPGGASARPFVTHHNALDVDMYLRIAPELYLKRLVVGGFERVFELNRNFRNEGVSVRHNPEFTMLEYYQAYADYHDLMDNTEELLRKLAMDILGTTIVPYGELEFDFGKPFERITMHDAILKYGAEKGIVKEDLYDFDRAVAVAKKLGIEVQKSWGLGSLVNVIFEEVAEHHLIQPTFLMAHPAEISPLARRNDENPEVTDRFELFIGGREIGNGFSELNDAEDQNERFDAQVAAKEAGDDEAMFKDEDFVTALEHGLPPTAGEGLGIDRLAMLFANAASIRDVILFPAMKQK

SEQ ID NO: 30393 - DNA, 1515 bp, Photorhabdus luminescens subsp
  CDS (1)..(1515): transl_table=11
atgtcacaacaacaacagggtgcggaacaggcccccgatttaaataatgagctgcaaactcgccgcgaaaaacttgccgctttacgggagaatggaattgcattcccgaatgatttccgtcgtgaaaatatttcagaagatttgcacgcgaaatacgacgacaaaactcaggaagagctggaagcactgaatattgacgtgacggttggcggtcgtatgatgacgcgtcgcattatgggtaaggcttctttcgtaacgctacaggatatgggcggtcgtattcagttatatgttgcccgtgacgatctgccggaaggtatttataacgaacagtttaaaaaatgggatctgggagacattctgggggctcgtggcaaactgtttaaaaccaaaaccggtgaactttccattcactgtactgaactgcgcctgctgacaaaagcgctgcgtccattgccggataaattccacggcttggctgatcaggaaactcgctatcgccagcgttatctggatctgatcgccaacgaagaatcgcgcaaaactttccaaattcgctctcaagtcttattggccctgcgtagctttatggtcagtaaaggctttatggaagtggaaacacccatgatgcaggtaatccctggtggtgcggcggctcgtccatttattactcaccataatgcgctggatattgatatgtatctgcgtattgcgccggaactttacctgaaacgtctggttgttggtggttttgaacgtgtctttgaaattaaccgcaacttccgtaacgaaggcgtatctccgcgccataaccctgagttcaccatgatggaactctacatggcctatgcggattacaaagatctgattgtcctgatagaagagctattccgtacactgacgcagaatattttggggaatactctggttaaatatggtgagcaggaattcgatttcggtaaaccatttgcccaaatgaccatgaaagaggccatttgcaaatatcgtcctgaaaccaacatagctgatttggatgatatggataaggtggtggctatcgctgaatctcttggtattgaagtggaaaaaggttggggccttggtcgtgttcagtgtgaaatttttgaagaaacggcggaaagccacctgattcaaccgacatttatcactgaatatccggcagaagtttctccgctagcgcgtcgtaatgatgcaaatccgtttatcactgaccgttttgaattctttattggtggacgtgagattggtaatggcttctcggaattgaatgatgccgaagatcaggcggaacgttttgctgagcaggttcgtcagaaagacgaaggtgatgacgaagccatgttctacgatgaagattatgtaacggctttggaacacggtatgccgccaaccgccggtttgggcattggtattgaccgtatgataatgttgttgacagatagccataccatccgtgatgttattctgttcccggcaatgcgcccgcagaaataa

SEQ ID NO: 30394 - protein, 504 aa, Photorhabdus luminescens subsp
MSQQQQGAEQAPDLNNELQTRREKLAALRENGIAFPNDFRRENISEDLHAKYDDKTQEELEALNIDVTVGGRMMTRRIMGKASFVTLQDMGGRIQLYVARDDLPEGIYNEQFKKWDLGDILGARGKLFKTKTGELSIHCTELRLLTKALRPLPDKFHGLADQETRYRQRYLDLIANEESRKTFQIRSQVLLALRSFMVSKGFMEVETPMMQVIPGGAAARPFITHHNALDIDMYLRIAPELYLKRLVVGGFERVFEINRNFRNEGVSPRHNPEFTMMELYMAYADYKDLIVLIEELFRTLTQNILGNTLVKYGEQEFDFGKPFAQMTMKEAICKYRPETNIADLDDMDKVVAIAESLGIEVEKGWGLGRVQCEIFEETAESHLIQPTFITEYPAEVSPLARRNDANPFITDRFEFFIGGREIGNGFSELNDAEDQAERFAEQVRQKDEGDDEAMFYDEDYVTALEHGMPPTAGLGIGIDRMIMLLTDSHTIRDVILFPAMRPQK

SEQ ID NO: 30395 - DNA, 1503 bp, Pseudomonas putida
  CDS (1)..(1503): transl_table=11
atgagcgacctcaagaccgaatcgcaagacctgcaacaggaagaaaacgccctgatcgccctgcgcaaggaaaaacttgccgccgagcgtgccaagggcaatgccttccccaacgacttccgtcgcgacagctactgcaacgacctgcagaagcaatacgcggacaagaccaaggaagagctggaagcagccgcgatcccggtcaaggtcgccggccgcatcatgctcaaccgtggttcgttcatggttatccaggacatgactggccgtattcaggtctacgtcaaccgcaagaccctgccggaagaaaccctggccgcggtcaagacctgggacctgggcgacatcatcagcgccgaaggcaccctggcccgttccggcaagggcgacctgtacgtcgaaatgaccaacgtgcgcctgctgaccaagtcgctgcgcccgctgcccgacaagcaccacggcctgaccgacaccgagcagcgctaccgccagcgctacgtcgacctgatggtcaacgaagaaacccgccacaccttccgtgtgcgttcgcaggtgatctcgcacatccgcaagttcctcatcgagcgtgacttcctcgaagtcgagacgccgatgctgcagaccatcccgggcggcgccgctgccaagccgttcgaaacccaccacaatgccctggacatggccatgttcctgcgtatcgcgccggagctgtacctcaagcgtctggtggttggtggttttgagaaagtgttcgagatcaaccgtaacttccgtaacgaaggcgtttcgactcgtcacaaccctgaattcaccatgctcgagttctaccaggcctacgccgactaccgcgacaacatggacctcaccgaggaactgttccgcgagctggcgcaactggtactgggctccactgacgtaccgtacggcgacaaggtcttccacttcggcgagccgttcgtgcgcctgtcggtgttcgactcgatcctcaagtacaacccggagctgaccgccgccgacctgcaggacgtcgaccgcgcccgcgagattgccaggaaggccggcgccaaggtgctgggccatgaaggcctgggcaagctgcaggtgatgattttcgaagagctggtcgagcacaagctggaacagccgcacttcattaccgagtacccgttcgaagtgtcgccgttggcccgtcgcaacgacgacaacccggccgttaccgaccgtttcgagctgttcatcggtggccgcgaaatcgccaacgcctactccgagctcaacgatgccgaagatcaggccgagcgcttcctggcccaggtggccgagaaggacgcgggtgacgatgaagccatgcactatgacgccgacttcgttcgtgcgctggagtacggcatgccgccgaccgccggtgaaggcatcggcatcgaccgcctggtgatgctgctgaccaactcgccgtcgatccgcgacgtcatcctgttcccgcacatgcgtccgcaggcctga

SEQ ID NO: 30396 - protein, 500 aa, Pseudomonas putida
MSDLKTESQDLQQEENALIALRKEKLAAERAKGNAFPNDFRRDSYCNDLQKQYADKTKEELEAAAIPVKVAGRIMLNRGSFMVIQDMTGRIQVYVNRKTLPEETLAAVKTWDLGDIISAEGTLARSGKGDLYVEMTNVRLLTKSLRPLPDKHHGLTDTEQRYRQRYVDLMVNEETRHTFRVRSQVISHIRKFLIERDFLEVETPMLQTIPGGAAAKPFETHHNALDMAMFLRIAPELYLKRLVVGGFEKVFEINRNFRNEGVSTRHNPEFTMLEFYQAYADYRDNMDLTEELFRELAQLVLGSTDVPYGDKVFHFGEPFVRLSVFDSILKYNPELTAADLQDVDRAREIARKAGAKVLGHEGLGKLQVMIFEELVEHKLEQPHFITEYPFEVSPLARRNDDNPAVTDRFELFIGGREIANAYSELNDAEDQAERFLAQVAEKDAGDDEAMHYDADFVRALEYGMPPTAGEGIGIDRLVMLLTNSPSIRDVILFPHMRPQA

SEQ ID NO: 30397 - DNA, 1533 bp, Ralstonia solanacearum
  CDS (1)..(1533): transl_table=11
atgaccgaaccgaacaccccggccgcacccactggacaggcgcaagacgacaaccagatcatggccgagcgccgcgagaagctcgccgcgctgcgccagcagggcgtcgcctatcccaacgatttctgcccgacccaccacgcggccgacctgcacacccgctacagcgagaccgaccagcccgcgctggaagcggccaatgtcgaggtcgccctcgccgggcgcatgatgctcaagcgcgtgatgggcaaggccagcttcgccaccgtgcaggacggcagcggccagatccagttctacatcacgcgcgaccgcgtgggcgaagacgtctacgccgccttcaagcattgggacctcggcgacatcgtcgccgcgcgcggcgtgctgttccgcaccaacaagggcgagctgtcggtgcaggtgcaggagctgcgcctgctgtcgaagtcgctgcgtccgctgccggacaagttccacggcctggccgaccaggaaatgaagtaccgccagcgctacgttgacctgatcgtctcgcccgagacgcgcaacaccttccgcgcccgcaccaaggccatcgcctcgctgcgccaccacatgagcgatgccggcttcatggaagtggaaacgccgatgctgcacccgattccgggcggcgcggcggccaagcccttcatcacgcaccacaacgcgctggacatgcagatgttcctgcgcatcgccccggagctgtacctcaagcgcctgatcgtcggcggcttcgagcgcgtgtacgagatcaaccgcaacttccgcaacgagggcgtgtcgccacggcacaaccccgagttcacgatgatggagttctatgcagcctacacggactaccgctggctgatggactacaccgagaacctgatccgccaggccgccatcgatgccaccggcagcgccgccctcaactaccagggtcgcgagctggacctgtccaagcccttccaccgcctgaccatctgccaggccatccagaagtacgcgccgcagtacaccgacgcgcaactggccgacgccaacttcctgcgtgccgagctcaagaagttcaagatcgacaccaacgcgccgcagttcctgaacgccggcgtgggcacgctgcagctcgtcctgttcgaagagacggccgagtcgcaactgtgggagccgaccttcatcgtcgactacccggtcgaggtgtcgccgctggcacgcggctcggacacgctgcccggcatcaccgagcgcttcgagctgttcatcaccggccgcgagatcgccaacggcttctccgagctgaacgaccccgaagaccaggccgaacgcttccgcaagcaggtcgaacagaaggacgccggcgacgaggaagccatgttctacgatgccgactacatccgcgcgctggaatacggcatgcccccgaccggcggctgcggcatcggcatcgaccgcctggtgatgctgctgaccgacagccccaacatccgcgacgtgatcctcttcccgcacctgcgccgcgaagactga

SEQ ID NO: 30398 - protein, 510 aa, Ralstonia solanacearum
MTEPNTPAAPTGQAQDDNQIMAERREKLAALRQQGVAYPNDFCPTHHAADLHTRYSETDQPALEAANVEVALAGRMMLKRVMGKASFATVQDGSGQIQFYITRDRVGEDVYAAFKHWDLGDIVAARGVLFRTNKGELSVQVQELRLLSKSLRPLPDKFHGLADQEMKYRQRYVDLIVSPETRNTFRARTKAIASLRHHMSDAGFMEVETPMLHPIPGGAAAKPFITHHNALDMQMFLRIAPELYLKRLIVGGFERVYEINRNFRNEGVSPRHNPEFTMMEFYAAYTDYRWLMDYTENLIRQAAIDATGSAALNYQGRELDLSKPFHRLTICQAIQKYAPQYTDAQLADANFLRAELKKFKIDTNAPQFLNAGVGTLQLVLFEETAESQLWEPTFIVDYPVEVSPLARGSDTLPGITERFELFITGREIANGFSELNDPEDQAERFRKQVEQKDAGDEEAMFYDADYIRALEYGMPPTGGCGIGIDRLVMLLTDSPNIRDVILFPHLRRED

SEQ ID NO: 30399 - DNA, 1497 bp, Rhizobium meliloti
  CDS (1)..(1497): transl_table=11
atgaccgacaagacacaggcagccggcctctcctccgacgcgacggaagtgcgctcccagaagctcgacctgctgcgccagcagatcggcgacgtctatcccgcgcatttccaccgtacgctcaccaatgcggaactcgcggagaaatatgccgggctggagcccgataccgaaagcggcgaaacggtaaccgttgccggccgcgttttctcctcgcgcaattccggcatgttcatggatcttcatgacgcctccggcaagatccagatcttttcgcacaaggatacggcaccggaagaggcgcgcgcgcttctgccgatgatcgatctcggcgacatcatcggggtcaccggagaggtgcgccgcaccaagcgcggcgaactgaccgtcaacgccaaagagatcaccatgctctgcaagtcgctcctgccgatgccggagaagtatcacgggcttgccgatatcgagacgcgctaccgcaagcgctacctcgacatcatggtcaacgaggaatcgaagctgcgcttccagcagcgaagccgcatcgtgtcgagcctgcgccgattcctcgaggacgaaggcttcatggaagtggagacgccgatgctgcagccgatctacggcggcgcgacggccgagcccttcaagacgcatcacaacacgctgaagctcgacatgtatctgcgcatcgcgcccgagctttacctgaagcgcattctcgtttccggcctgacggacaaggtcttcgagatcaaccgcaacttccgcaacgaaggcgtctcgacccggcacaatcctgaattcaccatgatggagtgctactgggcctatgctgactacgaggacgtgatgggtctcgtggagcgcatgttcgagaccctggcgcttgcggttcacggcaagacggaattcgagttcggcgacaagcagctctccttcaaggggccgttcccgcgcgtctctatgccggcggccgtcaaggacgcgaccggaatcgatttccttgccctcaagagcgacgaggaggcccggcaggcggctcgcgacgccggtgtcgagatcgagaaggacgcgacctggggcgaagtgctcgccttcctcttcgaggagaaggtcgaagcgaccttgatccagcctgctcatgtcatccacttcccgaaggacatctcgcccttcgccaaggaggtgccgggcgagccgcggctcgtcgagcgcttcgagacctattgcaacggctgggagatcggcaacgccttttccgagctcaacgacccggtcgagcagcgcgcccgcatggtcgagcagatggaacaggcgcatgcccgcggcgagaaggaaaagacgctggacgaggacttcctcgatgccatggaccagggcatgccgcccgccggggggttggggatcggtgtcgaccggctgatcatgctgctcaccaactcgccgtcgatccgcgacatcatcctcttcccggcccgccgccagaaggccgattga

SEQ ID NO: 30400 - protein, 498 aa, Rhizobium meliloti
MTDKTQAAGLSSDATEVRSQKLDLLRQQIGDVYPAHFHRTLTNAELAEKYAGLEPDTESGETVTVAGRVFSSRNSGMFMDLHDASGKIQIFSHKDTAPEEARALLPMIDLGDIIGVTGEVRRTKRGELTVNAKEITMLCKSLLPMPEKYHGLADIETRYRKRYLDIMVNEESKLRFQQRSRIVSSLRRFLEDEGFMEVETPMLQPIYGGATAEPFKTHHNTLKLDMYLRIAPELYLKRILVSGLTDKVFEINRNFRNEGVSTRHNPEFTMMECYWAYADYEDVMGLVERMFETLALAVHGKTEFEFGDKQLSFKGPFPRVSMPAAVKDATGIDFLALKSDEEARQAARDAGVEIEKDATWGEVLAFLFEEKVEATLIQPAHVIHFPKDISPFAKEVPGEPRLVERFETYCNGWEIGNAFSELNDPVEQRARMVEQMEQAHARGEKEKTLDEDFLDAMDQGMPPAGGLGIGVDRLIMLLTNSPSIRDIILFPARRQKAD

SEQ ID NO: 30401 - DNA, 1503 bp, Shewanella oneidensis
  CDS (1)..(1503): transl_table=11
atgactgaacaagtacaagatgaaaacaaactgattgccgagcgtcgtgccaagctagacagcattcgcccgaactgcagcgcgaatgctcaccctaatacgttccgtcgcacccataaagcggcagagttgcaggaaaaatacggtcaaaatactaaggaagaactcgaagccttaggttttagaaccagcatcgctggccgtatcatggcaaaacgtggcccattcctagtgatccaagacgtgtctggtcgtatccaagcttacgctgaaaagggcgttcaagcggatctgaaagatcgttaccaaggtttggatatcggtgacatcatcggcgtgactggtcagttgcacttgtctggtaaaggcgatctgtacgtcaacatggaagagtaccaactgctgactaaagcactacgtcctctgccagaaaaattccacggcttaacagatcaagaaacccgttaccgccaacgttatgttgacttaatcgttaacgaagaatctcgtcaagccttcgtaatgcgttcaaaagtggttgcagctatccgtaacttcatgatcaaaaaagagttcatggaagttgaaaccccaatgatgcacgtgatcccaggcggcgcttctgcccgtccatttatcacgcaccacaatgcgctggacatgcctatgtacctgcgtatcgcgccagagttatacctcaagcgtttagtggtgggtggttttgagcgtgtgttcgaaatcaatcgtaacttccgtaacgaaggtctgtcaccacgtcataacccagaattcactatgatggaattctatatggcctatgctgactaccaagatctgatggacttaaccgaagaattgttaagctcaattgcaatcgaactcttaggtagcgcgcaaatgccatatggcgagcatactgttgatttcggtggtccttatgcccgtttaagcatgctagaagcgattcagaagtacaatcctgataacgcgactatccaggccatgacctacgagcaagtgaaagatcttgaatttatgcgtgaactggctatcagccttggcatcaagattgagaagttctggacctgtggtcagctattagaagaaatcttcggtgaaaccgctgaatggcagttaatgcaaccgactttcatcactggctacccagcggacatttcgccactggcacgtcgtaacgatgacaaccactttattaccgaccgttttgaattcttcatcggtggccgtgaagtagctaacggcttcagcgagttaaatgatgcgcaggatcaagacagccgctttaaagcgcaggttgatgccaaagacgcgggtgacgatgaagccatgttctacgatgcggactacatcactgcactggaacacggtttaccaccaacagcaggtcaaggtatcggtatcgaccgtttagtgatgctattcactaacactcacactatccgtgatgtgatcctattcccagcgatgcgcccacaggcttaa

SEQ ID NO: 30402 - protein, 500 aa, Shewanella oneidensis
MTEQVQDENKLIAERRAKLDSIRPNCSANAHPNTFRRTHKAAELQEKYGQNTKEELEALGFRTSIAGRIMAKRGPFLVIQDVSGRIQAYAEKGVQADLKDRYQGLDIGDIIGVTGQLHLSGKGDLYVNMEEYQLLTKALRPLPEKFHGLTDQETRYRQRYVDLIVNEESRQAFVMRSKVVAAIRNFMIKKEFMEVETPMMHVIPGGASARPFITHHNALDMPMYLRIAPELYLKRLVVGGFERVFEINRNFRNEGLSPRHNPEFTMMEFYMAYADYQDLMDLTEELLSSIAIELLGSAQMPYGEHTVDFGGPYARLSMLEAIQKYNPDNATIQAMTYEQVKDLEFMRELAISLGIKIEKFWTCGQLLEEIFGETAEWQLMQPTFITGYPADISPLARRNDDNHFITDRFEFFIGGREVANGFSELNDAQDQDSRFKAQVDAKDAGDDEAMFYDADYITALEHGLPPTAGQGIGIDRLVMLFTNTHTIRDVILFPAMRPQA

SEQ ID NO: 30403 - DNA, 1767 bp, Solanum lycopersicum
  CDS (1)..(1767)
atggattcatctgtttcaacagagccactaagcaagaatgctcttaagagagaaaagaaggcaaaggaaaaggagcaacttgaacaggaaaagaaggcagcagcagtagctaaaaggcaaatggagcaacacaatttacctgagaatgatgatttggatcctactcaatacttggcgaacagattgaggaacattgagtcgttgagagaatctggaatcaatccatatccacataagttcttcattacaatgtctattcctgaatttattagcagatatgctcatctaaatactggagagtttcctgaagacattgatatgtccttagcagggagagtgataagcaagcgagcatcatcgtcaaaactctatttctatgaactgcttggtggtggggcgagagtacaagtactggctagtgcaagggattctgatgtggatgctgttcagttttctaattatcagtctggagtgaagcgaggtgacatcattggtgtccgcggatatcctggaaagagtaagagaggagagctaagtatctttgcaaaaccttttatagttctagccccttgcctacacatgttaccgaggcggctgacctcctctatcgtagatgaaactcggacacagaatttccaaggaataacagcttatgatacttggactccaggagatctgagaaaccccgagtcttatgtgttaagggatcaggaaactcggtatcgtcaaaggtacttagatctaatgatgaatccagaagttcgagctttgtttaggactcgcgccagaatcatttcttacatcaggagtttcctcgataatcttgagtttctggaggtggagacaccttctatgaatttgacagctggaggagcttcagccagaccatttatcactcaccataacgagttggacacagaactcctcatacgtgtttcccccgagctttatcttaagaagttagttgttggtggattcgaccgtgtttatgagctggggaagcatttcaggaatgaaggaatggatttaactcactctcctgagttcacaatgtgtgaactttatatggcttacgctgattacaacgatttgatggatttgacagagcagctactatcaggtatggtgaaggacctaaccggaagctataaaataaggtaccatgctaatggcttggataatgaaccgatagaaattgatttcactcctccattcagaaagattgatatgttgtcggagttggagaaagtggctaacatcagtatacctagagatctatcgagtgaaagtgctaacaagcacttggtagatgtatgtgagaagttcgatgtcaaatgccctccacctcataccacaacacgattactcgataagctagttggtcattttattgaagtaaactgcataaatcccacttttattatcaaccatcctgagatcatgagcccactggctaaatcacgcagatcagaacctggtttgactgagcgcttcaacttattcgttaacagaagagagctatgtgatgcctatactgaactaaatgatcctacagcacagagagaacgctttgctgaacaattaaaggacagacaattaggagacgacgaggcaatggatttggatgaatcctttataactgcattggagtatggattaccccctactggtggactaggcatggggattgatagacttacaatgttgcttacagattcacaaaatgtcaaggaagttatcctctttccagccatgagattacaatga

SEQ ID NO: 30404 - protein, 588 aa, Solanum lycopersicum
MDSSVSTEPLSKNALKREKKAKEKEQLEQEKKAAAVAKRQMEQHNLPENDDLDPTQYLANRLRNIESLRESGINPYPHKFFITMSIPEFISRYAHLNTGEFPEDIDMSLAGRVISKRASSSKLYFYELLGGGARVQVLASARDSDVDAVQFSNYQSGVKRGDIIGVRGYPGKSKRGELSIFAKPFIVLAPCLHMLPRRLTSSIVDETRTQNFQGITAYDTWTPGDLRNPESYVLRDQETRYRQRYLDLMMNPEVRALFRTRARIISYIRSFLDNLEFLEVETPSMNLTAGGASARPFITHHNELDTELLIRVSPELYLKKLVVGGFDRVYELGKHFRNEGMDLTHSPEFTMCELYMAYADYNDLMDLTEQLLSGMVKDLTGSYKIRYHANGLDNEPIEIDFTPPFRKIDMLSELEKVANISIPRDLSSESANKHLVDVCEKFDVKCPPPHTTTRLLDKLVGHFIEVNCINPTFIINHPEIMSPLAKSRRSEPGLTERFNLFVNRRELCDAYTELNDPTAQRERFAEQLKDRQLGDDEAMDLDESFITALEYGLPPTGGLGMGIDRLTMLLTDSQNVKEVILFPAMRLQ

SEQ ID NO: 30405 - DNA, 1488 bp, Staphylococcus aureus
  CDS (1)..(1488): transl_table=11
atgtcagaagaaatgaatgaccaaatgttggttcgacgtcaaaaattacaagaattatatgatcttggtatagacccgtttggttctaaatttgaccgttcaggtttatctagtgatttgaaagaagagtgggaccagtattctaaagaagaattggtagaaaaagaagcggatagtcatgtcgctatagctggacgattaatgactaagcgtggtaaaggtaaagcaggatttgcacacgttcaggacttagctggacaaattcaaatatacgttcgtaaagatcaagttggcgatgacgaatttgatttatggaaaaatgctgatttaggcgatatcgttggtgttgaaggtgtaatgttcaaaacaaatactggcgaattatcggttaaagcgaagaaattcacgctactaactaaatcattgcgaccattaccggataaattccacggtttacaggatattgaacagagatatcgtcaaagatatttagatttaattacgaacgaagatagcactcgtacatttattaatcgtagtaaaatcattcaagaaatgcgtaattatttaaataataaaggtttcttggaagtagaaacacctatgatgcaccaaattgctggtggagcagctgctagaccatttgtaacacatcataatgcattagatgcaacgttatacatgcgtattgctattgagttgcatttaaaacgtttaattgtcggtggacttgaaaaagtatatgaaattggtagagtattccgtaatgaaggtgtatcaactagacataaccctgaattcacaatgattgaattatatgaagcatatgcagattatcatgacattatggatttaacagaatctatggtgagacatattgccaatgaagtattaggttctgcaaaagtacaatacaatggggaaacgattgatttagaatctgcttggactcgtttgcatattgttgatgctgtaaaagaagctactggtgtagatttttatgaagttaaaagtgatgaagaagctaaagctttagctaaggaacatggtattgaaattaaagatacaatgaaatatggtcatattttaaatgaattctttgagcaaaaagttgaagaaacacttattcagccaacgtttatctatggtcatccgactgaaatttcacctttagcgaagaaaaatcctgaagatcctagatttactgatcgtttcgaattgttcattgtaggtagagagcatgcaaatgcatttactgaattaaatgatcctattgatcaaaaaggtcgttttgaagcgcaacttgctgaaaaagcgcaaggtaatgatgaagcgcatgaaatggatgaagattacattgaagcgttagaatatggtatgcctccgacaggtggtcttggtatcggtattgacagattagttatgttattaactgactctccatcaatcagagacgtattattattcccttatatgagacaaaaataa

SEQ ID NO: 30406 - protein, 495 aa, Staphylococcus aureus
MSEEMNDQMLVRRQKLQELYDLGIDPFGSKFDRSGLSSDLKEEWDQYSKEELVEKEADSHVAIAGRLMTKRGKGKAGFAHVQDLAGQIQIYVRKDQVGDDEFDLWKNADLGDIVGVEGVMFKTNTGELSVKAKKFTLLTKSLRPLPDKFHGLQDIEQRYRQRYLDLITNEDSTRTFINRSKIIQEMRNYLNNKGFLEVETPMMHQIAGGAAARPFVTHHNALDATLYMRIAIELHLKRLIVGGLEKVYEIGRVFRNEGVSTRHNPEFTMIELYEAYADYHDIMDLTESMVRHIANEVLGSAKVQYNGETIDLESAWTRLHIVDAVKEATGVDFYEVKSDEEAKALAKEHGIEIKDTMKYGHILNEFFEQKVEETLIQPTFIYGHPTEISPLAKKNPEDPRFTDRFELFIVGREHANAFTELNDPIDQKGRFEAQLAEKAQGNDEAHEMDEDYIEALEYGMPPTGGLGIGIDRLVMLLTDSPSIRDVLLFPYMRQK

SEQ ID NO: 30407 - DNA, 1488 bp, Staphylococcus aureus
  CDS (1)..(1488): transl_table=11
atgtcagaagaaatgaatgaccaaatgttggttcgacgtcaaaaattacaagaattatatgatcttggtatagacccgtttggttctaaatttgaccgttcaggtttatctagtgatttgaaagaagagtgggaccagtattctaaagaagaattggtagaaaaagaagcggatagtcatgtcgctatagctggacgattaatgactaagcgtggtaaaggtaaagcaggatttgcacacgttcaggacttagctggacaaattcaaatttacgttcgtaaagatcaagttggcgatgacgaatttgatttatggaaaaatgctgatttaggcgatatcgttggtgttgaaggtgtaatgttcaaaacaaatactggcgaattatcggttaaagcgaagaaattcacgctactaactaaatcattgcgaccattaccggataaattccacggtttacaggatattgaacagagatatcgtcaaagatatttagatttaattacgaacgaagatagcactcgtacatttattaatcgtagtaaaatcattcaagaaatgcgtaattatttaaataataaaggtttcttggaagtagaaacacctatgatgcaccaaattgctggtggagcagctgctagaccatttgtaacacatcataatgcattagatgcaacgttatacatgcgtattgctattgagttgcatttaaaacgtttaattgtcggtggacttgaaaaagtatatgaaattggtagagtattccgtaatgaaggtgtatcaactagacataaccctgaattcacaatgattgaattatatgaagcatatgcagattatcatgacattatggatttaacagaatctatggtgagacatattgccaatgaagtgttaggttctgcaaaagtacaatacaatggggaaacgattgatttagaatctgcttggactcgtttgcatattgttgatgctgtaaaagaagctactggtgtagatttttatgaagttaaaagtgatgaagaacgtaaagctttagctaaagaacatggtattgaaattaaagatacaatgaaatatggtcatattttaaatgaattctttgagcaaaaagttgaagaaacacttattcagccaacgtttatctatggtcatccgactgaaatttcacctttagcgaagaaaaatcctgaagatcctagatttactgatcgtttcgaattgttcattgtaggtagagagcatgcaaatcgatttactgaattaaatgatcctattgatcaaaaaggtcgttttgaagcgcaacttgttgaaaaagcgcaaggtaatgatgaagcgcatgaaatggatgaagattacattgaagcgttagaatatggtatgcctccgacaggtggtcttggtatcggtattgacagattggttatgttattaactgactctccatcaatcagagacgtattattattcccttatatgagacaaaaataa

SEQ ID NO: 30408 - protein, 495 aa, Staphylococcus aureus
MSEEMNDQMLVRRQKLQELYDLGIDPFGSKFDRSGLSSDLKEEWDQYSKEELVEKEADSHVAIAGRLMTKRGKGKAGFAHVQDLAGQIQIYVRKDQVGDDEFDLWKNADLGDIVGVEGVMFKTNTGELSVKAKKFTLLTKSLRPLPDKFHGLQDIEQRYRQRYLDLITNEDSTRTFINRSKIIQEMRNYLNNKGFLEVETPMMHQIAGGAAARPFVTHHNALDATLYMRIAIELHLKRLIVGGLEKVYEIGRVFRNEGVSTRHNPEFTMIELYEAYADYHDIMDLTESMVRHIANEVLGSAKVQYNGETIDLESAWTRLHIVDAVKEATGVDFYEVKSDEERKALAKEHGIEIKDTMKYGHILNEFFEQKVEETLIQPTFIYGHPTEISPLAKKNPEDPRFTDRFELFIVGREHANRFTELNDPIDQKGRFEAQLVEKAQGNDEAHEMDEDYIEALEYGMPPTGGLGIGIDRLVMLLTDSPSIRDVLLFPYMRQK

SEQ ID NO: 30409 - DNA, 1503 bp, Sulfolobus acidocaldarius
  CDS (1)..(1503): transl_table=11
atgtttcatattattgatttagcgttgaaatgggatgaacgacgagtaaaaatagttgatgagttaaagtcaaagggaatcaatccatatcctcataaatacgatataactcacaccatcatagacataaagaagatggagaggagcgacaaaccaacagatgcgtttgcttttgatatatcaactgctggtagggttgctaatattaggagacatggcaaaatctcgttcgtagatatatttgatgagggtgaaagacttcaattacaattgagagttaatgaattaggcgataggtatgataaattcttcgagatagtagacagaggagacatattaggtgttaaaggtgacttgctctatactataaaaggcgaattaacacttagaatcaaggactatgtgctcttgtcaaagtccctaatagaacctcctgattggtctaagctttcacctgaatttagatatgctcataggtacgtagattttctgtataatgatttggctaggagaaatatggaaattagatattctacaataaggaggataagagaattcctttattcaaaaggatttatggaagtggaaacacccatattacaacctgtttacggaggggcactggctaaaccgtttatgagccatgtaaactacctgaatgaaaactggtatctgagaatatctttagaattatatctcaaaagatacattgttggtggattcaataaagtatttgaaataggtaaagtgtttcgaaacgaagacatagatgttacacataatccagaatttactctattggagttatattgggcttacgcagattataatgatattatgagactcactgaagaaatgcttcaagacgtagttaaaaatatcaataatgactccaaaataaaatacagtattggaggaaaagagtatacgatagagttttcacaatttagaaaaattaccatgattgattctttgactgaagttttaggcaaagatgttgataaaatgagtgatgaagagctgaagtctcttatggacaagaatgggcttaagccaagaggaaatatgtatattagaggtttaatgatagagaaattatttgataaattagtcactccaacactgatacaaccgaccttcgttttggattatcctgtagaaacaactcccctctgcaagcctcatagaagcaagcaaggattggtggaaaggtttgaactatacgtagctggaatggaacttgcaaatgcttatactgaactgaacgatcctataatacaagacatgctattcaaacaagagcaagaaatgtttaagaggggagacgaagaggctcacccatacgatgtcgacttcgttagagcccttagctacggtatgcctcctacaggaggattaggaataggtatagacaggttgataatgttgttgacaaataacatgagtataaaagaaataataccatatcctatgcttagtgctaaggtcatccaagaggattaa

SEQ ID NO: 30410 - protein, 500 aa, Sulfolobus acidocaldarius
MFHIIDLALKWDERRVKIVDELKSKGINPYPHKYDITHTIIDIKKMERSDKPTDAFAFDISTAGRVANIRRHGKISFVDIFDEGERLQLQLRVNELGDRYDKFFEIVDRGDILGVKGDLLYTIKGELTLRIKDYVLLSKSLIEPPDWSKLSPEFRYAHRYVDFLYNDLARRNMEIRYSTIRRIREFLYSKGFMEVETPILQPVYGGALAKPFMSHVNYLNENWYLRISLELYLKRYIVGGFNKVFEIGKVFRNEDIDVTHNPEFTLLELYWAYADYNDIMRLTEEMLQDVVKNINNDSKIKYSIGGKEYTIEFSQFRKITMIDSLTEVLGKDVDKMSDEELKSLMDKNGLKPRGNMYIRGLMIEKLFDKLVTPTLIQPTFVLDYPVETTPLCKPHRSKQGLVERFELYVAGMELANAYTELNDPIIQDMLFKQEQEMFKRGDEEAHPYDVDFVRALSYGMPPTGGLGIGIDRLIMLLTNNMSIKEIIPYPMLSAKVIQED

SEQ ID NO: 30411 - DNA, 1521 bp, Synechococcus elongatus
  CDS (1)..(1521): transl_table=11
atggctgacgtgggggcaacgggagccgaaattcgggccacacggattgagaaagcaaaaacattgcaagcacagggaatgagcccctatgcctatcgttgggagcgcacccatactgcagcattgctgcaagacaaatatgcccacttggccgctggcgaagcggtgggcgatcgcgtgagtgtggccggtcgcattatggcgcggcgcatctttggcaagctggccttttttacgcttcaggatgacagcggcacgattcagctttacctcgataagcaaaccattagccaaaccatgggggaagccgcctttgctgatttgaaacaccttactgatgtcggcgatatccttggtgcggtgggcaccctcaagcgcactgagaagggcgaactgtcggttgtggtggaatcctacaccatgctgacaaaatcattgttgcccctaccggacaaatggcacggcctcacagatgtggaaaagcgctatcgtcagcgctatgtggatctcatcgtcaacccccaagtgcgtgacacattccgcaagcgagcactgatcaccgccgccattcgccgctacctcaatgagcagggctttattgaaattgaaacacctgttctccaggtggaagctgggggtgccgaggcacgtccttttattacctaccacaacaccttggagatgcagctttatttgcgcattgccaccgaactccacctgaagcgcctcattgtcggtgggtttgagaaggtgtatgaactggggcgcatctttcgcaatgagggcatctcaaccaagcacaaccctgaatttacgtccattgaggtctatcaggcctacgccgactataacgatatgatgacgctgacggaggcgattattaccacaggggcgatggaggtgttgggcaccctcaaaatcacctatcaaggggaaacaattgatctgacacccccatggcgacgggtgacaatgcacgatgcggtgttggcagctactggaattgactttcgccaattgggggatctgaccgcggctaaaatagccgctcaaaaggtaggagtaaaagacttagacacctgtgacacgattggccgagtgctcaatgaagtgtttgagcaaatcgttgaacctacattgattcagcccacctttgttctcgactaccctgtggagatttctcccttggccaagccccaccgcagtcaaccgggactggtggagcgatttgaattatttatcgtcggccgcgagcatgccaatagtttttcggagttaacggatcctttggatcaacggcagcgcttggaggaacaagcgcggcgcaaagcggctggggatttggcagcccatagtgttgatgaagattttctcaccgccttagaacatggaatgccacccacaggaggtctaggaattggcattgaccgcttggtcatgctgctaacggactcgccaagtattcgtgatgtgattgctttcccgctgttacgtcctgaatcggcgggtggtcaggtttga

SEQ ID NO: 30412 - protein, 506 aa, Synechococcus elongatus
MADVGATGAEIRATRIEKAKTLQAQGMSPYAYRWERTHTAALLQDKYAHLAAGEAVGDRVSVAGRIMARRIFGKLAFFTLQDDSGTIQLYLDKQTISQTMGEAAFADLKHLTDVGDILGAVGTLKRTEKGELSVVVESYTMLTKSLLPLPDKWHGLTDVEKRYRQRYVDLIVNPQVRDTFRKRALITAAIRRYLNEQGFIEIETPVLQVEAGGAEARPFITYHNTLEMQLYLRIATELHLKRLIVGGFEKVYELGRIFRNEGISTKHNPEFTSIEVYQAYADYNDMMTLTEAIITTGAMEVLGTLKITYQGETIDLTPPWRRVTMHDAVLAATGIDFRQLGDLTAAKIAAQKVGVKDLDTCDTIGRVLNEVFEQIVEPTLIQPTFVLDYPVEISPLAKPHRSQPGLVERFELFIVGREHANSFSELTDPLDQRQRLEEQARRKAAGDLAAHSVDEDFLTALEHGMPPTGGLGIGIDRLVMLLTDSPSIRDVIAFPLLRPESAGGQV

SEQ ID NO: 30413 - DNA, 1533 bp, Synechocystis sp
  CDS (1)..(1533): transl_table=11
atggccgattcccattcccactccagccttgaagaaatccgtgccacccggcttgaaaaagcggaacaattgcggcaactcggcctcaatccctatgcctacacctgggaaattacccaccaagctcaggatttacaggaaacctatcgggatctaagcaacggcgaagaagtggacctcaaagtggcgatcgccggccgaatcttagcacggcgggtgatgggaaaattagccttttttactctccaggacgaaagcggcaccatccaactttatttggaaaagcaacggctgacggaacatatgccggagttggaaaatgcttttaacttgttgaaaaaaatcaccgatgtgggggatattttgggggtaaccggcaccctcaaacgcacggaaaaaggcgaattatcggtttatgtgcaaacctacgctgtattaactaagtctttactgcccctaccggataaatggcatggtttgactgacacagaaaaacgctaccgccaacgttacgtggatttaatcgttaatcccaccgtaaggcaaactttccgccgccgggcccagattaccgccgccatccgccgttacttggataaacagggctttatcgaaattgaaacaccagttttacagggggaatccgggggcgcagaagctcggccttttatcacccatcacaacaccctgggcatgcccctgtatctccgcattgctacggaattacatctgaaaagattggtggtgggaggctttgaaaaggtttttgagttggggcgaatttttcgcaacgaaggggtttccaccaggcataatcctgaatttacctccattgaggtctatcaagcctacgtggactataacgagatgatggccttaaccgaagccctcgtcaccaccgccgcccaagcagtattaggcacgctaaaaattacctaccaaggggaagaaatcgacctcacccctccctggaaacgcatcaccatgcacgaagcggtgcagttagaaacagggatagattttagccaatttacagatctggaaacggccaaacaagcggccacaaaagcgggcattggtgtgccggaagattgtccttcccttgggcatttgttaaaccatgcttttgagcaaaaagtggaagggacgttgatgcaacccacttttatcatcgatttcccggtggaaatttctcccctcgctaagccccatcgcagtaaaccggggctggtggaacggtttgagctatttgtttacggtcgggaattggccaatagtttttccgagctgacagaccccattgatcaacggagtcggttggaagcccaggcggctaaaaaagcggcaggggatttggaagcccacagcgttgatgaagatttcctcacagcgttggaatacggcatgccccctactggtggcttgggcataggcatcgatcgcctggtgatgttgctgaccgattcccccagtattcgagatgtaattgcttttccgttgctgaaaaatcaggaggctggcagcgatggttga

SEQ ID NO: 30414 - protein, 510 aa, Synechocystis sp
MADSHSHSSLEEIRATRLEKAEQLRQLGLNPYAYTWEITHQAQDLQETYRDLSNGEEVDLKVAIAGRILARRVMGKLAFFTLQDESGTIQLYLEKQRLTEHMPELENAFNLLKKITDVGDILGVTGTLKRTEKGELSVYVQTYAVLTKSLLPLPDKWHGLTDTEKRYRQRYVDLIVNPTVRQTFRRRAQITAAIRRYLDKQGFIEIETPVLQGESGGAEARPFITHHNTLGMPLYLRIATELHLKRLVVGGFEKVFELGRIFRNEGVSTRHNPEFTSIEVYQAYVDYNEMMALTEALVTTAAQAVLGTLKITYQGEEIDLTPPWKRITMHEAVQLETGIDFSQFTDLETAKQAATKAGIGVPEDCPSLGHLLNHAFEQKVEGTLMQPTFIIDFPVEISPLAKPHRSKPGLVERFELFVYGRELANSFSELTDPIDQRSRLEAQAAKKAAGDLEAHSVDEDFLTALEYGMPPTGGLGIGIDRLVMLLTDSPSIRDVIAFPLLKNQEAGSDG

SEQ ID NO: 30415 - DNA, 1509 bp, Thermotoga maritima
  CDS (1)..(1509): transl_table=11
gtgctgaaagagttcaaagaacaacgactcaaagagatacaggaacttcgttctatgggtatagagccatatccttacaaattcgaaaaggaactcacggccagagaaataagggaaaagtacgactatcttcaagctggagaagttcttgaatctgaaaagctctctttcgcagggagagtcatgtcgatacgtcaccacggaaagacggccttctttcacatgaaagatgacacgggccggatccaggcttacataaaagcagattctgttgggaaggaaaagatggatctcttcaaaagacacgtcaaaataggtgactttgtaggagtaagaggctttccgttcaaaagcaaaaccggagagttgaccatttacgttcaagaatacacgcttctgagcaaggctctgcggcctctgcccgagaagtggcacggcataaaagataaggaaatcatatacaggcagaggtacctcgaactcatcgtgaacgacgaggctattgagaggttcaaaaagcgattcaaggccgtccgtgtgatacgggaatttctcaacagcaggggattcatcgaagtggaaacacctattcttcattacgtcacgggtggtgcggaagcgaggccttttgtgacccatctcaacgtttttgatatcgatatgtatttgagaatcgcaccggagctttacctgaaaaggttgatcgtcggcggttttgaaaagatatacgagataggaaagaacttcagaaacgaaggaatatcttacaaacacagtcccgagttcaccagcatagagatctaccaggcttacgcggattacaacgatatgatggatctcactgaagagttgatagtggaagttgtgaaaagaacatgtggcaccttgaaaatctcctaccaaggcaaggagatagacttcacaccaccctggaaaagagtgagaatgagagactttctcaaagaaaaactcggggtggacatcctcgaagatcccgatgaagtgttgttgaagaagctcgaagaacatggggtagaactggaaataaagaacagagcacacctcatagacaaactcagagatctggtggaagaagagctggtgaaccccaccttcataatcgatcatcctgtggtgatttcccctcttgccaaaagacaccgagaggatcctagactcacggaaaggttcgaactcatcatattcggaagagagatcgcgaacgcgttcagtgagctgaacgatcccgttgatcaataccagagatttctcgaacaggcgaaaatgagagaagagggagatgaagaagcacacatgatggatctcgattttgtgagggccctcgagtatggtatgcctcccacgggaggactgggaatcggtcttgacaggctcttcatgttcatcacggattcccccacaataagggatgtgattcccttcccaattgtgaaacccaaaaagttcgaggaagaagaggcggaattcgaaggagggtttgaagaatga

SEQ ID NO: 30416 - protein, 502 aa, Thermotoga maritima
MLKEFKEQRLKEIQELRSMGIEPYPYKFEKELTAREIREKYDYLQAGEVLESEKLSFAGRVMSIRHHGKTAFFHMKDDTGRIQAYIKADSVGKEKMDLFKRHVKIGDFVGVRGFPFKSKTGELTIYVQEYTLLSKALRPLPEKWHGIKDKEIIYRQRYLELIVNDEAIERFKKRFKAVRVIREFLNSRGFIEVETPILHYVTGGAEARPFVTHLNVFDIDMYLRIAPELYLKRLIVGGFEKIYEIGKNFRNEGISYKHSPEFTSIEIYQAYADYNDMMDLTEELIVEVVKRTCGTLKISYQGKEIDFTPPWKRVRMRDFLKEKLGVDILEDPDEVLLKKLEEHGVELEIKNRAHLIDKLRDLVEEELVNPTFIIDHPVVISPLAKRHREDPRLTERFELIIFGREIANAFSELNDPVDQYQRFLEQAKMREEGDEEAHMMDLDFVRALEYGMPPTGGLGIGLDRLFMFITDSPTIRDVIPFPIVKPKKFEEEEAEFEGGFEE

SEQ ID NO: 30417 - DNA, 1479 bp, Thermus thermophilus
  CDS (1)..(1479): transl_table=11
atgaacgaccagacccgccagcgcctgctcaacctggaagccttggtggaggcggggtttgccccctacccttaccgcttccccaagacccacagcgccgaggccatcctcaaggccaagcggggcgccccccctgagtccgagtggccggaggaggaggtggccgtggccgggcgcctcgtggccttgaggcgcatgggcaaggtgaccttcgcccacctcctggacgagacggggaggatccagctctacttccagagggacctcacgcccaaatatgagctcctcaagaagctggacgtgggggacatcctgggggtgagggggcaccccttcaccaccaagacgggggaggtgacggtcaaggtcctggactggacgcccctggtcaagagcctccaccccctccccgacaagtggcacggcctccgggacaaggaggtccgctaccgccagcgctatctggacctcatcgtcaaccccgaggtgcgggaggtcttccgccgccgctcggagatcgtccgctacatccggcgcttttttgaggccaaggggtttttggaggtggagacccccatcctccagcccaccacgggcggggcggaggccaggcccttcaagacctaccacaacgccctagaccacgagttctacctccgcatctccttggagctctacctcaagcgcctcctcgtcggggggtacgagaaggtctttgagatcgggcgcaacttccgcaacgagggcattgaccacaaccacaatcccgagttcaccatgctggaggcctactgggcctacgccgactaccaggacatggcgggcctggtggaggagctcctttcgggcctcgtcctccaccttttcgggagccacgaggtcccctaccaggggcgggtgctgaacttcaagccgcccttcaggcgcatctccttcgtggaggccctgaaggagaaggcgggccttccctttgaccccctggacctggagcgcctcaggctctgggccgacgcccaccaccccgagctttcccaggtgccgaactataagcttctggacaagcttttcggcatctacgtggagcccgagctccaggatcccacctttgtctttgacttccccctggccatcagccccctggccaagcggcaccgggagaagccgggcctcgtggagcgctgggacctctacgccggggggatggagcttgccccctgttactccgagctcaacgaccctttggaccagagggagcgcttcctggagcaggcgaggcgccgcaaggagggggacgaggaggcccccgagcccgacgaggacttcctcctggccctggagtacgggatgcccccggcggcgggcctgggcctcgggatagaccgcctcgccatgctcctcaccgaccagccctctctaagggacgtcctcctcttccccctcctcaagcccaagaaggaggcggtggaagaaggggtctaa

SEQ ID NO: 30418 - protein, 492 aa, Thermus thermophilus
MNDQTRQRLLNLEALVEAGFAPYPYRFPKTHSAEAILKAKRGAPPESEWPEEEVAVAGRLVALRRMGKVTFAHLLDETGRIQLYFQRDLTPKYELLKKLDVGDILGVRGHPFTTKTGEVTVKVLDWTPLVKSLHPLPDKWHGLRDKEVRYRQRYLDLIVNPEVREVFRRRSEIVRYIRRFFEAKGFLEVETPILQPTTGGAEARPFKTYHNALDHEFYLRISLELYLKRLLVGGYEKVFEIGRNFRNEGIDHNHNPEFTMLEAYWAYADYQDMAGLVEELLSGLVLHLFGSHEVPYQGRVLNFKPPFRRISFVEALKEKAGLPFDPLDLERLRLWADAHHPELSQVPNYKLLDKLFGIYVEPELQDPTFVFDFPLAISPLAKRHREKPGLVERWDLYAGGMELAPCYSELNDPLDQRERFLEQARRRKEGDEEAPEPDEDFLLALEYGMPPAAGLGLGIDRLAMLLTDQPSLRDVLLFPLLKPKKEAVEEGV

SEQ ID NO: 30419 - DNA, 1500 bp, Thermoanaerobacter tengcongensis
  CDS (1)..(1500): transl_table=11
atgagtaattctaatgagaacattttgaatgaccttgagaatttgaatgaacttttaagggtgagaagagagaaactcaatatcttaaggagcatggggatagagccctatggcatagataggtttgaaagaactaatctttcctcagacattaaaaacgattacgaaaattttgaagggaaaactgtaactctagcaggaaggataatgaccaagaggagccacggaaaagcttcttttgcagatatacaggacagggacggaagaattcaaatttatgtgagatatgataatgtcggaggaaaaaactacgaaatctttaagctccttgacataggtgatattataggggttacaggagaagtctttaagacaaagaccggagaaattactataaacgtgaaagactttaagcttttatgcaagtcactgcaagttctccctgaaaagtggcatggtttaaaagacccggatttaaggtataggcaaagatacgtagacctaataataaatccaagcgtaagggaagtattcttaaaaaggaccaagataataaaagcaataagagaatttttagacaatagaggatttctggaagttgaaactccagttttgcacacaatcgcaggtggagcagcggcaaggccctttatcacccatcacaacgctttagacatagacatgtatttacgaattgcgctggagcttcacttgaagaggttaattgtcgggggatttgaaaaggtctatgaaataggcagagtctttagaaatgagggaatggatataaggcacaatccggagtttacactcctggaactttatgaagcttatacggattatcacggtatgatggaacttactgaacagctttttgcgtatgtggctgaaaaagtaaatggcagcacaaaaataatctatcagggcactgaaatagatttgacgccgccgtggaagagaatcaccatggtggatgctataaaagaatatgtggggattgactttgaaaaagttgctacagatgaagaagcgagaaaaatagcaaaggatttaaatctggagttgaaaaagcctgatatgaaaaaaggagaagtaatagcacttgtttttgacgaactggtagaaaagcaccttatacagcctacttttgtcatggactatccagtggaggtttctcctttggctaaaagaaagcgcgacaaccctgcttttacttccaggtttgaagctttcatttacggcagagaagttgcaaacgcattttcagagctaaatgacccgattgaccagaaagagagatttttggaacagttaaggcagagagaagcgggagatgaagaagctcacatgatggatgaggactttataaatgcccttgaggtaggtatgccacctacaggaggtttgggtataggtgtagacaggcttgtcatgtttatgacagattcttattctataagggatgtaatactcttccctacaatgaaacccaaagattaa

SEQ ID NO: 30420 - protein, 499 aa, Thermoanaerobacter tengcongensis
MSNSNENILNDLENLNELLRVRREKLNILRSMGIEPYGIDRFERTNLSSDIKNDYENFEGKTVTLAGRIMTKRSHGKASFADIQDRDGRIQIYVRYDNVGGKNYEIFKLLDIGDIIGVTGEVFKTKTGEITINVKDFKLLCKSLQVLPEKWHGLKDPDLRYRQRYVDLIINPSVREVFLKRTKIIKAIREFLDNRGFLEVETPVLHTIAGGAAARPFITHHNALDIDMYLRIALELHLKRLIVGGFEKVYEIGRVFRNEGMDIRHNPEFTLLELYEAYTDYHGMMELTEQLFAYVAEKVNGSTKIIYQGTEIDLTPPWKRITMVDAIKEYVGIDFEKVATDEEARKIAKDLNLELKKPDMKKGEVIALVFDELVEKHLIQPTFVMDYPVEVSPLAKRKRDNPAFTSRFEAFIYGREVANAFSELNDPIDQKERFLEQLRQREAGDEEAHMMDEDFINALEVGMPPTGGLGIGVDRLVMFMTDSYSIRDVILFPTMKPKD

SEQ ID NO: 30421 - DNA, 1518 bp, Vibrio parahaemolyticus
  CDS (1)..(1518): transl_table=11
atgactgatgctgttcaaaacgaaactgtacaagaagaaaacaagctgattgctgagcgccgcgctaaactggacgaaatccgaaagagctgcaaagcaaacggccacccaaacgacttccgtcgtgacgcactagcgggcgaccttcaaaaagagttcggtgaaaagactaaggaagagctagaagagcttaaccacgtagtagcgatcgctggtcgtattatggcaaaacgtggtccattcctagtaattcaagaaacatctggccgtatccaagcttacgcagacaaagaagttcaaaaagaactgaaagagaaataccaaggtcttgatatcggtgacatcatcggtgttaaaggtgcgctacacaaatctggtaaaggcgacctatacgtgaacatggaagagtacgagttgctaacaaaagcacttcgtccacttcctgagaagttccacggtctgactgaccaagaaatgcgttaccgtcagcgttacgtagacctaatcgttaacgaagattctcgtaatgcattcgttgtacgttctaaagttatgtctgcaattcgtaacttcatgatctctaaacagttcatggaagttgaaacgccaatgatgcacgtgatccctggtggtgcaagtgcacgtccatttatcacgcatcacaacgcgctagacatgccaatgtacctgcgtattgcgcctgagctatacctgaagcgtctagttgttggtggctttgatcgcgtattcgaaatcaaccgtaacttccgtaacgaaggtctttctccacgtcacaaccctgaattcacaatgatggaattctacatggcgtacgcggattacaaagatctaatggacttcactgaagaactactaagctctgtagcactagaagttctaggttcaacatcaatgccttacggtgaagatactgttgagtttggcggtaagtacgctcgcatgagcatgtttgaagcaatcaaacactacaacccagaccacgctcaaatccaagcgctaacggaagaagatctacaaaaccgcgaactaatggtttctatcgcgaaatctgttcacgttgaagtagaacctttctggacttgtggtcagcttcttgaagagatcttcggtgaaactgcagaacctaaactaatgcagcctacgttcatcactggctacccagcggatatttctccactggcacgtcgtagcgatgacaacccattcttcacagaccgctttgagttcttcatcggtggccgtgaagtagcaaacggcttctcagagcttaacgatgcagaagaccaagacgcgcgctttaaagcacaggttgaagcaaaagaatctggtgatgacgaagcgatgttctacgatgcagactacatcactgcactagaacacggtctaccaccaacagcaggtcaaggtatcggtatcgaccgcctagttatgctgctaactaacacgcacaccatccgtgacgtgatcttgttccctgcaatgcgcccacaagcgtaa

SEQ ID NO: 30422 - protein, 505 aa, Vibrio parahaemolyticus
MTDAVQNETVQEENKLIAERRAKLDEIRKSCKANGHPNDFRRDALAGDLQKEFGEKTKEELEELNHVVAIAGRIMAKRGPFLVIQETSGRIQAYADKEVQKELKEKYQGLDIGDIIGVKGALHKSGKGDLYVNMEEYELLTKALRPLPEKFHGLTDQEMRYRQRYVDLIVNEDSRNAFVVRSKVMSAIRNFMISKQFMEVETPMMHVIPGGASARPFITHHNALDMPMYLRIAPELYLKRLVVGGFDRVFEINRNFRNEGLSPRHNPEFTMMEFYMAYADYKDLMDFTEELLSSVALEVLGSTSMPYGEDTVEFGGKYARMSMFEAIKHYNPDHAQIQALTEEDLQNRELMVSIAKSVHVEVEPFWTCGQLLEEIFGETAEPKLMQPTFITGYPADISPLARRSDDNPFFTDRFEFFIGGREVANGFSELNDAEDQDARFKAQVEAKESGDDEAMFYDADYITALEHGLPPTAGQGIGIDRLVMLLTNTHTIRDVILFPAMRPQA

SEQ ID NO: 30423 - DNA, 1533 bp, Vibrio vulnificus
  CDS (1)..(1533): transl_table=11
atgactgatgctgttcaaaacgaaactgtacaagaagcctctgcacaagaagagaataagctcattgctgaacgccgcgcaaaattggatcaaatccgaaagagctgcaaagcaaatggccacccaaacgacttccgtcgtgacagcctagctggcgaccttcaaaaagagttcggtgaaaagagtaaggaagagctagaagcacttaaccacgttgttgctattgcgggtcgtgttatggcgaaacgtggtccattcttggtgatccaagaaacttctggtcgtatccaggcttacgcggacaaagatgtacaaaaagtattgaaagacaaataccaaggtcttgatatcggtgacatcatcggtgtgaaaggtgcgctgcacaaatctggcaaaggcgacctatacgtaaacatggaagagtacgagttgctaactaaagcacttcgtccactgccagagaagttccacggtctcactgaccaagaaatgcgttaccgtcagcgttatgttgacctcatcgtgaatgaagattctcgtaatgcgtttgtagtacgttcaaaagtgatgtcggcaatccgtaatttcatgatctctaaacagttcatggaagttgaaacgccaatgatgcacgtgatccctggcggtgcgagtgcgcgtccatttgttacgcaccacaatgcgctagatatgccaatgtacctacgtattgcgccagagctatacctgaagcgtctagttgttggtggttttgatcgcgtattcgaaatcaaccgtaacttccgtaacgaaggtctttctccacgtcacaaccctgaattcactatgatggaattctacatggcgtacgcggactacaaagatctgatggatctaactgaagagctactaagctcggtggctttagaagttctaggttcaacgtcaatgccttacggtgagcatactgttgagtttggtggcacatacactcgcatgagcatgtttgaagcaatcaagcactacaacccagaccacgcgcaaatccaagcgctaacggaagaagacattcaaaaccgtgacctaatggtttctatcgcgaaatcggttcacgtagaagtcgaacctttctggacatgtggtcagcttcttgaagagatctttggtgaaacagcagaacctaagctaatgcagccaacgttcatcactggctacccagcagatatctctccactggctcgtcgtagcgatgacaacccgttcttcacagaccgctttgagttcttcatcggtggccgtgaagtggcgaacggtttctctgagcttaacgatgcagaagaccaagacgcacgtttcaaagcacaggttgaagcgaaagagtcgggtgatgacgaagccatgttctacgatgcagactacatcacagcactagagcacggcctaccaccgactgctggtcaaggtatcggcatcgaccgtctagtgatgctactgaccaacacgcacacgattcgtgacgttattctattcccagcgatgcgtcctcaggcgtaa

SEQ ID NO: 30424 - protein, 510 aa, Vibrio vulnificus
MTDAVQNETVQEASAQEENKLIAERRAKLDQIRKSCKANGHPNDFRRDSLAGDLQKEFGEKSKEELEALNHVVAIAGRVMAKRGPFLVIQETSGRIQAYADKDVQKVLKDKYQGLDIGDIIGVKGALHKSGKGDLYVNMEEYELLTKALRPLPEKFHGLTDQEMRYRQRYVDLIVNEDSRNAFVVRSKVMSAIRNFMISKQFMEVETPMMHVIPGGASARPFVTHHNALDMPMYLRIAPELYLKRLVVGGFDRVFEINRNFRNEGLSPRHNPEFTMMEFYMAYADYKDLMDLTEELLSSVALEVLGSTSMPYGEHTVEFGGTYTRMSMFEAIKHYNPDHAQIQALTEEDIQNRDLMVSIAKSVHVEVEPFWTCGQLLEEIFGETAEPKLMQPTFITGYPADISPLARRSDDNPFFTDRFEFFIGGREVANGFSELNDAEDQDARFKAQVEAKESGDDEAMFYDADYITALEHGLPPTAGQGIGIDRLVMLLTNTHTIRDVILFPAMRPQA

SEQ ID NO: 30425 - DNA, 1482 bp, Wigglesworthia glossinidia brevipalpis
  CDS (1)..(1482): transl_table=11
atgaaaaacaaaaaagaaatttactatcgtaaaaaaaaattagaagaaatgaggaaaaatgaaaatatatttcctaataattttcgtcaaaatactactataaaaaatataaaaaaaaattataaaaaaaatgataaagaatattttaaaaacaataaaataataattagtattgctggaagaataatatctatcagagtaatgggaaaatcttctttcttagaaattagaaacatagaatctaaaatacaaatatatatttcagaaaataatatatcaaaaaataaatataaaaaaataataaaacaattagatataggagatataattggagttttaggtgttttatttaaaacaaacactgaagaactatctgtaaaatgcaaaaaactatatgtattaactaaatccgttaaacctttcccaaataaattccaaggattattaaatcaagaaatatgttatagaaaaagatatttggatttaattacaaataaaaaatcaagaaatacatttaaaactagatcaattattataaataatataagaaaatttatgataaaagaaaattttgtagaagtagaaactcctatgatgcataatataccaggaggaggtttatctaaaccatttattactcatcacagctctttaaatattgatttatatttaagaattgctcctgagttgtatttaaaacagttgattgttggaggattcgaaaaaatatttgaaattaatagaaattttagaaatgaaggattatcgtctaatcataatccagaatttactatgatggagttttatgttgcatatattgattatgaagatttaatgaaaatagtagaaaatttattaaattatattgttgataaaatttttaataaaaacaaaataaattataataattttatgataaattttgaaaaaccttttaaaaaaattagcatgcaggactctatttgcgaatattgtaaaaatgtaacacaatcagatatttctgacattaaaattatcactgatatagctaaatcttttaatattacggtcgaaaaaaattggggagtgggaaaattgcaagaaaaaattttttcagaaaaagtagaaaaaaatttaattcaaccaacttttgttatagattatccaacagagatttcaccactggctcgtgcaaaaaaaaataataaacttataacggatagatttgaattatttgtatgtggtaatgaaattggaaatggattttcagaattgaatgatccaaaagaacaaaaaaatagatttttagaacagttaaaaaataaaaccttagaagaacaaaacattttctatgacaaagattatataacatctttagagtatggattacctcctacagctggatgtggtattggaattgacagattagttatgatattaactaataattacagcattaaagacgtaatacttttcccaacattacgtaatgctaataaataa

SEQ ID NO: 30426 - protein, 493 aa, Wigglesworthia glossinidia brevipalpis
MKNKKEIYYRKKKLEEMRKNENIFPNNFRQNTTIKNIKKNYKKNDKEYFKNNKIIISIAGRIISIRVMGKSSFLEIRNIESKIQIYISENNISKNKYKKIIKQLDIGDIIGVLGVLFKTNTEELSVKCKKLYVLTKSVKPFPNKFQGLLNQEICYRKRYLDLITNKKSRNTFKTRSIIINNIRKFMIKENFVEVETPMMHNIPGGGLSKPFITHHSSLNIDLYLRIAPELYLKQLIVGGFEKIFEINRNFRNEGLSSNHNPEFTMMEFYVAYIDYEDLMKIVENLLNYIVDKIFNKNKINYNNFMINFEKPFKKISMQDSICEYCKNVTQSDISDIKIITDIAKSFNITVEKNWGVGKLQEKIFSEKVEKNLIQPTFVIDYPTEISPLARAKKNNKLITDRFELFVCGNEIGNGFSELNDPKEQKNRFLEQLKNKTLEEQNIFYDKDYITSLEYGLPPTAGCGIGIDRLVMILTNNYSIKDVILFPTLRNANK

SEQ ID NO: 30427 - DNA, 1524 bp, Wolinella succinogenes
  CDS (1)..(1524): transl_table=11
ttgtttttttctaatcagtatatcaagcagagaatccaaaaaggggaggagctaagggagcttggacgcaacccctatgataatcaactcatgcgcactctcacccatgcgcaatttttgcaaaagtttgaggcgcttaagagcttagagagtgaagagaagcgcgatgaaagcgccaaagagagcatcgcgggtcggattaaatttcttcgtcatatgggaaaggcggcctttgctaaaattgaggatgagagcggaatccttcagatttacttctcccaaaatgagcttggcgaagattttaagatgctcaaaaagctggccgaggtgggtgatattgtggcggtgagtggctttccttttgtcaccaaaacgggcgaattgagcctccatgcgttggagatgaagattctcaccaaagccatcgttcctctgcctgagaagtatcatgggctcgtggatgtagagcttcgctatcgtcagcgctatcttgacctcattatgaaccctgaggtcaaagagaccttcaagctccgcagtcaagtcgtctctagtgtgcgaagattctttgaggagaggggattcttggaggtggagactcccatgatgcaccccattcctggtggcgccaatgccaagcccttcatcacgcaccacaacgccctaggggttgataggtatctaagaatcgctccagagctctaccttaaacgccttgtcgtgggggggtttgaggcggtttttgagatcaatcgaaacttccgtaatgaggggatggatcactctcataaccctgaattcactatgattgaattctattgggcctacaaaacctatcacgagttgatgagcctcaccgaggagctttttggctacctctttgagcgcttgggcttgcccaagattcttccccatggtgaggagatgatcgacttctcccttccctttaggaggattccctacaagaaagcgcttcatgagatcggaggggtgcctttggaggtgatcgaggagaaggagaagcttcgagcctatttgatcgaaaaaggggtgaggctagagggcgagatgggaattggaaagcttcaggcggaggcgtttgatgcctttgttgaggagaagcttatcaaccccactttcatcactgaattccccatcgagatcagtccactagctagaagaagtgatgagaatccccaaattgctgatcgttttgagcttttcatcggcaaaaaagagatcagtaatggctttagcgagcttaatgatccccttgatcagcttgagcgtttcaaggcgcaggtggcggccaagaatgcgggtgatgaagaggctcaacatatggatgaagactatgtttgggctctaggacatggactgcctcccacggcgggagaggggatcgggatcgatcgccttgtgatgttgctcaccaataaccgctccattaaggatgtaatcctattccctgcgctcaaagttcaaaagagcgactacaccattttgaaggaagaagaagcatga

SEQ ID NO: 30428 - protein, 507 aa, Wolinella succinogenes
MFFSNQYIKQRIQKGEELRELGRNPYDNQLMRTLTHAQFLQKFEALKSLESEEKRDESAKESIAGRIKFLRHMGKAAFAKIEDESGILQIYFSQNELGEDFKMLKKLAEVGDIVAVSGFPFVTKTGELSLHALEMKILTKAIVPLPEKYHGLVDVELRYRQRYLDLIMNPEVKETFKLRSQVVSSVRRFFEERGFLEVETPMMHPIPGGANAKPFITHHNALGVDRYLRIAPELYLKRLVVGGFEAVFEINRNFRNEGMDHSHNPEFTMIEFYWAYKTYHELMSLTEELFGYLFERLGLPKILPHGEEMIDFSLPFRRIPYKKALHEIGGVPLEVIEEKEKLRAYLIEKGVRLEGEMGIGKLQAEAFDAFVEEKLINPTFITEFPIEISPLARRSDENPQIADRFELFIGKKEISNGFSELNDPLDQLERFKAQVAAKNAGDEEAQHMDEDYVWALGHGLPPTAGEGIGIDRLVMLLTNNRSIKDVILFPALKVQKSDYTILKEEEA

SEQ ID NO: 30429 - DNA, 1518 bp, Xanthomonas axonopodis pv
  CDS (1)..(1518): transl_table=11
atgaccgagcagacccccgcgccgcagccccccgccgacgagaacagcctcatcgccgagcgccgcgcgaaactgggcgcgttgcgcgggcagggcatcgcctacccgaacgacttcgtgcgcgaacacttcgccggcgatctgcaggcagaattcgccgacgccgacacctggaccccggaagcgctggaagccagcgggcgcacggtcaggatggccggccgcctgatggccaagcgggtgatgggcaaggccagctttgcgcagatccaggacgaatccgggcgtgtgcagctgttcctgcagggcaatgtgctcggcgatgcctataccgcgttcaagggctgggatgtgggcgacatcgtggcggtggagggagggctcacccgcaccaagaccggcgagctgtcggtcaaggccagcgcgctgcgcctgctgaccaagtcgctgcgcccgttgccggacaagtggcacggcctgtcggatgttgagcagcgttaccgccagcgttatgtcgacctgatcgtgacaccggaagcgcgcgaggtcttcatcaagcgatccaagatcatccgcgccatgcgcgcctggctggacgcgcgccgcttcctggaagtggaaacgccgatgatgcattacattcccggcggcgccacggccaagccattcactacccaccacaatgcgctggacctggacttgtacctccgcgtcgccccagagctgtatctcaagcgtctggtggtcggtggcctggagcgcgtctacgagatcaaccgcaatttccgcaacgaaggcgtgtcgacccggcacaaccccgagttcaccatgctcgagctctacgaggcttatgccacgtaccaccagatcatggacctgaccgagcaggtgatccgcgacaccgcgcagtcggtgttgggtaccacgcaggtgagctgggatggcgcggacatcgatttggcgccggctttccggcgctggcgcatggatgaggccgttcgtcaccataatccggagatcagcgctgccgactgcaccgaccgcgaggcgctgctgcgccattgcgagcggctcaagatccgcgtgaagccgtcttacggctggggcaagctgctgctggagattttcgaggcgaccgtggagcacaccctggtgcagccgaccttcatcaccgaccacccggtcgaagtgtcgccgctggcgcgttccagcgacaccgagccgggttacaccgaccgcttcgagctgttcatcaacggtaaggagctggccaacggcttttccgagctcaacgaccccgaagaccaggccgcacgtttccaggcgcaggtgcaggccaaggacggcggcgacgacgaagcgatgcatttcgatgccgattacatccgtgccttggagtacggcatggcgccgaccggcggcctgggcatcggtatcgatcgtctggtgatgctgctgaccggcagcacctcgatccgcgatgtcctgctattcccgtacatgcgtccggaagcctga

SEQ ID NO: 30430 - protein, 505 aa, Xanthomonas axonopodis pv
MTEQTPAPQPPADENSLIAERRAKLGALRGQGIAYPNDFVREHFAGDLQAEFADADTWTPEALEASGRTVRMAGRLMAKRVMGKASFAQIQDESGRVQLFLQGNVLGDAYTAFKGWDVGDIVAVEGGLTRTKTGELSVKASALRLLTKSLRPLPDKWHGLSDVEQRYRQRYVDLIVTPEAREVFIKRSKIIRAMRAWLDARRFLEVETPMMHYIPGGATAKPFTTHHNALDLDLYLRVAPELYLKRLVVGGLERVYEINRNFRNEGVSTRHNPEFTMLELYEAYATYHQIMDLTEQVIRDTAQSVLGTTQVSWDGADIDLAPAFRRWRMDEAVRHHNPEISAADCTDREALLRHCERLKIRVKPSYGWGKLLLEIFEATVEHTLVQPTFITDHPVEVSPLARSSDTEPGYTDRFELFINGKELANGFSELNDPEDQAARFQAQVQAKDGGDDEAMHFDADYIRALEYGMAPTGGLGIGIDRLVMLLTGSTSIRDVLLFPYMRPEA

SEQ ID NO: 30431 - DNA, 1518 bp, Xanthomonas campestris pv
  CDS (1)..(1518): transl_table=11
atgaccgaacagacccccacgccgcagctccccgccgacgagaacagcctcatcgccgagcggcgcgcgaaactgggcgcgttgcgcggccagggcatcgcctatccgaacgatttcgtgcgcacccactttgccggcgatctgcaggccgagttcgccgaggccgaaacctggactgccgaagcgctggaagcagccgaccgcagcgtcaagctggcgggccggttgatggccaagcgggtgatgggcaaggccagcttcgcgcagatccaggacgagtccgggcgcgtgcagttgttcctgcagggcaatgtgctgggcgatgcctacaccgccttcaagggctgggacgtgggcgacatcgtggcggtggagggcgggctgacccgcaccaagaccggcgagctgtcggtcaaggccactgcgctgcgtttgctgaccaagtcgctgcgtccgctgccggacaagtggcacggcctgtcggacgtggagcagcgctatcgccagcgctatgtggacctgatcgtcaccccggaagcgcgcgaggtcttcatcaagcgctccaagatcatccgcgccatccgcgcctggctggacgcgcgccgcttcctggaagttgaaacgccgatgatgcattacatccccggcggcgccactgccaagccgttcaccacccaccacaacgcactggatctggacctgtacctgcgcgtggccccggagctgtacctcaagcggctggtggtcggtgggctggagcgcgtctacgagatcaaccgcaatttccgcaacgaaggcgtgtcgacccggcacaaccccgagttcaccatgctcgagctctacgaggcctatgccacgtaccacgagatcatggacctgaccgagcaggtgatccgcgacaccgcccagggcgtgctcggcaccacccaggtcagctgggacggtgccgacattgatttggcgccggctttccgacgctggcgcatggatgaggcagtgcgccaccacaacccggagatcagcgcggccgattgcaccgaccgcgccgcgctgctgcgccattgcgagcggctcaagatcaaggtcaagccgtcctacggctggggcaagctgctgctggaaatcttcgagtccaccgtcgaacacacgctggtgcagccgactttcatcaccgaccacccggtcgaggtgtcgccgctggcacgcgccagcgacaccgagccggggtataccgaccgcttcgagctcttcatcaatggcaaggagctggccaacgggttctcggagctcaacgacccggaagaccaggcggcgcgtttccaggcccaggtgcaggcgaaggacggcggcgacgacgaagcgatgcattacgacgccgattacatccgtgccctggagtacggaatggcgccgaccggtgggctgggcatcggtatcgatcggctggtgatgctgctgaccggcagtacctccattcgcgacgtgctgctgttcccctacatgcgcccggaagcctga

SEQ ID NO: 30432 - protein, 505 aa, Xanthomonas campestris pv
MTEQTPTPQLPADENSLIAERRAKLGALRGQGIAYPNDFVRTHFAGDLQAEFAEAETWTAEALEAADRSVKLAGRLMAKRVMGKASFAQIQDESGRVQLFLQGNVLGDAYTAFKGWDVGDIVAVEGGLTRTKTGELSVKATALRLLTKSLRPLPDKWHGLSDVEQRYRQRYVDLIVTPEAREVFIKRSKIIRAIRAWLDARRFLEVETPMMHYIPGGATAKPFTTHHNALDLDLYLRVAPELYLKRLVVGGLERVYEINRNFRNEGVSTRHNPEFTMLELYEAYATYHEIMDLTEQVIRDTAQGVLGTTQVSWDGADIDLAPAFRRWRMDEAVRHHNPEISAADCTDRAALLRHCERLKIKVKPSYGWGKLLLEIFESTVEHTLVQPTFITDHPVEVSPLARASDTEPGYTDRFELFINGKELANGFSELNDPEDQAARFQAQVQAKDGGDDEAMHYDADYIRALEYGMAPTGGLGIGIDRLVMLLTGSTSIRDVLLFPYMRPEA

SEQ ID NO: 30433 - DNA, 1521 bp, Xylella fastidiosa
  CDS (1)..(1521): transl_table=11
atgactgagcatctccctacgtcgcaggtgtcctttgacgagaacgcgctgattgccgagcgccgtgcaaaacttttagcactacgtgcgcaaggcgtggcttatccgaatgatgtcaaacgcgagcattatgctgctgatgtgcaggtagcatttgccaacgtcgagacatggactgctgaggccctggaagcgtccggcgatcgcgtccgtatggctggtcgactgatggctaagcgtctcatgggcaaggccagctttgctcagattcaggacgagtctggccgcatccagctgttaatacagagtaacgtgcttggcgaggacagctatgccgcattcaaggtgttggatgttggcgacatcattgctgttgaaggaggattgacccgcaccagaacgggcgagctgtcggtcaaggtgaatgtcttgcgacttttgaccaaggcgttacgtccattgcctgacaagtggcacgggctaactgatgtggagcagcgctaccgccagcgctatgttgatcttattgtgactccagaatcgcgtgagattttcatcaaacgctccaagatcattcgtgcgctgcgtacttggctggatgcgcgtcttttcttggaagtagagacgccgatgatgcattacatcccaggaggtgctgcggctaagccgtttgtgacctaccacaatgccttggatttagagttatatctgcgcgtggccccagagttgtatctcaagcgtttggtcgtaggtgggctggaacgggtttacgagattaaccgcaacttccgtaacgagggggtgtcgacccggcacaaccccgaatttacgatgcttgagttatacgaggcctattccacctaccatgaggtcatggatctggctgagacgatgatccgtgatactgcacagtctgtgctgggcacgacccaggtgatttgggacggtgctcagattgatctgggtccgatattccggcgttggcgcatggatgaggcagtttgccatcataatcctgagatcagcgttgccgaatgtaccgatcgtgatgcattgctccttcactgtgagcgactcaagatcaaggttaaatcgtcctacggttggggtcgattgctgttgagtatttttgaggcgactgtcgagcatacgttgatccagccgaccttcattacggatcatccggttgaaatctctcctttagcgcgcgaaagcgacatcgaaccagggtataccgatcgcttcgaactgttcatcaatgggaaggaaatcgctaacggtttctcggaattgaacgatccggaggagcaggcgatgcgcttccagaagcaagttgaagccaaagaagggggggatgatgaggccatgtactacgatgccgactatattcgcgctttggagtatgggatggcgccaaccggagggttagggattggtgttgatcgactggtgatgctgctgaccggtagcacctcgatccgcgatgtgctgttattcccttatatgcgtccagaacgttaa

SEQ ID NO: 30434 - protein, 506 aa, Xylella fastidiosa
MTEHLPTSQVSFDENALIAERRAKLLALRAQGVAYPNDVKREHYAADVQVAFANVETWTAEALEASGDRVRMAGRLMAKRLMGKASFAQIQDESGRIQLLIQSNVLGEDSYAAFKVLDVGDIIAVEGGLTRTRTGELSVKVNVLRLLTKALRPLPDKWHGLTDVEQRYRQRYVDLIVTPESREIFIKRSKIIRALRTWLDARLFLEVETPMMHYIPGGAAAKPFVTYHNALDLELYLRVAPELYLKRLVVGGLERVYEINRNFRNEGVSTRHNPEFTMLELYEAYSTYHEVMDLAETMIRDTAQSVLGTTQVIWDGAQIDLGPIFRRWRMDEAVCHHNPEISVAECTDRDALLLHCERLKIKVKSSYGWGRLLLSIFEATVEHTLIQPTFITDHPVEISPLARESDIEPGYTDRFELFINGKEIANGFSELNDPEEQAMRFQKQVEAKEGGDDEAMYYDADYIRALEYGMAPTGGLGIGVDRLVMLLTGSTSIRDVLLFPYMRPER

SEQ ID NO: 30435 - DNA, 1521 bp, Xylella fastidiosa
  CDS (1)..(1521): transl_table=11
atgactgagcatctccctgcgtcgcaggtgtcctttgacgagaacgcgctgattgccgagcgccgtgcaaaacttttagcactacgtgcgcaaggcgtggcttatccgaatgatgtcaaacgcgagcattatgctgctgatgtgcaggcagcatttgccaacgtcgagacatggactgctgagaccctggaggcgtcaagccatcgtgtacgtatggctggccgattgatggctaagcgtctcatgggcaaggccagctttgctcagattcaggacgagtctggccgcatccagctgttaatacagagtaacgtgcttggtgaggacagctatgccgcattcaaggtgttggatgttggcgacatcattgctgttgaaggaggattgacccgcaccagaacgggcgagctgtcggtcaaggtgaatgttttgcgacttttgacgaaggcgttacgtccattgcctgacaagtggcacgggctgactgatgtggagcagcgctaccgccagcgctatgttgatcttattgtgactccagaatcgcgtgagatcttcatcaaacgctccaagatcattcgtgcgctgcgtacttggctggatgcgcgtcttttcttggaagtagagacgccgatgatgcattacatcccaggaggtgctgcggctaagccgtttgtgacctaccacaatgccttggatttagagttatatctgcgcgtggccccagagttgtatctcaagcgtttggtcgtgggtgggctggaacgggtttacgagattaaccgcaacttccgtaacgagggggtgtcgacccggcacaaccccgaatttacgatgcttgagttatacgaggcctattccacctaccatgaggtcatggatctggctgagacgatgatccgtgatactgcacagtctgtgctgggcacgacccaggtgatttgggacggtgctcagattgatctgggtccgatattccggcgttggcgcatggatgaggcagtttgccatcataatcctgagatgagcgttgccgagtgtaccgatcgtgatgcattgctccttcactgtgagagactcaagatcaaggttaaatcgtcctacggttggggtcgattgctcttgagtatttttgaggcgactgttgagcatacgttgatccagccgaccttcattacggatcatccggttgaaatctctcctttagcgcgcgaaagcgacatcgaatcagggtataccgatcgcttcgaactgttcatcaatgggaaggaaatcgccaacggtttctcggaattgaacgatccggaggagcaggcgatgcgcttccaaaagcaggttgaagccaaagaagggggggatgatgaggccatgtactacgatgccgactatattcgcgctttggagtatgggatggcgccaaccggagggttagggattggtgttgatcgactggtgatgctgctgaccggtagcacctcaatccgcgatgtgctgttattcccttatatgcgtccagaacgttaa

SEQ ID NO: 30436 - protein, 506 aa, Xylella fastidiosa
MTEHLPASQVSFDENALIAERRAKLLALRAQGVAYPNDVKREHYAADVQAAFANVETWTAETLEASSHRVRMAGRLMAKRLMGKASFAQIQDESGRIQLLIQSNVLGEDSYAAFKVLDVGDIIAVEGGLTRTRTGELSVKVNVLRLLTKALRPLPDKWHGLTDVEQRYRQRYVDLIVTPESREIFIKRSKIIRALRTWLDARLFLEVETPMMHYIPGGAAAKPFVTYHNALDLELYLRVAPELYLKRLVVGGLERVYEINRNFRNEGVSTRHNPEFTMLELYEAYSTYHEVMDLAETMIRDTAQSVLGTTQVIWDGAQIDLGPIFRRWRMDEAVCHHNPEMSVAECTDRDALLLHCERLKIKVKSSYGWGRLLLSIFEATVEHTLIQPTFITDHPVEISPLARESDIESGYTDRFELFINGKEIANGFSELNDPEEQAMRFQKQVEAKEGGDDEAMYYDADYIRALEYGMAPTGGLGIGVDRLVMLLTGSTSIRDVLLFPYMRPER

SEQ ID NO: 30437 - DNA, 1518 bp, Yersinia pestis
  CDS (1)..(1518): transl_table=11
atgtcagagcaaaaaccacaagtcgctgagcaagcgcaagaactcaatagtgagttacaagcccgtcgagaaaaactggctgtcttacggggaaagggaattgcattccctaatgatttccgccgtgagaacctttccgaccagttgcatgccgagtttgacagtaaagagaatgaagagttagaagcactgaatatcgacgtaaccgttgctggccgtatgatgacccgccgtatcatgggtaaagcatcatttgtgactctgcaagatgttggtggccgtatccagttgtacgtttcccgtgatgacctaccggaaggcgtttataacgaagaattcaaaaagtgggacctgggcgatatcctgggtgcgcgcggtaaactgtttaaaaccaaaaccggtgagctgtcgatccactgtagcgaactgcgtctgttgaccaaggctctgcgtccattgccagataaattccatggcttagctgaccaggaaacccgttaccgccagcgttatttggatctgattgctaacgacgagtctcgtcatactttcaaagtccgttcgcaagtgatgtccggtatccgtagcttcatggttgaaaaaggcttcatggaagtcgaaacgccaatgatgcaagtgatccctggcggcgcttccgcacgtccgtttgtcacgcatcacaatgcgttggatatcgatatgtatttgcgtatcgcgccagagctgtatctgaaacgtctggtcgtggggggcttcgaacgtgtgttcgaaatcaaccgtaacttccgcaacgaaggggtttcgccacgtcataacccagagttcaccatgatggaactctatatggcttatgcggactataaagacctgatcgtcttgacggaagagctattccgcactctgaccgaaaccatattggggagcagtgtggtgcaatatggcgaacagacttttgatttcggtaagccttttgccaaattgaccatgaaagaagctatttgtaaatatcgtcctgaaaccaatgtcgcggatttagacgatatggataaagccgtcgcaattgccgaatcattgggtatcaaggttgagaagagctggggcctgggtcgtattcaatgtgaaatctttgaagagaccgcagaaagtcatcttatccagccaacgttcatcacagaatatccagccgaggtttctccgctagcacgccgtaatgacgataatccatttatcactgaccgctttgaattcttcatcggtggccgtgaaattggtaatggcttctctgagttgaacgatgccgaagaccaggcgcagcgtttcgccgatcaggtaagtgctaaagaagctggcgatgatgaagcgatgttctacgatgaagactatatcactgcattggaacatggcttaccaccaaccgcagggctaggtattggtattgaccgtatggttatgttgtttaccaatagccataccatccgtgatgtcattttattcccagcgatgcgcccggtaaaataa

SEQ ID NO: 30438 - protein, 505 aa, Yersinia pestis
MSEQKPQVAEQAQELNSELQARREKLAVLRGKGIAFPNDFRRENLSDQLHAEFDSKENEELEALNIDVTVAGRMMTRRIMGKASFVTLQDVGGRIQLYVSRDDLPEGVYNEEFKKWDLGDILGARGKLFKTKTGELSIHCSELRLLTKALRPLPDKFHGLADQETRYRQRYLDLIANDESRHTFKVRSQVMSGIRSFMVEKGFMEVETPMMQVIPGGASARPFVTHHNALDIDMYLRIAPELYLKRLVVGGFERVFEINRNFRNEGVSPRHNPEFTMMELYMAYADYKDLIVLTEELFRTLTETILGSSVVQYGEQTFDFGKPFAKLTMKEAICKYRPETNVADLDDMDKAVAIAESLGIKVEKSWGLGRIQCEIFEETAESHLIQPTFITEYPAEVSPLARRNDDNPFITDRFEFFIGGREIGNGFSELNDAEDQAQRFADQVSAKEAGDDEAMFYDEDYITALEHGLPPTAGLGIGIDRMVMLFTNSHTIRDVILFPAMRPVK

SEQ ID NO: 30439 - DNA, 1761 bp, Oryza sativa
  CDS (1)..(1761)
atggaggcgctgcgggcgtggagggcttcctccaatctcctcggcttcgcggcctctcgcgccgccaaggccgccccagcggcgaggcccctccgcccccacgtccgctgctgctccccggccgccgcctccaccacgaagccgcccccgcccccacctcaggaccgccgccgccgaagcgcctcctcgtcctcgtcctccacctccgaccgcgaatccatccgcgccattcgcctcaaaaaggttgaggagctgagagggaagggctacgagccgtacgcgtacaagtgggacaggactcacactaccaaggagcttcaggatgggtacacccatctcgagaatggcgaggtctgcgcggacgtggcggtgtccattgctgggaggattgtcgcccgaagagcgtttggaaagcttgtttttatgaccgtaagagacgattccgggactattcagctttactgtgagaaagacagccttactgaggaacagtttgaacaactgaagacaattattgatattggtgatataataggtgcaaatggttccataaagaagacagaaaaaggggaactatctgtttacgtgaaaaactttgaaatccttacaaaatccttactcccactacctgataagtaccatggcttaactgatgtggacaagcggtatcgccaaaggtatgttgacatgattgcaaatcctgaggttgctgatgtattccgaacaagagcaaaggctgtatctgaaatccgcaagacaatggaatcatttggcttcatagaagttgaaacgccagttctacagggagcagcaggtggtgctgaagcaagaccatttataacccaccataactcactgcaaagagatctttacttgaggattgcaacagagctgcatttgaaaaggatgctggttggagggcttgagaaagtttatgagattgggagaatatttcggaatgaaggcatttccactcgccataatcctgaatttaccacaattgagatgtatgaagcctattcagactatgaaagcatgatgaatttggctgaagaaattgttactagatgtgcaatggctactcatggcaaacttagggttgattatcagggaactgaaatctcccttgaaagaccatggaggagggaaaccatgcattctcttgtcaaagaagcaactggaattgactttaatagctttggagaagatcttgaatccgccaaaaatgctgcaagagggatcaaaacagagagcaatgagaatatctcattgcaagcttgttcatctgttggacatgttctcaatgaggtctttgagactgttgttgaatcaagtctggtacagccaacatttgttcttgactacccagttgagatatcaccattggccaaaccacataggaggtatgctggtcttaccgagcgatttgaacttttcatatgtggtcgtgagattggtaatgcattttctgagctcacagacccaattgatcagaggggtcgttttgaaaatcaaattaagcagcacaatgctaagcgtgctgcaatgaccaaggaggtcaaatctactgagggtaaacacgaggaagatgatttttcgtatgaagttaccttagatgaagacttcctgacttccctagagtacggaatgccacctgcttccggaatgggccttggaatcgaccgactagtaatgcttttgaccaactcggcgagtataagggatgttattgcctttccagtcctaaagattcaacaatag

SEQ ID NO: 30440 - protein, 586 aa, Oryza sativa
MEALRAWRASSNLLGFAASRAAKAAPAARPLRPHVRCCSPAAASTTKPPPPPPQDRRRRSASSSSSSTSDRESIRAIRLKKVEELRGKGYEPYAYKWDRTHTTKELQDGYTHLENGEVCADVAVSIAGRIVARRAFGKLVFMTVRDDSGTIQLYCEKDSLTEEQFEQLKTIIDIGDIIGANGSIKKTEKGELSVYVKNFEILTKSLLPLPDKYHGLTDVDKRYRQRYVDMIANPEVADVFRTRAKAVSEIRKTMESFGFIEVETPVLQGAAGGAEARPFITHHNSLQRDLYLRIATELHLKRMLVGGLEKVYEIGRIFRNEGISTRHNPEFTTIEMYEAYSDYESMMNLAEEIVTRCAMATHGKLRVDYQGTEISLERPWRRETMHSLVKEATGIDFNSFGEDLESAKNAARGIKTESNENISLQACSSVGHVLNEVFETVVESSLVQPTFVLDYPVEISPLAKPHRRYAGLTERFELFICGREIGNAFSELTDPIDQRGRFENQIKQHNAKRAAMTKEVKSTEGKHEEDDFSYEVTLDEDFLTSLEYGMPPASGMGLGIDRLVMLLTNSASIRDVIAFPVLKIQQ

SEQ ID NO: 30441 - DNA, 1809 bp, Oryza sativa
  CDS (1)..(1809)
atggcggagtcgggctcgtcgggcctggaggagaagctggcgggtctctccgcgggctgcggcgaggagccgcagcagctctcgaagaatgccaagaagagggaggagaaaaggaagaagcaggaggaggagcgccggttgaaggaggaagagaagaagaagaaggccgctgcaacagcagctgctagtggagagcccccgaaggaatctgccgccgacgatgaggaaatggatcccactcaatattatgagaatcgcctcaaggcacttgattcactcaaggccacgggtgtaaacccctatccccataagttcctggctaatattaccgtagccgattatattgagaaatacaagagcatgaatgttggggataagcttgttgacgtcaccgagtgcctagcagggaggatcatgaccaagagagcgcaatcttccaagctcttattttatgatctttatggtggtggtgagaaagttcaagtttttgctgatgccaggacctcagagttggaagataatgaattcattaagtttcactctactctgaaacgaggtgatattgttggtgtatgtggttatccaggaaagagcaagagaggggagctcagtatattcccaaagaaaattgttgtgctctccccatgccttcatatgatgcctcgacagaagagtgagggaagtgctgttcccactccatgggctccaggaatgggtaggaacatcgaaaagtatgttttgagggaccaggaaacccgatatcgtcaacgatatcttgatctcatggtaaaccatgaagtgaggcatattttcaagacaagatcaaaagttgtctcttttattcggaaatttcttgatggtcttgactttttagaggtggagactccaatgatgaacatgattgcaggtggagcagctgcaaggccttttgtcacacatcataatgagttaaacatgaggctttatatgcgtattgctcctgagctctatctgaaggaattggttgttggggggctggatcgtgtttatgaaattgggaagcagttcaggaatgaaggaattgacctgacgcacaatcctgaattcacaacatgtgaattttatatggcatatgcagattacaatgacttgatagagcttactgaaaccatgttatctggtatggttaaggagttgacaggtggctacaagattaaatatcatgctaacggagttgagaaaccaccaatagagattgatttcacacctcccttcagaaagatagacatgattgaagaattagaggctatggctaaactcaatatacctaaagatctctcaagtgatgaagcaaacaagtatttgatagatgcctgtgccaaatatgatgtcaaatgcccacctccccagactacaacacggttgcttgataagctagttggccatttcttggaggagacatgtgtgaatcccacgtttattatcaaccatccagagataatgagtccattggcaaagtggcataggtctcgacctggattgactgagaggtttgagctctttgttaacaagcatgaggtgtgcaatgcatatacagagttaaatgatcctgttgttcagaggcaacggtttgaggaacaactaaaggatcgtcaatctggtgatgatgaagctatggcattggatgaaacattctgcacagcccttgagtatggcctaccaccgactggtggttggggattgggaattgatcgccttacaatgttgctgactgattctcagaatatcaaggaagttcttctattcccggctatgaagcctcaagattag

SEQ ID NO: 30442 - protein, 602 aa, Oryza sativa
MAESGSSGLEEKLAGLSAGCGEEPQQLSKNAKKREEKRKKQEEERRLKEEEKKKKAAATAAASGEPPKESAADDEEMDPTQYYENRLKALDSLKATGVNPYPHKFLANITVADYIEKYKSMNVGDKLVDVTECLAGRIMTKRAQSSKLLFYDLYGGGEKVQVFADARTSELEDNEFIKFHSTLKRGDIVGVCGYPGKSKRGELSIFPKKIVVLSPCLHMMPRQKSEGSAVPTPWAPGMGRNIEKYVLRDQETRYRQRYLDLMVNHEVRHIFKTRSKVVSFIRKFLDGLDFLEVETPMMNMIAGGAAARPFVTHHNELNMRLYMRIAPELYLKELVVGGLDRVYEIGKQFRNEGIDLTHNPEFTTCEFYMAYADYNDLIELTETMLSGMVKELTGGYKIKYHANGVEKPPIEIDFTPPFRKIDMIEELEAMAKLNIPKDLSSDEANKYLIDACAKYDVKCPPPQTTTRLLDKLVGHFLEETCVNPTFIINHPEIMSPLAKWHRSRPGLTERFELFVNKHEVCNAYTELNDPVVQRQRFEEQLKDRQSGDDEAMALDETFCTALEYGLPPTGGWGLGIDRLTMLLTDSQNIKEVLLFPAMKPQD

SEQ ID NO: 30443 - DNA, 1788 bp, Oryza sativa
  CDS (1)..(1788)
atggcggagtcgggctcgtcgggcctggaggagaagctggcgggtctctccgcgggctgcggcgaggagccgcagcagctctcgaagaatgccaagaagagggaggagaaaaggaagaagcaggaggaggagcgccggttgaaggaggaagagaagaagaagaaggccgctgcaacagcagctgctagtggagagcccccgaaggaatctgccgccgacgatgaggaaatggatcccactcaatattatgagaatcgcctcaaggcacttgattcactcaaggccacgggtgtaaacccctatccccataagttcctggctaatattaccgtagccgattatattgagaaatacaagagcatgaatgttggggataagcttgttgacgtcaccgagtgcctagcagggaggatcatgaccaagagagcgcaatcttccaagctcttattttatgatctttatggtggtggtgagaaagttcaagtttttgctgatgccaggacctcagagttggaagataatgaattcattaagtttcactctactctgaaacgaggtgatattgttggtgtatgtggttatccaggaaagagcaagagaggggagctcagtatattcccaaagaaaattgttgtgctctccccatgccttcatatgatgcctcgacagaagagtgagggaagtgctgttcccactccatgggctccaggaatgggtaggaacatcgaaaagtatgttttgagggaccaggaaacccgatatcgtcaacgatatcttgatctcatggtaaaccatgaagtgaggcatattttcaagacaagatcaaaagttgtctcttttattcggaaatttcttgatggtcttgactttttagaggtggagactccaatgatgaacatgattgcaggtggagcagctgcaaggccttttgtcacacatcataatgagttaaacatgaggctttatatgcgtattgctcctgagctctatctgaaggaattggttgttggggggctggatcgtgtttatgaaattgggaagcagttcaggaatgaaggaattgacctgacgcacaatcctgaattcacaacatgtgaattttatatggcatatgcagattacaatgacttgatagagcttactgaaaccatgttatctggtatggttaaggagttgacaggtggctacaagattaaatatcatgctaacggagttgagaaaccaccaatagagattgatttcacacctcccttcagaaagatagacatgattgaagaattagaggctatggctaaactcaatatacctaaagatctctcaagtgatgaagcaaacaagtatttgatagatgcctgtgccaaatatgatgtcaaatgcccacctccccagactacaacacggttgcttgataaggagacatgtgtgaatcccacgtttattatcaaccatccagagataatgagtccattggcaaagtggcataggtctcgacctggattgactgagaggtttgagctctttgttaacaagcatgaggtgtgcaatgcatatacagagttaaatgatcctgttgttcagaggcaacggtttgaggaacaactaaaggatcgtcaatctggtgatgatgaagctatggcattggatgaaacattctgcacagcccttgagtatggcctaccaccgactggtggttggggattgggaattgatcgccttacaatgttgctgactgattctcagaatatcaaggaagttcttctattcccggctatgaagcctcaagattag

SEQ ID NO: 30444 - protein, 595 aa, Oryza sativa
MAESGSSGLEEKLAGLSAGCGEEPQQLSKNAKKREEKRKKQEEERRLKEEEKKKKAAATAAASGEPPKESAADDEEMDPTQYYENRLKALDSLKATGVNPYPHKFLANITVADYIEKYKSMNVGDKLVDVTECLAGRIMTKRAQSSKLLFYDLYGGGEKVQVFADARTSELEDNEFIKFHSTLKRGDIVGVCGYPGKSKRGELSIFPKKIVVLSPCLHMMPRQKSEGSAVPTPWAPGMGRNIEKYVLRDQETRYRQRYLDLMVNHEVRHIFKTRSKVVSFIRKFLDGLDFLEVETPMMNMIAGGAAARPFVTHHNELNMRLYMRIAPELYLKELVVGGLDRVYEIGKQFRNEGIDLTHNPEFTTCEFYMAYADYNDLIELTETMLSGMVKELTGGYKIKYHANGVEKPPIEIDFTPPFRKIDMIEELEAMAKLNIPKDLSSDEANKYLIDACAKYDVKCPPPQTTTRLLDKETCVNPTFIINHPEIMSPLAKWHRSRPGLTERFELFVNKHEVCNAYTELNDPVVQRQRFEEQLKDRQSGDDEAMALDETFCTALEYGLPPTGGWGLGIDRLTMLLTDSQNIKEVLLFPAMKPQD

SEQ ID NO: 30445 - DNA, 1587 bp, Oryza sativa
  CDS (1)..(1587)
atgtgtttcttgctgcagcaatattatgagaatcgcctcaaggcacttgattcactcaaggccacgggtgtaaacccctatccccataagttcctggctaatattaccgtagccgattatattgagaaatacaagagcatgaatgttggggataagcttgttgacgtcaccgagtgcctagcagggaggatcatgaccaagagagcgcaatcttccaagctcttattttatgatctttatggtggtggtgagaaagttcaagtttttgctgatgccaggacctcagagttggaagataatgaattcattaagtttcactctactctgaaacgaggtgatattgttggtgtatgtggttatccaggaaagagcaagagaggggagctcagtatattcccaaagaaaattgttgtgctctccccatgccttcatatgatgcctcgacagaagagtgagggaagtgctgttcccactccatgggctccaggaatgggtaggaacatcgaaaagtatgttttgagggaccaggaaacccgatatcgtcaacgatatcttgatctcatggtaaaccatgaagtgaggcatattttcaagacaagatcaaaagttgtctcttttattcggaaatttcttgatggtcttgactttttagaggtggagactccaatgatgaacatgattgcaggtggagcagctgcaaggccttttgtcacacatcataatgagttaaacatgaggctttatatgcgtattgctcctgagctctatctgaaggaattggttgttggggggctggatcgtgtttatgaaattgggaagcagttcaggaatgaaggaattgacctgacgcacaatcctgaattcacaacatgtgaattttatatggcatatgcagattacaatgacttgatagagcttactgaaaccatgttatctggtatggttaaggagttgacaggtggctacaagattaaatatcatgctaacggagttgagaaaccaccaatagagattgatttcacacctcccttcagaaagatagacatgattgaagaattagaggctatggctaaactcaatatacctaaagatctctcaagtgatgaagcaaacaagtatttgatagatgcctgtgccaaatatgatgtcaaatgcccacctccccagactacaacacggttgcttgataagctagttggccatttcttggaggagacatgtgtgaatcccacgtttattatcaaccatccagagataatgagtccattggcaaagtggcataggtctcgacctggattgactgagaggtttgagctctttgttaacaagcatgaggtgtgcaatgcatatacagagttaaatgatcctgttgttcagaggcaacggtttgaggaacaactaaaggatcgtcaatctggtgatgatgaagctatggcattggatgaaacattctgcacagcccttgagtatggcctaccaccgactggtggttggggattgggaattgatcgccttacaatgttgctgactgattctcagaatatcaaggaagttcttctattcccggctatgaagcctcaagattag

SEQ ID NO: 30446 - protein, 528 aa, Oryza sativa
MCFLLQQYYENRLKALDSLKATGVNPYPHKFLANITVADYIEKYKSMNVGDKLVDVTECLAGRIMTKRAQSSKLLFYDLYGGGEKVQVFADARTSELEDNEFIKFHSTLKRGDIVGVCGYPGKSKRGELSIFPKKIVVLSPCLHMMPRQKSEGSAVPTPWAPGMGRNIEKYVLRDQETRYRQRYLDLMVNHEVRHIFKTRSKVVSFIRKFLDGLDFLEVETPMMNMIAGGAAARPFVTHHNELNMRLYMRIAPELYLKELVVGGLDRVYEIGKQFRNEGIDLTHNPEFTTCEFYMAYADYNDLIELTETMLSGMVKELTGGYKIKYHANGVEKPPIEIDFTPPFRKIDMIEELEAMAKLNIPKDLSSDEANKYLIDACAKYDVKCPPPQTTTRLLDKLVGHFLEETCVNPTFIINHPEIMSPLAKWHRSRPGLTERFELFVNKHEVCNAYTELNDPVVQRQRFEEQLKDRQSGDDEAMALDETFCTALEYGLPPTGGWGLGIDRLTMLLTDSQNIKEVLLFPAMKPQD

SEQ ID NO: 30447 - DNA, 1752 bp, Triticum aestivum
  CDS (1)..(1752)
atggaggcgctgcgggtatggagggcttcctccaatctcctcggcttcgcggcctcccgcgccgccgccgccgccgccgcctcggccggtagggcccaccgtttccacatccgctgctgctccccggccgctgccgccaccacgaagccgccccaggaccggcgccgccgcagcgcctcctcatcctccacctccgaccgcgactctatccgcgccattcgcttaaaaaaggtcgaggagctaagagggaagggttacgaaccgtacgcgtacaagtgggacaggactcacacgaccaaggagcttcaggagaggtacacccatctcgagaatggtgaagtctgcaccgaggcgtcggtttccattgctggtaggatcgttgcccgaagagcatttggaaagcttgttttcatgaccataagagacgactccggaactattcagctttactgtgagaaagacagccttacggaggagcagtttgagcaactgaaggcatttattgatgttggcgatatcttaggtgcaagtgggtccataaagaagacagaaaaaggggaactatctgtttatgtcagctttttcgaaatccttacaaaatccttactcccgctaccagataagtatcatggcttgacagatgtggacaagcggtatcgccaaaggtacattgacatgattgcaaatcctgaggttgctgatgtgtttcgaacaagagcaaaggttgtttctgaaatccgcaagacaatggaatcatttgggttcattgaagttgaaacgccagttctacagggagaagcaggtggcgctgaagcaagaccttttataactcaccataactccctccaaagggatctttacttgaggattgcaacggagctgcatttgaaaagaatgctggttggagggctcgagaaagtttatgagattgggagaatattccgaaatgaaggcatctctactcgtcataatcctgaatttaccaccattgaaatgtatgaagcatattcagactatgaaagcatgatgaatttggccgaagaaatcgtaactcgatgtgctatggctacgactggaaagcttaagattgattaccagggaactgaaatctctctggaaagaccatggagaagggaaaccatacatcgtcttgtcgaagaagcaacaggagtagacttcaatagctttggagatgttgaatctgctaagaatgctgcaaaagggctgctggggttcaaaacagagagcagtgagaatacttcattgcaagcttgttcatctgttggacatgttctcaacgaggtctttgagactgttgttgaatcaactcttgttcaaccaacatttgttcttgactacccagttgagatatcaccattagcgaaaccacatcggaggtatgctggtcttactgaacgatttgaactttttgtatgtggccgtgaaattggaaatgcattttctgagctcacagacccaattgatcagaggagtcgttttgaaaatcaaataaagcagcacaatgctaaacgtgctgcgatggataagaatgtgaaatcggacgagagtaagggggatgatgagtattcctatgaagtttccttggatgaagacttcttgacttctctggaatatggaatgccacctgcttccggaatgggccttggtatcgaccggttagtaatgcttttgacaaactctgccagcataagggacgttatcgcctttccagtcctgaagcttcagcaatag

SEQ ID NO: 30448 - protein, 583 aa, Triticum aestivum
MEALRVWRASSNLLGFAASRAAAAAAASAGRAHRFHIRCCSPAAAATTKPPQDRRRRSASSSSTSDRDSIRAIRLKKVEELRGKGYEPYAYKWDRTHTTKELQERYTHLENGEVCTEASVSIAGRIVARRAFGKLVFMTIRDDSGTIQLYCEKDSLTEEQFEQLKAFIDVGDILGASGSIKKTEKGELSVYVSFFEILTKSLLPLPDKYHGLTDVDKRYRQRYIDMIANPEVADVFRTRAKVVSEIRKTMESFGFIEVETPVLQGEAGGAEARPFITHHNSLQRDLYLRIATELHLKRMLVGGLEKVYEIGRIFRNEGISTRHNPEFTTIEMYEAYSDYESMMNLAEEIVTRCAMATTGKLKIDYQGTEISLERPWRRETIHRLVEEATGVDFNSFGDVESAKNAAKGLLGFKTESSENTSLQACSSVGHVLNEVFETVVESTLVQPTFVLDYPVEISPLAKPHRRYAGLTERFELFVCGREIGNAFSELTDPIDQRSRFENQIKQHNAKRAAMDKNVKSDESKGDDEYSYEVSLDEDFLTSLEYGMPPASGMGLGIDRLVMLLTNSASIRDVIAFPVLKLQQ

SEQ ID NO: 30449 - DNA, 1818 bp, Zea mays
  CDS (1)..(1818)
atggcatctggtctggaggagaaactcgcggggctctcaacgggcggcgacgggcaaaatcctccgccggcgggtgagggcggagaggagccgcagctctcgaagaatgcgaagaagagagaggagaagaggaagaagctggaagaggagcggaggctcaaggaggaagagaagaagaacaaggctgcggctgccagtggaaaacctcagaaggcatctgctgctgacgatgatgacatggatcccactcaatactatgagaataggctcaaggctcttgattcactgaaggccacaggtgtaaacccctatccccataagttcccggttggcatttctgtacccgaatacattgagaagtacaggaccttgagcgagggggagaagcttacagatgtggcagagtgtttagctgggaggatcatgaacaagagaacatcgtcgtcgaagctattcttttatgatctttatggtggtggcatgaaggttcaagtgatggctgatgccaggacctcagagttggatgaagctgaattttctaagtaccactcaggtgtgaagcgaggtgatattgttggcatatgtggatatccaggaaaaagcaaccgaggggagcttagtgtattcccaaagagatttgtcgtcctctctccatgtcttcatatgatgcctcgacagaagggtgaaggaagtgcagtgcctgtaccgtggactccaggaatgggtaggaacatcgaaaattatgttttgagggaccaggaaactcggtatcgtcaaaggtatcttgatcttatggtaaaccatgaagtgaggcacatcttcaagacacgatctaaaattgtctcatttatccgaaagtttcttgatgaccgtgaatttttggaggtggagactccgatgatgaacatgattgctggtggagcagctgcaaggccttttgttacacatcacaatgaattaaacatgcggctttttatgcgcattgctcctgaattatatctgaaggaactggttgttggtggattggaccgtgtttatgaaattggaaagcaattcaggaatgaaggaattgatttaacacacaatcctgaattcacaacttgtgaattttatatggcgtatgcagattataatgatttgatggagcttactgaaaccatgttgtcaggcatggttaaggacctgacaggtggctataagataaaatatcatgcaaatggagttactaaccccccaatagaaattgatttcacgcctcccttcagaaggatagatatgattaaagatttggaggctatggccaatctcagtataccaaaagatctatcaagtgatgaagcgaatcgttatttgatagaagcatgtgtgaagtatgatgtgaaatgtccacctccccaaacgacatcgcggttgcttgacaagttggttggccatttcttggaggagacatgtgtgaatccaacatttatcatcaatcatccagagataatgagtccattagcaaagtggcataggtcccgacctggattgactgagaggttcgagttgtttgttaacaaacatgaggtgtgcaacgcatacacagagttgaacgatcctgttgtgcagaggcaacggtttgaggaacaactaaaggaccgtcaatctggtgatgacgaagctatggctttggacgaaacattctgtactgcccttgagtatggtttggcaccaacaggtggttggggcttgggaattgatcgcctcacgatgttgctaacagattctcagaacattaaggaagtacttctattcccggctatgaagcctcaagagtag

SEQ ID NO: 30450 - protein, 605 aa, Zea mays
MASGLEEKLAGLSTGGDGQNPPPAGEGGEEPQLSKNAKKREEKRKKLEEERRLKEEEKKNKAAAASGKPQKASAADDDDMDPTQYYENRLKALDSLKATGVNPYPHKFPVGISVPEYIEKYRTLSEGEKLTDVAECLAGRIMNKRTSSSKLFFYDLYGGGMKVQVMADARTSELDEAEFSKYHSGVKRGDIVGICGYPGKSNRGELSVFPKRFVVLSPCLHMMPRQKGEGSAVPVPWTPGMGRNIENYVLRDQETRYRQRYLDLMVNHEVRHIFKTRSKIVSFIRKFLDDREFLEVETPMMNMIAGGAAARPFVTHHNELNMRLFMRIAPELYLKELVVGGLDRVYEIGKQFRNEGIDLTHNPEFTTCEFYMAYADYNDLMELTETMLSGMVKDLTGGYKIKYHANGVTNPPIEIDFTPPFRRIDMIKDLEAMANLSIPKDLSSDEANRYLIEACVKYDVKCPPPQTTSRLLDKLVGHFLEETCVNPTFIINHPEIMSPLAKWHRSRPGLTERFELFVNKHEVCNAYTELNDPVVQRQRFEEQLKDRQSGDDEAMALDETFCTALEYGLAPTGGWGLGIDRLTMLLTDSQNIKEVLLFPAMKPQE

SEQ ID NO: 30451 - DNA, 1752 bp, Zea mays
  CDS (1)..(1752)
atggaggcgctgcgggcgtggagggcctcctccaatctcatcggcttcgcggcctcccgcgccgccgcctccgcttcaaggccccttggcctccgtatccgctgctgctccgcggccgccgccaccacgaacccgccggcgcagcctcaggaccgccgacgccgtagtgcctcctcatccgcctccacctccgaccgcgactccatccgcgccatccgcctcaaaaaagttgaggagctcagagggaagggttatgagccgtacgcgtacaggtgggacaggactcacacgaccaaggcgcttcaggaacagtacactcatcttatgaacggtgaagtctgcgaggacgtgtcggtgtccgtggctggccggattgttgcccgaagagcatttggaaagcttgtttttatgactgtaagagatgatgcggggactgtgcagctttattgtgagaaagacagccttacggaggaccaatttgagcaactaaaggcgtttattgatattggtgatatattaggtgcaagtggatccattaaaaagacagagaaaggggagctatctgtttatgtgaaaaatttcgaaattctcacaaaatcattactcccactaccagataagtatcatggattaactgatgtggacaaacgttatcgtcaaaggtatgttgacatgattgcaaaccctaaggtcgctgatgtattccgaactagggcaaaggtggtttctgaaatccgcaagacaatggaatcatttggttttattgaagtcgaaactccagttctacagggagcagcaggtggtgctgaagctagaccttttataacctaccataactcacttcaaagagatctttacttgaggattgcaacagagctgcatttgaaaaggatgttggttggaggacttgagaaagtctatgagattgggagaatattccggaatgaaggcatttctactcgtcataatcctgaatttaccactattgaaatgtatgaagcatattcagactatgaaagcatgatgaatatggccgaagaaattgttactcgatgtgctatggctactcatggcaagcttaaggttgactatgagggaactgaaatctctctcgaaagaccatggaggagggagaccatgcattctcttgtcaaagaagcaactggaatcgactttaacagctttggacaagacgttgaatctgctaaaagagctgtgaggggactgccaggtttcgttgtagggaacagtgaaagtacttcactgaaagcctgttcatctgttggacatgttctcaatgaggtgtttgaaacatttgttgaatctactcttgtacaaccaacatttgtccttgactatccagttgagatatcaccattggcaaaaccacatcggagtcatgttggccttactgagcgattcgaacttttcatttgtggccgtgagattggcaatgcgttttctgagctcacagacccaattgatcagagaagccgttttgaaaatcaaataaaacagcacaatgctaagcgtgctgcaatggctaaggaggtcaaatctaccgagggtgaaggcgacgacgattactcgtatgaagtttctttagacgaggacttcttgacttcattggaatacggaatgccaccggcatcaggaatgggcctcggtatcgaccggttagtaatgcttttgacgaactcttctagcataagggacgttattgcctttcctgtcttgaagattcagcaatag

SEQ ID NO: 30452 - protein, 583 aa, Zea mays
MEALRAWRASSNLIGFAASRAAASASRPLGLRIRCCSAAAATTNPPAQPQDRRRRSASSSASTSDRDSIRAIRLKKVEELRGKGYEPYAYRWDRTHTTKALQEQYTHLMNGEVCEDVSVSVAGRIVARRAFGKLVFMTVRDDAGTVQLYCEKDSLTEDQFEQLKAFIDIGDILGASGSIKKTEKGELSVYVKNFEILTKSLLPLPDKYHGLTDVDKRYRQRYVDMIANPKVADVFRTRAKVVSEIRKTMESFGFIEVETPVLQGAAGGAEARPFITYHNSLQRDLYLRIATELHLKRMLVGGLEKVYEIGRIFRNEGISTRHNPEFTTIEMYEAYSDYESMMNMAEEIVTRCAMATHGKLKVDYEGTEISLERPWRRETMHSLVKEATGIDFNSFGQDVESAKRAVRGLPGFVVGNSESTSLKACSSVGHVLNEVFETFVESTLVQPTFVLDYPVEISPLAKPHRSHVGLTERFELFICGREIGNAFSELTDPIDQRSRFENQIKQHNAKRAAMAKEVKSTEGEGDDDYSYEVSLDEDFLTSLEYGMPPASGMGLGIDRLVMLLTNSSSIRDVIAFPVLKIQQ

SEQ ID NO: 30453 - DNA, 21 bp, Artificial sequence
  primer
atgagcgaacaaccgctgaac

SEQ ID NO: 30454 - DNA, 21 bp, Artificial sequence
  primer
tcagacttccggacgcatgtg

SEQ ID NO: 30455 - protein, 634 aa, Artificial sequence
  consensus sequence
  Variant (2)..(40): Xaa in position 2 to 40 is any amino acid
  Variant (41)..(66): Xaa in position 41 to 66 is any or no amino acid
  Variant (70)..(73): Xaa in position 70 to 73 is any amino acid
  Variant (75)..(76): Xaa in position 75 to 76 is any amino acid
  Variant (78)..(78): Xaa in position 78 is any amino acid
  Variant (79)..(81): Xaa in position 79 to 81 is any or no amino acid
  Variant (83)..(88): Xaa in position 83 to 88 is any amino acid
  Variant (89)..(94): Xaa in position 89 to 94 is any or no amino acid
  Variant (96)..(96): Xaa in position 96 is any amino acid
  Variant (97)..(102): Xaa in position 97 to 102 is any or no amino acid
  Variant (104)..(117): Xaa in position 104 to 117 is any amino acid
  Variant (118)..(135): Xaa in position 118 to 135 is any or no amino acid
  Variant (137)..(137): Xaa in position 137 is any amino acid
  Variant (140)..(144): Xaa in position 140 to 144 is any amino acid
  Variant (146)..(152): Xaa in position 146 to 152 is any amino acid
  Variant (153)..(161): Xaa in position 153 to 161 is any or no amino acid
  Variant (165)..(173): Xaa in position 165 to 173 is any amino acid
  Variant (174)..(176): Xaa in position 174 to 176 is any or no amino acid
  Variant (178)..(178): Xaa in position 178 is any amino acid
  Variant (180)..(180): Xaa in position 180 is any amino acid
  Variant (182)..(182): Xaa in position 182 is any amino acid
  Variant (183)..(183): Xaa in position 183 is any or no amino acid
  Variant (185)..(185): Xaa in position 185 is any amino acid
  Variant (186)..(216): Xaa in position 186 to 216 is any or no amino acid
  Variant (218)..(219): Xaa in position 218 to 219 is any amino acid
  Variant (220)..(221): Xaa in position 220 to 221 is any or no amino acid
  Variant (223)..(224): Xaa in position 223 to 224 is any amino acid
  Variant (225)..(226): Xaa in position 225 to 226 is any or no amino acid
  Variant (228)..(228): Xaa in position 228 is any amino acid
  Variant (230)..(230): Xaa in position 230 is any amino acid
  Variant (234)..(234): Xaa in position 234 is any amino acid
  Variant (237)..(237): Xaa in position 237 is any amino acid
  Variant (240)..(246): Xaa in position 240 to 246 is any amino acid
  Variant (247)..(248): Xaa in position 247 to 248 is any or no amino acid
  Variant (250)..(251): Xaa in position 250 to 251 is any amino acid
  Variant (253)..(259): Xaa in position 253 to 259 is any amino acid
  Variant (261)..(267): Xaa in position 261 to 267 is any amino acid
  Variant (269)..(269): Xaa in position 269 is any amino acid
  Variant (275)..(280): Xaa in position 275 to 280 is any amino acid
  Variant (284)..(284): Xaa in position 284 is any amino acid
  Variant (286)..(286): Xaa in position 286 is any amino acid
  Variant (289)..(289): Xaa in position 289 is any amino acid
  Variant (294)..(294): Xaa in position 294 is any amino acid
  Variant (296)..(299): Xaa in position 296 to 299 is any amino acid
  Variant (300)..(307): Xaa in position 300 to 307 is any or no amino acid
  Variant (311)..(311): Xaa in position 311 is any amino acid
  Variant (314)..(314): Xaa in position 314 is any amino acid
  Variant (319)..(319): Xaa in position 319 is any amino acid
  Variant (323)..(325): Xaa in position 323 to 325 is any amino acid
  Variant (326)..(326): Xaa in position 326 is any or no amino acid
  Variant (328)..(328): Xaa in position 328 is any amino acid
  Variant (330)..(331): Xaa in position 330 to 331 is any amino acid
  Variant (333)..(333): Xaa in position 333 is any amino acid
  Variant (339)..(342): Xaa in position 339 to 342 is any amino acid
  Variant (349)..(350): Xaa in position 349 to 350 is any amino acid
  Variant (352)..(352): Xaa in position 352 is any amino acid
  Variant (354)..(354): Xaa in position 354 is any amino acid
  Variant (357)..(357): Xaa in position 357 is any amino acid
  Variant (360)..(362): Xaa in position 360 to 362 is any amino acid
  Variant (364)..(365): Xaa in position 364 to 365 is any amino acid
  Variant (368)..(377): Xaa in position 368 to 377 is any amino acid
  Variant (378)..(378): Xaa in position 378 is any or no amino acid
  Variant (380)..(390): Xaa in position 380 to 390 is any amino acid
  Variant (391)..(412): Xaa in position 391 to 412 is any or no amino acid
  Variant (414)..(462): Xaa in position 414 to 462 is any amino acid
  Variant (463)..(490): Xaa in position 463 to 490 is any or no amino acid
  Variant (492)..(492): Xaa in position 492 is any amino acid
  Variant (493)..(496): Xaa in position 493 to 496 is any or no amino acid
  Variant (500)..(503): Xaa in position 500 to 503 is any amino acid
  Variant (505)..(507): Xaa in position 505 to 507 is any amino acid
  Variant (512)..(521): Xaa in position 512 to 521 is any amino acid
  Variant (522)..(527): Xaa in position 522 to 527 is any or no amino acid
  Variant (531)..(531): Xaa in position 531 is any amino acid
  Variant (533)..(536): Xaa in position 533 to 536 is any amino acid
  Variant (538)..(539): Xaa in position 538 to 539 is any amino acid
  Variant (541)..(543): Xaa in position 541 to 543 is any amino acid
  Variant (548)..(550): Xaa in position 548 to 550 is any amino acid
  Variant (552)..(553): Xaa in position 552 to 553 is any amino acid
  Variant (556)..(557): Xaa in position 556 to 557 is any amino acid
  Variant (559)..(563): Xaa in position 559 to 563 is any amino acid
  Variant (564)..(564): Xaa in position 564 is any or no amino acid
  Variant (566)..(570): Xaa in position 566 to 570 is any amino acid
  Variant (571)..(592): Xaa in position 571 to 592 is any or no amino acid
  Variant (594)..(597): Xaa in position 594 to 597 is any amino acid
  Variant (598)..(598): Xaa in position 598 is any or no amino acid
  Variant (602)..(602): Xaa in position 602 is any amino acid
  Variant (604)..(604): Xaa in position 604 is any amino acid
  Variant (608)..(608): Xaa in position 608 is any amino acid
  Variant (610)..(610): Xaa in position 610 is any amino acid
  Variant (612)..(612): Xaa in position 612 is any amino acid
  Variant (618)..(618): Xaa in position 618 is any amino acid
  Variant (620)..(621): Xaa in position 620 to 621 is any amino acid
  Variant (623)..(625): Xaa in position 623 to 625 is any amino acid
  Variant (626)..(626): Xaa in position 626 is any or no amino acid
  Variant (629)..(629): Xaa in position 629 is any amino acid
  Variant (631)..(632): Xaa in position 631 to 632 is any amino acid
RXXXXXXXXXXXXXXXXXXXXXXXXXXXXXXXXXXXXXXXXXXXXXXXXXXXXXXXXXXXXXXXXXAGRXXXXRXXGXXXXFXXXXXXXXXXXXGXXXXXXXQXXXXXXXXXXXXXXXXXXXXXXXXXXXXXXXXDXGDXXXXXGXXXXXXXXXXXXXXXXGELXXXXXXXXXXXXLXKXLXXLXXXXXXXXXXXXXXXXXXXXXXXXXXXXXXXXPXXXXGXXXXDXEXRYRXRYXDLXXXXXXXXXFXXRXXXXXXXRXXXXXXXFXEVETPXXXXXXGGAXAXPFXTHHNXLXXXXXXXXXXXXRIAXELXLKRLXVGGXXXXVXEXXRXFRNEGXXXXHNPEFTXXEXYXAYXDYXXXMXXTEXXXXXXXXXXXGXXXXXXXXXXXXXXXXXXXXXXXXXXXXXXXXXRXXXXXXXXXXXXXXXXXXXXXXXXXXXXXXXXXXXXXXXXXXXXXXXXXXXXXXXXXXXXXXXXXXXXXXXXXXXXXEXXXXXPTFXXXXPXXXSPLAXXXXXXXXXXXXXXXXRFEXFXXXXEXXNXXXELNDXXXQXXRFXXQXXXXXXGXXXXXXXXXXXXXXXXXXXXXXXXXXXDXXXXXALEXGXPPTXGXGXGIDRLXMXXTXXXXIRXVXXFP

SEQ ID NO: 30456 - protein, 30 aa, Artificial sequence
  protein pattern
  Variant (2)..(2): Xaa in position 2 is Phe or Tyr
  Variant (4)..(4): Xaa in position 4 is Phe, Ile, Leu, Met or Val
  Variant (5)..(5): Xaa in position 5 is Ala, Gly or Asn
  Variant (6)..(7): Xaa in position 6 to 7 is any amino acid
  Variant (13)..(13): Xaa in position 13 is any amino acid
  Variant (14)..(14): Xaa in position 14 is Asp or Ser
  Variant (15)..(16): Xaa in position 15 to 16 is any amino acid
  Variant (23)..(24): Xaa in position 23 to 24 is any amino acid
  Variant (26)..(26): Xaa in position 26 is any amino acid
  Variant (28)..(28): Xaa in position 28 is any amino acid
VXEXXXXFRNEGXXXXHNPEFTXXEXYXAY

SEQ ID NO: 30457 - protein, 27 aa, Artificial sequence
  protein pattern
  Variant (2)..(2): Xaa in position 2 is any amino acid
  Variant (4)..(4): Xaa in position 4 is any amino acid
  Variant (6)..(6): Xaa in position 6 is Gly or Thr
  Variant (8)..(8): Xaa in position 8 is any amino acid
  Variant (9)..(9): Xaa in position 9 is Leu or Met
  Variant (10)..(13): Xaa in position 10 to 13 is any amino acid
  Variant (14)..(14): Xaa in position 14 is Gly or Ser
  Variant (17)..(17): Xaa in position 17 is any amino acid
  Variant (19)..(19): Xaa in position 19 is any amino acid
  Variant (22)..(22): Xaa in position 22 is any amino acid
  Variant (24)..(24): Xaa in position 24 is any or no amino acid
  Variant (26)..(26): Xaa in position 26 is any or no amino acid
FXEXEXPXXXXXXXGAXAXPFXTXHXN

SEQ ID NO: 30458 - protein, 29 aa, Artificial sequence
  protein pattern
  Variant (2)..(2): Xaa in position 2 is any amino acid
  Variant (3)..(3): Xaa in position 3 is Asp, Glu, Asn, Ser or Thr
  Variant (4)..(4): Xaa in position 4 is Phe or Tyr
  Variant (5)..(6): Xaa in position 5 to 6 is any amino acid
  Variant (7)..(7): Xaa in position 7 is Ala or Ser
  Variant (8)..(8): Xaa in position 8 is Ile, Leu or Met
  Variant (10)..(10): Xaa in position 10 is any amino acid
  Variant (12)..(12): Xaa in position 12 is any amino acid
  Variant (15)..(15): Xaa in position 15 is any amino acid
  Variant (16)..(16): Xaa in position 16 is Ala, Gly, Ser or Thr
  Variant (18)..(18): Xaa in position 18 is any amino acid
  Variant (20)..(20): Xaa in position 20 is any amino acid
  Variant (22)..(22): Xaa in position 22 is Ile, Leu, Met or Val
  Variant (25)..(28): Xaa in position 25 to 28 is any or no amino acid
DXXXXXXXEXGXPPXXGXGXGXDRXXXXL

SEQ ID NO: 30459 - protein, 27 aa, Artificial sequence
  protein pattern
  Variant (2)..(2): Xaa in position 2 is Phe or Tyr
  Variant (4)..(9): Xaa in position 4 to 9 is any amino acid
  Variant (11)..(11): Xaa in position 11 is any amino acid
  Variant (12)..(12): Xaa in position 12 is Ala, Cys, Gly, Ser or Val
  Variant (14)..(14): Xaa in position 14 is any amino acid
  Variant (15)..(15): Xaa in position 15 is Phe or Tyr
  Variant (16)..(16): Xaa in position 16 is Ala, Asn, Ser or Thr
  Variant (21)..(23): Xaa in position 21 to 23 is any amino acid
  Variant (25)..(26): Xaa in position 25 to 26 is any or no amino acid
RXEXXXXXXEXXNXXXELNDXXXQXXR

SEQ ID NO: 30460 - protein, 15 aa, Artificial sequence
  protein pattern
  Variant (2)..(2): Xaa in position 2 is Ile or Val
  Variant (3)..(3): Xaa in position 3 is Ala or Ser
  Variant (4)..(4): Xaa in position 4 is any amino acid
  Variant (7)..(7): Xaa in position 7 is any amino acid
  Variant (10)..(10): Xaa in position 10 is any amino acid
  Variant (12)..(12): Xaa in position 12 is Ile, Leu, Met or Val
RXXXELXLKXLXVGG

SEQ ID NO: 30461 - protein, 16 aa, Artificial sequence
  protein pattern
  Variant (2)..(2): Xaa in position 2 is any amino acid
  Variant (3)..(3): Xaa in position 3 is Ala, Asp, Glu or Gln
  Variant (4)..(6): Xaa in position 4 to 6 is any amino acid
  Variant (8)..(8): Xaa in position 8 is any amino acid
  Variant (11)..(11): Xaa in position 11 is Ala, Ile, Leu or Val
  Variant (13)..(13): Xaa in position 13 is Phe, Ile, Leu or Met
  Variant (14)..(15): Xaa in position 14 to 15 is any amino acid
  Variant (16)..(16): Xaa in position 16 is Asp, Asn, Ser or Thr
DXXXXXRXRYXDXXXX

SEQ ID NO: 30462 - protein, 15 aa, Artificial sequence
  protein pattern
  Variant (2)..(2): Xaa in position 2 is Gly, Ser, Thr or Val
  Variant (4)..(4): Xaa in position 4 is Phe, Ile, Leu or Val
  Variant (5)..(7): Xaa in position 5 to 7 is any amino acid
  Variant (9)..(11): Xaa in position 9 to 11 is any amino acid
  Variant (15)..(15): Xaa in position 15 is Ala, Cys, Ser, Thr or Val
PXFXXXXPXXXSPLX

SEQ ID NO: 30463 - protein, 11 aa, Artificial sequence
  protein pattern
  Variant (2)..(2): Xaa in position 2 is Lys or Arg
  Variant (3)..(3): Xaa in position 3 is Asp or Glu
  Variant (5)..(5): Xaa in position 5 is Ile or Leu
  Variant (6)..(6): Xaa in position 6 is any amino acid
  Variant (9)..(9): Xaa in position 9 is any amino acid
  Variant (10)..(10): Xaa in position 10 is Leu or Met
  Variant (11)..(11): Xaa in position 11 is Lys or Arg
IXXVXXFPXXX

SEQ ID NO: 30464 - DNA, 1875 bp, Azotobacter vinelandii
  CDS (1)..(1875): transl_table=11
atggggctggacttcagggccagctcggcctggaactgcccggggtcgaacagatcgggatccacctgcggcatggcgtcacctcgatcagcgcgaagtgcgcgcgatggtgtcgtcgcggcgcagggtcaggatctcgtagccgccggcggtgaccagcagggtgtgctcccactgggcggagagcttgcggtccttggtgatggcggtccagccgtcgccgagcaggcgggtttccgcgcggccctggttgatcatcggctcgatggtgaaggtcatgccttccttgagttcgaggccggtgccggcacggccgtagtggagcacctggggctcttcgtggaacaccgcgccgatgccgtgtccgcagtattcgcggaccaccgagaagccgctcttctcggcgtgcttctggatcgtctcgccgatatcgccgaggtgggcgcccgggcgcaccagctcgatgcccttgtagaggcattcctgggtcacctggcacaggcgcctcgcccattccgggggattgccgaccaggaacatcatgctggtgtcgccgtgatagccgtccttgatcacggtgatgtcgaggttgacgatgtcgccgtccttcagcggtttgtcgttgggaatgccgtggcagaccacatggttgacggaggtgcagatcgacttgggatagcccttgtagttgagcggggcgggaatggcgtgctgcacgtcgacgatatagtcgtggcagatgcggtccagctcctcggtggtgacgcccggcctgacgtgttcgccgatcatttccagcacctcggcggccaggcggccggctacgcgcattttttcgatttcctcgggcgtcttgatggtgacggtcatgcgggctctctctcggcgcctggggcgcgggacatacgttcggaatggggcgatgataaaccaaatcgcctgcgcgccgcgcggggcatcgcccgccgcccggtagcctgcggtcggcttttgtgctataaaacgcgccgctcggcggacctgcggttcgcgagcatcgaccccacacacgcatcggcacggtatcctgggtgcccgcaagggttggatatcgggatgcgtggaggcctaacccgattcgaacgaggaattgaaatgtcccaagtcaccatgcgcgacatgctgaaagccggttgccacttcggtcaccagacccgttactggaacccgaagatgggcaggtacatcttcggcgcgcgcaacaagatccacatcatcaacctggaaaagaccctgccgatgttcaacgaagccctgagcttcgtcgagaaactggcggcgggcaagaacaagatcctgttcgtcggcaccaagcgctccgccggcaggctggtccgtgaagaggcggcccgttgcagcatgccctacgtcgatcatcgctggttgggcggcatgctgaccaactacaagaccattcgtgcctccatcaagcgcctgcgcgagctggaaacccagtcccaggacggtaccttcgccaagctgaccaagaaagaggcgctgatgcgcacccgcgatctggagaagctggagcgcagcctgggcggcatcaaggacatgggcggcctgcccgacgcgatgttcgtgatcgacgtcgatcacgagcgcatcgccatctccgaagccaacaagctgggcattccggtcatcggtgtggtcgataccaacagcagccccgagggcgtcgactacatcatcccgggtaacgacgacgccatccgcgccgtgcagctgtacctgggctcggtggccgatgccgtgctgcgcggccgccagaacgccggcaccggcgacgagttcatcgaggaagtcgccgcttccgaggccgcggaaggctga

SEQ ID NO: 30465 - protein, 624 aa, Azotobacter vinelandii
MGLDFRASSAWNCPGSNRSGSTCGMASPRSARSARDGVVAAQGQDLVAAGGDQQGVLPLGGELAVLGDGGPAVAEQAGFRAALVDHRLDGEGHAFLEFEAGAGTAVVEHLGLFVEHRADAVSAVFADHREAALLGVLLDRLADIAEVGARAHQLDALVEAFLGHLAQAPRPFRGIADQEHHAGVAVIAVLDHGDVEVDDVAVLQRFVVGNAVADHMVDGGADRLGIALVVERGGNGVLHVDDIVVADAVQLLGGDARPDVFADHFQHLGGQAAGYAHFFDFLGRLDGDGHAGSLSAPGARDIRSEWGDDKPNRLRAARGIARRPVACGRLLCYKTRRSADLRFASIDPTHASARYPGCPQGLDIGMRGGLTRFERGIEMSQVTMRDMLKAGCHFGHQTRYWNPKMGRYIFGARNKIHIINLEKTLPMFNEALSFVEKLAAGKNKILFVGTKRSAGRLVREEAARCSMPYVDHRWLGGMLTNYKTIRASIKRLRELETQSQDGTFAKLTKKEALMRTRDLEKLERSLGGIKDMGGLPDAMFVIDVDHERIAISEANKLGIPVIGVVDTNSSPEGVDYIIPGNDDAIRAVQLYLGSVADAVLRGRQNAGTGDEFIEEVAASEAAEG

SEQ ID NO: 30466 - DNA, 711 bp, Klebsiella pneumoniae subsp. pneumoniae MGH 78578
  CDS (1)..(711): transl_table=11
atgcgcgacatgctcaaggctggtgttcacttcggtcaccagacccgttactggaacccgaaaatgaagcctttcatcttcggcgcgcgtaacaaagttcacatcatcaaccttgagaaaaccgtaccgatgttcaacgaagctctggctgaactgaacaagatcgctgctcgtaaaggtaaaatccttttcgttggtactaagcgcgctgcaagcgaagcggtaaaagacgctgctctgagctgcgatcagttcttcgtgaaccatcgctggctgggcggtatgctgactaactggaaaaccgttcgtcagtccatcaaacgtctgaaagacctggaaactcagtcccaggacggtactttcgacaagctgaccaagaaagaagcgctgatgcgcactcgtgagctggacaagctggaaaacagcctgggcggtatcaaagatatgggcggcctgccggacgcactgttcgttatcgacgctgaccacgagcacatcgctatcaaagaagcaaacaacctgggcatcccggtatttgctatcgttgataccaactctgatccggacggcgtagacttcgttatcccgggtaacgacgatgcaatccgcgcagtaagcctgtacctgggcgctgttgctgctaccgttcgtgaaggtcgctctcaggacctggcttctcaggcggaagaaagcttcgtagaagctgaataa

SEQ ID NO: 30467 - protein, 236 aa, Klebsiella pneumoniae subsp. pneumoniae MGH 78578
MRDMLKAGVHFGHQTRYWNPKMKPFIFGARNKVHIINLEKTVPMFNEALAELNKIAARKGKILFVGTKRAASEAVKDAALSCDQFFVNHRWLGGMLTNWKTVRQSIKRLKDLETQSQDGTFDKLTKKEALMRTRELDKLENSLGGIKDMGGLPDALFVIDADHEHIAIKEANNLGIPVFAIVDTNSDPDGVDFVIPGNDDAIRAVSLYLGAVAATVREGRSQDLASQAEESFVEAE

SEQ ID NO: 30468 - DNA, 759 bp, Pasteurella multocida subsp. multocida str. Pm70
  CDS (1)..(759): transl_table=11
gtggaggctaaaccccaattaaaaggaaatattattatggcacaagtttcaatgcgcgatatgctacaagctggcgttcacttcggtcaccaaactcgttactggaatccaaaaatgaaaccattcatctatggtccacgcaacggtgttcacatcattaacttagaaaaaactgttcctatgttcaatgaagccttagtggaattaacacgtattgcgggtaacaacggtaaaattttattcgttgggacaaaacgtgcagctactgaagcagtgaaagcagcagcattagactgtcaacaatattatgtcaatcaccgttggttaggtggtatgttgactaactggaaaacagttcgtcaatcaattagacgtttaaaagatttagaaactcaatctcaagatggtacgttcgataaattaacgaaaaaagaagcgttaatgcgtacacgtgagatggagaaacttgaattaagtcttggtggtatcaaagagatgggtggcttaccagatgcgttattcgttatcggtgcagaccatgaacacatcgcagtgaaagaagcaaacaatcttggtattccagtgtttgctatcgttgatactaactcagatccagatggtgttgatttcgttatcccaggtaacgatgacgcagcacgtgcaatccaattatatctttcagcagcagccgcggcggttaaagaaggtcgtcaccaagacgctgtcactgaagagaactttgtagcagaagctgagtaa

SEQ ID NO: 30469 - protein, 252 aa, Pasteurella multocida subsp. multocida str. Pm70
MEAKPQLKGNIIMAQVSMRDMLQAGVHFGHQTRYWNPKMKPFIYGPRNGVHIINLEKTVPMFNEALVELTRIAGNNGKILFVGTKRAATEAVKAAALDCQQYYVNHRWLGGMLTNWKTVRQSIRRLKDLETQSQDGTFDKLTKKEALMRTREMEKLELSLGGIKEMGGLPDALFVIGADHEHIAVKEANNLGIPVFAIVDTNSDPDGVDFVIPGNDDAARAIQLYLSAAAAAVKEGRHQDAVTEENFVAEAE

SEQ ID NO: 30470 - DNA, 756 bp, Haemophilus influenzae Rd KW20
  CDS (1)..(756): transl_table=11
gtggaggctcaaccccaacaaaaggaaaatattatggcacaagtttcaatgcgcgatatgatcaacgcaggcgtacacttcggacaccaaactcgttactggaacccacaaatgaaacctttcatttttggtgctcgtaacggtgttcacatcatcaatcttgaaaaaactttacctttattcaacgaagctttagcggaattaactcgcattgctagcaacaacggtaaagtattattcgttggtacaaaacgtgcagcgtctgaagcagttcaagcagcagcattagattgtcagcaatattacgtaaaccaccgttggttaggtggtatgttgactaactggaaaaccgttcgtcaatcaattaaacgtttaaaagatttagaaacccaatctcaagacggtacttttgataaattaaccaaaaaagaagcgttaatgcgtagccgtgagatggaaaaacttgaattaagccttggcggtatcaaagatatgggcggcttaccagatgcgttattcgttatcggtgcggaccacgaacatatcgcagttaaagaagcaaacaacctaggtattcctgtatttgctatcgttgatactaactcaacaccagctggcgtagatttcgttatccctggtaacgatgatgcgactcgtgctatccaactttacgtttctgcagctgcagcagcggttaaagaaggtcgtggtaacgaagctcaagttgctgaagaattagcagctgacgcagaataa

SEQ ID NO: 30471 - protein, 251 aa, Haemophilus influenzae Rd KW20
MEAQPQQKENIMAQVSMRDMINAGVHFGHQTRYWNPQMKPFIFGARNGVHIINLEKTLPLFNEALAELTRIASNNGKVLFVGTKRAASEAVQAAALDCQQYYVNHRWLGGMLTNWKTVRQSIKRLKDLETQSQDGTFDKLTKKEALMRSREMEKLELSLGGIKDMGGLPDALFVIGADHEHIAVKEANNLGIPVFAIVDTNSTPAGVDFVIPGNDDATRAIQLYVSAAAAAVKEGRGNEAQVAEELAADAE

SEQ ID NO: 30472 - DNA, 801 bp, Brucella melitensis 16M
  CDS (1)..(801): transl_table=11
gtggaggttaaaccggaaaaggaaaataagatggcattgcctgatttcagcatgcgccagcttctggaagctggtgttcacttcggccaccagacccatcgctggaacccgaagatggctcccttcatctatggtgagcgcaacaatatccacattctcgatctgtcccagaccgttcctctgttgaacagcgcgctgaaggtcgtttcggacactgttgcccgcggcggtcgcgttctgtacgttggcacgaagcgtcaggcttcggacatcattgccgatgccggcaaccgttcggcccagtattatgtcaatgcccgctggctcggcggcatgatgaccaactggaagacgatctccaactcgatccagcgtctgcgcaagctcgacgaacttctggctggcgaagcccagggcttcaccaagaaggaacgcctgaaccttgagcgtgaacgtgaaaaactcgaccgcgcgctcggtggtatcaaggacatgggttcggttcccgacctgatgttcatcattgacaccaataaggaagcgatcgccattcaggaagccaagcgccttggcattccggttgtcgccgtgatcgactcgaactgcgatcccgaccagatcgactatccgatcccgggcaatgacgacgctgctcgcgccatcgcgctttattgcgacctgattgctcgcgccgctctcgacggcattgcccgccagcagggcgccatgggcatcgatgtcggtgcgcaggttgaggctccggtcgagcctgcccttcaggctccggccgaaggcgcctga

SEQ ID NO: 30473 - protein, 266 aa, Brucella melitensis 16M
MEVKPEKENKMALPDFSMRQLLEAGVHFGHQTHRWNPKMAPFIYGERNNIHILDLSQTVPLLNSALKVVSDTVARGGRVLYVGTKRQASDIIADAGNRSAQYYVNARWLGGMMTNWKTISNSIQRLRKLDELLAGEAQGFTKKERLNLEREREKLDRALGGIKDMGSVPDLMFIIDTNKEAIAIQEAKRLGIPVVAVIDSNCDPDQIDYPIPGNDDAARAIALYCDLIARAALDGIARQQGAMGIDVGAQVEAPVEPALQAPAEGA

SEQ ID NO: 30474 - DNA, 792 bp, Schizosaccharomyces pombe 972h-
  CDS (1)..(792)
atgctttcacggaaattatcaccggagcaacttgtagctcgtcgtttaaaaatacgtgactggaatcacaaaataggtgcagttgtagctccccattattcaccgacattatccattcgaaatccggcacctcctagtcaacttagtcttcctttattgttgtcttctggtgctcatttaggacactctacatccatatggaatccttacacgcagccctttatatatggtaaaagagaaggtattcacataatatcattggatcaaaccatggtttacctacgaagagctatatccgtcgttagatcaatagctaaagaaaatggaattatattgttcattggcaccagaaacggccagaaagattctgtcgttgctgctgccaaacgtgctagaggttatcacatatttgatcgttggctaccaggacttctcaccaatgccagagaagtacaaggaaagcttggcggttcaattttatgtaaagataatagagggaaattgattcaaactgataaaaaaccaagttatgtctttcctgatttgatggttatactaaacccattagaaaacaaaagtgcttgtctagaggcacagaaaactcatgttccaacaattggaatcattgatactgatgcggatccaaggatggttacctatcctattccagcaaatgatgattctttacggtgtacagatttaatagctggtttactgagtagggtagctgagcaagagtaccaaaaagctaaccaagccttcgaaaaagataaatttacacttcctttatga

SEQ ID NO: 30475 - protein, 263 aa, Schizosaccharomyces pombe 972h-
MLSRKLSPEQLVARRLKIRDWNHKIGAVVAPHYSPTLSIRNPAPPSQLSLPLLLSSGAHLGHSTSIWNPYTQPFIYGKREGIHIISLDQTMVYLRRAISVVRSIAKENGIILFIGTRNGQKDSVVAAAKRARGYHIFDRWLPGLLTNAREVQGKLGGSILCKDNRGKLIQTDKKPSYVFPDLMVILNPLENKSACLEAQKTHVPTIGIIDTDADPRMVTYPIPANDDSLRCTDLIAGLLSRVAEQEYQKANQAFEKDKFTLPL

SEQ ID NO: 30476 - DNA, 933 bp, Streptomyces coelicolor A3(2)
  CDS (1)..(933): transl_table=11
atggccgtcgtcacgatgcgggagctgctggaaagcggcgtccacttcggtcaccagacccgccgttggaacccgaagatgaagcgcttcatcttcacggagcgcaacggcatctacatcatcgacctgctccagtcgctgtcgtacatcgaccgcgcctacgagttcgtcaaggagaccgtcgcccacggcggcacggtcatgttcgtcggcacgaagaagcaggcgcaggaggccatcgccgagcaggccacccgcgtcggcatgccctacgtcaaccagcgctggctgggcggcatgctcaccaacttctcgaccgtctacaagcgcctgcagcgcctgaaggagctcgagcagatcgacttcgaggacgtggccgcctccggcctcaccaagaaggagctgctggtcctctcccgcgagaaggccaagctggagaagaccctcggcggtatccgcgagatgtccaaggtgcccagcgccgtctggatcgtggacaccaagaaggagcacatcgcggtcggcgaggcccggaagctcaacatcccggtcgtcgccatcctcgacaccaactgcgaccccgacgaggtcgactacaagatcccgggcaacgacgacgcgatccgctccgtcaccctgctcacccgcgtgatcgccgacgccgtcgccgagggcctcatcgcccgctccggtgccgccggtggcgccaagggcgacaaggccgccggtgagccgctcgccgcctgggagcgcgacctgctcgagggcgagaaggccgagaagaaggacgacgccgaggccgccgagaagcccgccgaggcccccgctgccgaggcccccgcggctgaggccgccgaggcccccgctgccgaggccgctcccgccgaggagcccgccgccgaagccccggccgcggacgccgagcaggcctga

SEQ ID NO: 30477 - protein, 310 aa, Streptomyces coelicolor A3(2)
MAVVTMRELLESGVHFGHQTRRWNPKMKRFIFTERNGIYIIDLLQSLSYIDRAYEFVKETVAHGGTVMFVGTKKQAQEAIAEQATRVGMPYVNQRWLGGMLTNFSTVYKRLQRLKELEQIDFEDVAASGLTKKELLVLSREKAKLEKTLGGIREMSKVPSAVWIVDTKKEHIAVGEARKLNIPVVAILDTNCDPDEVDYKIPGNDDAIRSVTLLTRVIADAVAEGLIARSGAAGGAKGDKAAGEPLAAWERDLLEGEKAEKKDDAEAAEKPAEAPAAEAPAAEAAEAPAAEAAPAEEPAAEAPAADAEQA

SEQ ID NO: 30478 - DNA, 891 bp, Bifidobacterium longum NCC2705
  CDS (1)..(891): transl_table=11
gtgcgcatggccaggcaagaaccgacaatgaaaggtagtaataccatggctcagatcactatgagcgatatgctgaaggctggcctgcacttcggccaccagacccgtcgttggaacccgaagatgaagcagttcatcctcacccagcgcaacggcatccacatcatcaacctgttcaagtcgctcgacatgatcgacaaggcgtacgacttcatcaagaccaccgtggcccacaacggcaccgtgctcttcgtcggcaccaagaagcaggctcaggaagctatcgccaaccaggccacccgcgtgaacatgccctacgtctccgagcgttggctcggcggcatgctgaccaacttccagaccgtctccaagcgcgtcaaccgcctcaaggaacttgaggaaatggacttcaccgacgtgcacggctccggcctgaccaagaaggagctcctcctgctcgagcgcgagaaggacaagctcaacaagcagctgggcggtatccgcaacatgaaccgcaccccgtccgcgatgttcgtcgtcgacatcaccaaggaagccctggctgttgaggaagctcacaagctgggtatcccggttgtcgccatcgtcgacaccaacgccgacccggacaccgttgagtacccgatcccggccaacgatgacgccatccgcggcatcgaactgctgaccagcctgatggctgacgccgtcgccgaaggtctgctggagcgctccggcgccaacaaggccgagggcgaagccgccgagcagccgatggccgcttgggagaaggaactcctgaccaacgaggctcctgccgaggcttccgctgaagccgccgctccggctgccgccgagggcgaaaccgccgaggcccccaaggccgagtga

SEQ ID NO: 30479 - protein, 296 aa, Bifidobacterium longum NCC2705
MRMARQEPTMKGSNTMAQITMSDMLKAGLHFGHQTRRWNPKMKQFILTQRNGIHIINLFKSLDMIDKAYDFIKTTVAHNGTVLFVGTKKQAQEAIANQATRVNMPYVSERWLGGMLTNFQTVSKRVNRLKELEEMDFTDVHGSGLTKKELLLLEREKDKLNKQLGGIRNMNRTPSAMFVVDITKEALAVEEAHKLGIPVVAIVDTNADPDTVEYPIPANDDAIRGIELLTSLMADAVAEGLLERSGANKAEGEAAEQPMAAWEKELLTNEAPAEASAEAAAPAAAEGETAEAPKAE

SEQ ID NO: 30480 - DNA, 714 bp, Vibrio vulnificus CMCP6
  CDS (1)..(714): transl_table=11
atgcgcgatatgctgaaagcgggtgtacacttcggtcaccaaactcgttactggaacccaaaaatgaagccattcatctttggcgctcgtaaccgcgttcacatcatcaacctagaaaaaactgtaccaatgttcaacgaagctctagctgagctagttaaagttggcgagaaaaaaggtaaagttcttttcgtaggtactaagcgcgctgcatctgaagctgttaaagaagctgcaatcgcaagcaaccagtactacgtaaacaaccgttggttgggtggtatgctgactaactacaaaactgttcgtcagtcaatcaaacgtctaaaagagcttgaagttcagtctactgacggtactttcgacaagcttactaagaaagaagctctaatgcgcactcgcgaaatggagaagctagagaagtctcttggtggtatcaaagatatgggtggtcttccagacgctctatttgtaatcgatgctgatcacgagcacattgctatcaaagaagcgaacaacctgggcattccagtattcgcagtagttgatacaaactctaacccagacggcgttgattacatcatcccaggtaacgatgacgctatccgtgctgttcaactatacctgaacgcagcggcttcttctctaactgaaggccgtaacaaagacgttgcagctgtagctgagaaagacggtttcgtagaagctgaataa

SEQ ID NO: 30481 - protein, 237 aa, Vibrio vulnificus CMCP6
MRDMLKAGVHFGHQTRYWNPKMKPFIFGARNRVHIINLEKTVPMFNEALAELVKVGEKKGKVLFVGTKRAASEAVKEAAIASNQYYVNNRWLGGMLTNYKTVRQSIKRLKELEVQSTDGTFDKLTKKEALMRTREMEKLEKSLGGIKDMGGLPDALFVIDADHEHIAIKEANNLGIPVFAVVDTNSNPDGVDYIIPGNDDAIRAVQLYLNAAASSLTEGRNKDVAAVAEKDGFVEAE

SEQ ID NO: 30482 - DNA, 996 bp, Bradyrhizobium japonicum USDA 110
  CDS (1)..(996): transl_table=11
atggcgctacccgacttcaccatgcgtcagcttttggaagctggcgtgcactttggtcaccagtctcaccgctggaatccgaaaatggctccgttcattttcggcacccgtaacaacatccacatcgtcgacctcgcccagaccgtgccgatgctgcaccacgccctccaggccgtcagcgacacggttgcgaagggcggccgcatcctgttcgtcggcaccaagcgccaggcacaggacggcgttgcggacgcggccaagcgctgcgcgcagtatttcgtcaactcgcgctggctcggcggcacgctgaccaactggaagacgatctcggcttcgatcaagcgcctgcgtcacctcgacgacgtgctcgcgggcggcgaagccaattcgtacacgaagaaggagcgcctgacgcttcagcgcgagcgcgacaagctcgaccgctcgctcggcggcatcaaggacatgggcggtctgcccgacctgatcttcgtgatcgacaccaacaaggaagacatcgcgatccaggaggcccagcgcctcaacatcccggtcgccgcgatcgtcgacaccaattcggacccgaagggcatcacctatgtggtgccgggcaatgacgacgccggccgcgcgatctcgctctattgcgacctgatcgcgcgtgcggcgatcgacggcatctcgcgcgcccagggcgattcgggcatcgacatcggtgcttcggcccgtccgctcgccgaagagctgccggcggcctcctcaagcggcttccagggccttgctggtccccgcggcaccgccgacgacctcaagaagctcccgggcgtgtcgggcgcgatcgagaagaagttcaacgacctcggcatcttccacttctggcagctcgccgagctcgatcacgacaccgcgcacacgatcggcgaagaagtcggtctgccgagccgtgcggatgcctgggtggccaaggccaaggcgctgaccgcggaagcggaatag

SEQ ID NO: 30483 - protein, 331 aa, Bradyrhizobium japonicum USDA 110
MALPDFTMRQLLEAGVHFGHQSHRWNPKMAPFIFGTRNNIHIVDLAQTVPMLHHALQAVSDTVAKGGRILFVGTKRQAQDGVADAAKRCAQYFVNSRWLGGTLTNWKTISASIKRLRHLDDVLAGGEANSYTKKERLTLQRERDKLDRSLGGIKDMGGLPDLIFVIDTNKEDIAIQEAQRLNIPVAAIVDTNSDPKGITYVVPGNDDAGRAISLYCDLIARAAIDGISRAQGDSGIDIGASARPLAEELPAASSSGFQGLAGPRGTADDLKKLPGVSGAIEKKFNDLGIFHFWQLAELDHDTAHTIGEEVGLPSRADAWVAKAKALTAEAE

SEQ ID NO: 30484 - DNA, 750 bp, Pinus koraiensis
  CDS (1)..(750): transl_table=11
atgatacattttatttcgctattttggggaggaaagcgaacgagaatgagcaaaagatattggaacattgatttggaagagatgatggaagcaagagttcatttagggcataaaactaggaaatggaaccctaagatggcaccttacatttttacagagcgtaaagatactcatattattaatctggctaaaactgctcgttctttatcagaagcttgtgatttggtgtttgatatagcaggtagaggaaaacaattcctgatagtcggtacgaaatatcaagcaactgatttagtagcatcagctgctacagaagctcgatgtcattatgtaaatagaaaatggcttggtggtatgttaactaattggtctactacagagacgagacttcagaagttcaaggatttaaaaaaagaacaagatacgggacgattcaatcaacttccaaaaaaagaagcagctatgctcaagagacaattagaccaattgcagaaatatctaggtgggattagatacatgaggagcttacccgatattgcgataattaccaatcaacgagaagaatccattgctcttggggaatgtagaactttgggtattccgacaatttgcttggttgatacagattgtgatccagatctcgtggatatcccaattccagccaatgatgatggtatagcttcaatccaattgatcctgaacagattaacgtcagcaatttgcgaaggaagggcattaaggtcattatag

SEQ ID NO: 30485 - protein, 249 aa, Pinus koraiensis
MIHFISLFWGGKRTRMSKRYWNIDLEEMMEARVHLGHKTRKWNPKMAPYIFTERKDTHIINLAKTARSLSEACDLVFDIAGRGKQFLIVGTKYQATDLVASAATEARCHYVNRKWLGGMLTNWSTTETRLQKFKDLKKEQDTGRFNQLPKKEAAMLKRQLDQLQKYLGGIRYMRSLPDIAIITNQREESIALGECRTLGIPTICLVDTDCDPDLVDIPIPANDDGIASIQLILNRLTSAICEGRALRSL

SEQ ID NO: 30486 - DNA, 711 bp, Calycanthus floridus var. glaucus
  CDS (1)..(711): transl_table=11
atgacaagaagatattggcacattaatttggaagagatgatggaagcaggagttcattttggtcatggtactaggaaatggaatcctagaatggcaccttacatctccgcaaagcgtaaaggtattcatattacaaatcttactagaactgctcgttttttgtcagaagcctgtgatttagtttttgatgcagcaagtataggaaaacacttcttaatagttggtaccaaaaagaaagcagcggattcagtagcatcagctgcaataagggctcggtgtcattatgttaataaaaaatggctcggtggtatgtcaacgaattggtccactacagaaacgagacttcataagttcagggacttgagagccgaacaaaaagcggggaaactcaaccgtttaccgaaaagagatgcggcaatgttgaagagacaattatctcacttgcaaacatatttgggcggaattaaatatatgacggggttacccgatattgtaatcatcatcgatcagcaagaagaatatacggctcttcgagaatgtctcactttggggattccgacaatttgtttaatcgatacaaattgtgacccggatctcgcggatatttcgattccagcgaacgatgatgctatagcttcaatccgattgattcttaacaaattagtatccgcgatttgtgagggccgttctagctatataagaaattgttga

SEQ ID NO: 30487 - protein, 236 aa, Calycanthus floridus var. glaucus
MTRRYWHINLEEMMEAGVHFGHGTRKWNPRMAPYISAKRKGIHITNLTRTARFLSEACDLVFDAASIGKHFLIVGTKKKAADSVASAAIRARCHYVNKKWLGGMSTNWSTTETRLHKFRDLRAEQKAGKLNRLPKRDAAMLKRQLSHLQTYLGGIKYMTGLPDIVIIIDQQEEYTALRECLTLGIPTICLIDTNCDPDLADISIPANDDAIASIRLILNKLVSAICEGRSSYIRNC

SEQ ID NO: 30488 - DNA, 711 bp, Amborella trichopoda
  CDS (1)..(711): transl_table=11
atggcaagaagatattgggacatcaatttggaagagatgatgggagcaggggttcattttggtcatggtactaggaaatggaatcctagaatggcaccttatatctctggaaagcgtaaaggcattcacattacaaatcttactagaacggctcgtcctttatcagaagcctgcgatttagtttttgatgcagcaagtagaggaaagcacttcttaatagtaggtacgaaagataaagcagccgattcagtagcatcagctgcaatacgggctcggtgtcattatgtcaataaaaaatggcttggtggtatgtcaacgaattggtccactacagaaacaagacttcataagttcagggacttgagagcagaacaaaagatgggtcgatttaagcgtctcccgaaaagagatgcggcaatgttgaagagacaattatctcacttgcaaacatatctgggcgggatcaaatatatgacggggttacccgatattgtaatcatcgtggatcaccaagaagaatatacggctattagagaatgcctcactttgggtattccgacgatttgtttaatcgatacaaattgtgatccggatctcgcagatattccgattccagccaacgatgacgctatagcttcaatccaattgattcttaacaaattagtattggcaattcgtgagggtcattatagctatctaggaagtcattga

SEQ ID NO: 30489 - protein, 236 aa, Amborella trichopoda
MARRYWDINLEEMMGAGVHFGHGTRKWNPRMAPYISGKRKGIHITNLTRTARPLSEACDLVFDAASRGKHFLIVGTKDKAADSVASAAIRARCHYVNKKWLGGMSTNWSTTETRLHKFRDLRAEQKMGRFKRLPKRDAAMLKRQLSHLQTYLGGIKYMTGLPDIVIIVDHQEEYTAIRECLTLGIPTICLIDTNCDPDLADIPIPANDDAIASIQLILNKLVLAIREGHYSYLGSH

SEQ ID NO: 30490 - DNA, 711 bp, Physcomitrella patens subsp. patens
  CDS (1)..(711): transl_table=11
atgaaacaaaaatcttggaatattaatctagaagaaatgatgcaagcaggagtccattttggtcatcaagctagaaaatggaatcctaaaatggcctcttatatttttacagaacgtaaaggtattcatattttaaatcttactcaaacagctcgttttttatcagaagcttgtgatttattagctaatgcatcaagtaaaggaaaacaagttttaattgtaggtactaaatatcaagccgctgatttagtagcatcagcttcaataaaagctcgatgtcattacataaatcaaaaatggctgggtggtatgctaactaattggtcaactatagaaaagcgtcttcaaagatttaaagatttggaaaataaagaaaaaacaggagtacttaatcaacttcctaaaaaagaagcagcaactttaaaaagacaattagttcaacttcgaaaatatttaggtggaattaaatatatgacaagtttaccagatattgtaatcataatagatcaacaaaaagaaattacagctattaatgaatgtataactttaggtattccaacaatttgcttagttgatacagattgtgatcctgatcttacagacataccaattccagcaaatgatgatgctagagcttctattcgttggattttaaataaattaaccttagctattagcgaaggtcgttataattctataaaaacagagtaa

SEQ ID NO: 30491 - protein, 236 aa, Physcomitrella patens subsp. patens
MKQKSWNINLEEMMQAGVHFGHQARKWNPKMASYIFTERKGIHILNLTQTARFLSEACDLLANASSKGKQVLIVGTKYQAADLVASASIKARCHYINQKWLGGMLTNWSTIEKRLQRFKDLENKEKTGVLNQLPKKEAATLKRQLVQLRKYLGGIKYMTSLPDIVIIIDQQKEITAINECITLGIPTICLVDTDCDPDLTDIPIPANDDARASIRWILNKLTLAISEGRYNSIKTE

SEQ ID NO: 30492 - DNA, 762 bp, Vibrio vulnificus YJ016
  CDS (1)..(762): transl_table=11
atgtggaggcctaaccccatagaggattttaaaatggcaactgtatcaatgcgcgatatgctgaaagcgggtgtacacttcggtcaccaaactcgttactggaacccaaaaatgaagccattcatctttggcgctcgtaaccgcgttcacatcatcaacctagaaaaaactgtaccaatgttcaacgaagctctagctgagctagttaaagttggcgagaaaaaaggtaaagttcttttcgtaggtactaagcgcgctgcatctgaagctgttaaagaagctgcaatcgcaagcaaccagtactacgtaaacaaccgttggttgggtggtatgctgactaactacaaaactgttcgtcagtcaatcaaacgtctaaaagagcttgaagttcagtctactgacggtactttcgacaagcttactaagaaagaagctctaatgcgcactcgcgaaatggagaagctagagaagtctcttggtggtatcaaagatatgggtggtcttccagacgctctatttgtaatcgatgctgatcacgagcacattgctatcaaagaagcgaacaacctgggcattccagtattcgcagtagttgatacaaactctaacccagacggcgttgattacatcatcccaggtaacgatgacgctatccgtgctgttcaactatacctgaacgcagcggcttcttctctaactgaaggccgtaacaaagacgttgcagctgtagctgagaaagacggtttcgtagaagctgaataa

SEQ ID NO: 30493 - protein, 253 aa, Vibrio vulnificus YJ016
MWRPNPIEDFKMATVSMRDMLKAGVHFGHQTRYWNPKMKPFIFGARNRVHIINLEKTVPMFNEALAELVKVGEKKGKVLFVGTKRAASEAVKEAAIASNQYYVNNRWLGGMLTNYKTVRQSIKRLKELEVQSTDGTFDKLTKKEALMRTREMEKLEKSLGGIKDMGGLPDALFVIDADHEHIAIKEANNLGIPVFAVVDTNSNPDGVDYIIPGNDDAIRAVQLYLNAAASSLTEGRNKDVAAVAEKDGFVEAE

SEQ ID NO: 30494 - DNA, 942 bp, Bdellovibrio bacteriovorus HD100
  CDS (1)..(942): transl_table=11
atggcacaagtgaccatgaaagaaatgctagacgctggagtccacttcggacatcaaacacagcgttggaacccaaagatgaaaccttatgtatacacagctcgcggcggtattcacattatcgacctgcaaaagactgttgtacgcgcaaacaaagctgctgagttcgtaaaagaaatcgctgctaacggtggtcgtttgatcttcgttggtactaaaaaacaagcgatcgaaccaatccaagaagctgcagcaaaatgcggtcagtactatgttactaagcgttggttgggtggcatgatgacgaacttcgaaacgatcaaatcttctatcgatcgtcttcgcaaaatcgacaccatgaaagaaaaaggtgaattcaactacctgactaagaaagagcgcgcgaagcttgaaaaagaataccttcgcctgactgatttccttgctggtatccgcgacatgaaggaaatgccttccgcaatgttcgtagttgatttgccaaaagagcacatcgcagttgctgaagcaaaacgcttgggcatcccggttgtagctatcgctgatacaaactctgacccagagtctgttgatttcgcgatcccaggcaatgacgatgctatccgctccatcaagttgttctccaacttggtagctgatgcttaccttgaaggcgctaaagagtgggaaggcaaacttcgcactatgactgacaagcaatctgacgttgctaaagaagcaaaagcagatggcaaggaagaagctcctaaaagacgtggtgctggcgcgaaagctggagctaaagaagctcctaagaaatccgctggtcctgcagttgttaaagccactaaatctcgcaaacttgttgctgctggtacagcagaagaagttgagatccaagctgagcttgaacaaggtcagtctactgacgaatccgcagagtaa

SEQ ID NO: 30495 - protein, 313 aa, Bdellovibrio bacteriovorus HD100
MAQVTMKEMLDAGVHFGHQTQRWNPKMKPYVYTARGGIHIIDLQKTVVRANKAAEFVKEIAANGGRLIFVGTKKQAIEPIQEAAAKCGQYYVTKRWLGGMMTNFETIKSSIDRLRKIDTMKEKGEFNYLTKKERAKLEKEYLRLTDFLAGIRDMKEMPSAMFVVDLPKEHIAVAEAKRLGIPVVAIADTNSDPESVDFAIPGNDDAIRSIKLFSNLVADAYLEGAKEWEGKLRTMTDKQSDVAKEAKADGKEEAPKRRGAGAKAGAKEAPKKSAGPAVVKATKSRKLVAAGTAEEVEIQAELEQGQSTDESAE

SEQ ID NO: 30496 - DNA, 810 bp, Yersinia pestis biovar Microtus str. 91001
  CDS (1)..(810): transl_table=11
ttgattgttatcaatcgcttatggggtcggtgttatgggacacgtggaggcataaccccaactgatactatagaggttttaatcatggcaactgtttccatgcgcgacatgctccaggctggtgttcactttggtcaccaaacccgttactggaacccgaaaatgaagcctttcatcttcggcgcacgtaacaaagttcacatcatcaacctggaaaaaactgtaccaatgttcaacgaagctctggctgagttgactaaaatttcttcccgtaaaggtaagatcctgtttgttggtactaaacgcgcagcaagcgaagcggtaaaagaagctgctaacaactgcgaccagttcttcgtgaaccatcgctggttgggcgggatgctgactaactggaaaactgttcgtcagtccatcaaacgtttgaaagatttggaaatccagtctcaagacggcacctttgataagctgaccaaaaaagaagcgctgatgcgtacccgtgaactgaacaagctggaaaacagcctgggtggtatcaaagacatgggcggcttaccagacgcactgtttgttgttgatgctgatcacgaacacatcgctatcaaagaagctaataacctgggtatcccggtattctctatcgttgatactaactccgatccagatggcgttgacttcatcatccctggtaacgatgacgcaatccgtgcagttaaactgtacctaggcgctgttgctaccgccgtccgtgaaggtcgttctcaagatctggccgttcaggcggaagaaagcttcgtagaagctgaataa

SEQ ID NO: 30497 - protein, 269 aa, Yersinia pestis biovar Microtus str. 91001
MIVINRLWGRCYGTRGGITPTDTIEVLIMATVSMRDMLQAGVHFGHQTRYWNPKMKPFIFGARNKVHIINLEKTVPMFNEALAELTKISSRKGKILFVGTKRAASEAVKEAANNCDQFFVNHRWLGGMLTNWKTVRQSIKRLKDLEIQSQDGTFDKLTKKEALMRTRELNKLENSLGGIKDMGGLPDALFVVDADHEHIAIKEANNLGIPVFSIVDTNSDPDGVDFIIPGNDDAIRAVKLYLGAVATAVREGRSQDLAVQAEESFVEAE

SEQ ID NO: 30498 - DNA, 1194 bp, Candida glabrata CBS 138
  CDS (1)..(1194)
atgagtttgagggctctaagagggtttttaataggtactcgtaaccttccacttagaggaattcggtaccaaagtaccagtacaggtacgtcgaataatgttgatgtcaatgagaacactgatgacctgtatttgatgaaacaacaggaactcaataatgttgtggtgcagcagttgaaggaattctctaagatgtctcaagctgagattgacaattacttgaacaactcaaaaggagccgaaccaaccgagaaggaacaacttctagagcaagaactaaggaacttgttccaaaagtattctcaggataatcaactgttgggagggcttgatacagccgaggaagggcattcgcgtgctgtcgaggaaatcctacaaacaaagaggtttccatttttagttccatcagcaagcgataaaccttacagtccacaagagttatacctacgtcaagcccaccacggtagccatgtggctaaactcggagctcgggtagaacaagttttctcaccaaacagagatatctatacaccaccaaccccagaaaaaatgtcaatagaaaaactaatggctgcgggtgtccatttaggtcagtcgacctcactttggagatcatccacccagccttttatctatggtgaatacaatgggattcatattattgatttgaatcaaacattagcatatttaaaaagagctgcacaagttgtcgaaggtgttgcggagaggggtggtgttatcttgtttctaggaactcgaaagggtcaaaaagttgcgctagaagaggccgctaagagaacgcatgggtattttgtttctacgagatggattccaggtacgcttacaaattcaacagaaatttcaggtggttgggagaagcacgaagttgatcttcaggacaagcccactggcagaccattacaaacagatgaaaagtcaaggattgttaagccagatctattggttgtgttaaatccaacagaaaataggaatgcacttaatgaagccatgaagtcgagagttccaaccattggtattgtagatactgactctgagccatctttcttgacttatcctattccaggtaatgatgattccttaagatctgtaaacctattactgggcgttctagccaaagctggtgaaagaggagtaaagaatcggatcagaaaggcgagtgagatgaagcaataa

SEQ ID NO: 30499 - protein, 397 aa, Candida glabrata CBS 138
MSLRALRGFLIGTRNLPLRGIRYQSTSTGTSNNVDVNENTDDLYLMKQQELNNVVVQQLKEFSKMSQAEIDNYLNNSKGAEPTEKEQLLEQELRNLFQKYSQDNQLLGGLDTAEEGHSRAVEEILQTKRFPFLVPSASDKPYSPQELYLRQAHHGSHVAKLGARVEQVFSPNRDIYTPPTPEKMSIEKLMAAGVHLGQSTSLWRSSTQPFIYGEYNGIHIIDLNQTLAYLKRAAQVVEGVAERGGVILFLGTRKGQKVALEEAAKRTHGYFVSTRWIPGTLTNSTEISGGWEKHEVDLQDKPTGRPLQTDEKSRIVKPDLLVVLNPTENRNALNEAMKSRVPTIGIVDTDSEPSFLTYPIPGNDDSLRSVNLLLGVLAKAGERGVKNRIRKASEMKQ

SEQ ID NO: 30500 - DNA, 1221 bp, Kluyveromyces lactis NRRL Y-1140
  CDS (1)..(1221)
atgtctgttagatactgcaccaaaaatttggtggggagggcgccatttgccttaagatcaggtgcagtgagactgcaaagttcttcatcaaaggctagttccagcgatgagtccaatgctataaaaggcgagaatggtgaagaattacaatctgtggatgtagcagcggctcgtcaatcggaatttaacgggagtatatctcagcttttacatcaggcaatgaacacaccaatagaagagttaggagatctggaaaccaagttgaagtcgccattgactgagaaagaacaacaattggatgagaaattgactgcatttttgaggaagtactcgaaatataacaaagttttagatctaccagaggataccaacaagttcgactttagttcaaaagttttgtcccaaccattacatactagagagttcccatatttgtcgcacaccagtaaagaaaagccttattcggaacaagaattatatgtacgtcaattaaaacatgccgctcatacatccaaattaggtgctaatatacaagacgtgtatttcccacacaaggacgttttcaacccgccatctttacagcaagtatccattgaaaagctaatggccgctggtgtacatttgggccaatccactgctctatggagagcttctacacaaccatatatttacggtgaatacaagggcattcatatcattgatttgaatcaaacactttcgcatttgaagagagctgcacaggtcgtagaaggtgttgctgaaaatggtggtttgattcttttccttgggaccagagagggtcaaaagagaactttaattaaggcagctgaaagagtaaacggttattatgtggcatctaagtgggtaccaggtactttgaccaatcctactgaaatttcaagtagttgggaaagacacgaagtggattatttcggtaacccaaccggtagagaattgactcttaacgaatctatgagcattattaaaccagatttattagttgttttgaaccctactgaaaatagaaacgctttgaaagaggcaatgaaggcaagagtcccaacaattggtattatcgataccgattctgaaccatcgttggtgacatatcctattccagctaatgatgattctctacgttctgtaagtttattaaccagcatcttagctaaggctggtgaaagaggtgtacaaactcgtttgaatcgtgcatcagtttag

SEQ ID NO: 30501 - protein, 406 aa, Kluyveromyces lactis NRRL Y-1140
MSVRYCTKNLVGRAPFALRSGAVRLQSSSSKASSSDESNAIKGENGEELQSVDVAAARQSEFNGSISQLLHQAMNTPIEELGDLETKLKSPLTEKEQQLDEKLTAFLRKYSKYNKVLDLPEDTNKFDFSSKVLSQPLHTREFPYLSHTSKEKPYSEQELYVRQLKHAAHTSKLGANIQDVYFPHKDVFNPPSLQQVSIEKLMAAGVHLGQSTALWRASTQPYIYGEYKGIHIIDLNQTLSHLKRAAQVVEGVAENGGLILFLGTREGQKRTLIKAAERVNGYYVASKWVPGTLTNPTEISSSWERHEVDYFGNPTGRELTLNESMSIIKPDLLVVLNPTENRNALKEAMKARVPTIGIIDTDSEPSLVTYPIPANDDSLRSVSLLTSILAKAGERGVQTRLNRASV

SEQ ID NO: 30502 - DNA, 1407 bp, Debaryomyces hansenii CBS767
  CDS (1)..(1407)
atgatgggcagttccaagtcgtgtgttacctttcaccgaagtatagtccgtggtgcattccttcgccgccaggcatactctactgcggctgtagaggaaagatcattggaacaaatgagtcaaagagaattacgtgaaaaagcggtagctgaagcacttgcaagagaagaagaggcggctgctaaggccaaggcattacgtgaattgaagaatcaaactagagatttacttagcactttgaataaaataccatctactttagtcaactccagattacagaaattacaaggcgagttagacggaatttcaaatcaagaaaaggtcaaacaattggatcaagagttggaagaattcatgtttgaaaagatgaacttgccacaatacgaaatccaaaatagaccatgggctgttggacctaaacagaccatttccagtggtgagcaaggaaaagatgacgatgcatctacccaaatcaagtctaccacatccaattcatataccagccaatttccaaacttaaaaccaacccctgattataaaccatattcaacacaagaattatatttaaggcagttggcgcattcccgtcaatctggtagtttaggttccgaattatccaacatttacaaaccaagagatgaagtcagaaagcctcgcagtatttcagagactactatttctacattaatggctgccgggtgtcatttaggtcatgccaaggctatgtggagaccttctacccagccatatatttatggtgaatacaacggtattcatttaatagacttgaatgaaactttatctgcgcttaatagagcaacccaagtcataaagggtgtcgctgctaagggtggtgtcattttatatgttggaaccaccaagaattgggaacaacatcgtgcattggaagaggctgctaagagaacccgtggttactacgtctctaagagatgggtccctggtactatcactaattttacggaagttactaaacaaataggaggtagtagtagaattgaggtcgacatgatggaccaacctactgatcgtaagttgggtgaggaaacctctggtaacctcatcaagccagatttaatagtcttattaaatcctgttgaaaacaggaattgtattaatgagtgtatcaagcagagaataccaactattggtttatgtgatactgatatggaaccatccttgttgacctacccaattccatgtaacgatgattcgatgagagcatcttccttaatgactggtattttatctaaatccgccgaagaaggtttaaacgaaagattaaacctttccaaggaatacaaaactgctcaatcgaagtttggtaacaaattagcacaaaaaactgcaagaattgttaattctagtacgcgttctgctactgcttaa

SEQ ID NO: 30503 - protein, 468 aa, Debaryomyces hansenii CBS767
MMGSSKSCVTFHRSIVRGAFLRRQAYSTAAVEERSLEQMSQRELREKAVAEALAREEEAAAKAKALRELKNQTRDLLSTLNKIPSTLVNSRLQKLQGELDGISNQEKVKQLDQELEEFMFEKMNLPQYEIQNRPWAVGPKQTISSGEQGKDDDASTQIKSTTSNSYTSQFPNLKPTPDYKPYSTQELYLRQLAHSRQSGSLGSELSNIYKPRDEVRKPRSISETTISTLMAAGCHLGHAKAMWRPSTQPYIYGEYNGIHLIDLNETLSALNRATQVIKGVAAKGGVILYVGTTKNWEQHRALEEAAKRTRGYYVSKRWVPGTITNFTEVTKQIGGSSRIEVDMMDQPTDRKLGEETSGNLIKPDLIVLLNPVENRNCINECIKQRIPTIGLCDTDMEPSLLTYPIPCNDDSMRASSLMTGILSKSAEEGLNERLNLSKEYKTAQSKFGNKLAQKTARIVNSSTRSATA

SEQ ID NO: 30504 - DNA, 1284 bp, Yarrowia lipolytica CLIB122
  CDS (1)..(1284)
atgctgagatctatccgacggtactcaaccaagtcgccgttcgccaaggtcggctccaagacccagtcctacgactacctgcgagcgttgcgggtcacccccgccgagacttttgccgatgtccctctgtctcccgagctggagcaggagctgtccaccaagttccaggagttccagaaggctctcaaggccggtgagaagctggagcaggtcaaggagattgcacgacaggcaagaggcaccaaaaacgccgctgccggcggggacccccaggccgatctgtcttccctgatgggccgaatcgacagtaagaacatccgagtgggtaatgaccagagtaagattgctgccattttcccgttgctcaagcgaaccgcccgagatgaggagtacaccaagcaggagctgtttctgcgacgacagcaccgacacgatatgctcagcaagttgggagccgaggtcaagggcgtctacgatcctctccatatcatcaagcatcccaagagtggcaccgaggccaccgtgaccagtcttctggctgccggcgctcatctgggccatgccgtcgagctcggtcacgtcaacaaccagcctttcatctacggcgttcgagacggcatttccatcattgatcttgagcagaccgtcacccagctgcgacgagctgctcgaatcaccgaggctgttgccaagcagaacggtctgattctgtttgtcggcacccgtgacggccagaagctggcgctcgaggccatgtcgcgacgatgcggcgcttcctacgtgcactccaagtggattcctggagccatcaccaacttttccaacattgccgccaactggaaacgatacgaggtggtggacggcgagtctggaaccagctttgccgacatcaaccagcacactggccgagagtttgacgcagagatctcgggccctaacatgcgacctgatctggttatcatcctcaaccccgacgagaaccccgctctgatccgagagtgtctcaagtcctgcatccccactgtcggagtggccgacaccaactttaacccttccaagctgtcgtaccccattgccgccaacgatgactctctccgaaccacggatctgatcactggagtgctggctcgagcagccgagaagggacacaagctgcgacggttcgaggagcagcagcgacgaaacgccgagcttctgcacatgaagaagaatcttgtgcaggctgccgatgaaaatgacgtgaccgaggaccctttctcctccggagaggcccacaaggagtaa

SEQ ID NO: 30505 - protein, 427 aa, Yarrowia lipolytica CLIB122
MLRSIRRYSTKSPFAKVGSKTQSYDYLRALRVTPAETFADVPLSPELEQELSTKFQEFQKALKAGEKLEQVKEIARQARGTKNAAAGGDPQADLSSLMGRIDSKNIRVGNDQSKIAAIFPLLKRTARDEEYTKQELFLRRQHRHDMLSKLGAEVKGVYDPLHIIKHPKSGTEATVTSLLAAGAHLGHAVELGHVNNQPFIYGVRDGISIIDLEQTVTQLRRAARITEAVAKQNGLILFVGTRDGQKLALEAMSRRCGASYVHSKWIPGAITNFSNIAANWKRYEVVDGESGTSFADINQHTGREFDAEISGPNMRPDLVIILNPDENPALIRECLKSCIPTVGVADTNFNPSKLSYPIAANDDSLRTTDLITGVLARAAEKGHKLRRFEEQQRRNAELLHMKKNLVQAADENDVTEDPFSSGEAHKE

SEQ ID NO: 30506 - DNA, 996 bp, Aspergillus nidulans FGSC A4
  CDS (1)..(996)
atgattgtaaggcagctctatgcgcggcagagccgccagctcctcgctctcaaccgccagggctacatccccagaagattctcgtctacaggaacagagacaccaacgccggttgagacaatagtccaccgttctatcccagagcccggcactcggcagagcagtgctgcattgacaaacaaccctgcggccaaggcactcgcgcaggaagctgaacaacgacataaattccagcaactcggaacgtcagttacgaatgtctataaaccagaaaaccttatccgccaccctccctttccctccgacatcaccctagaactcctcctcgccaaccaaacccacctcggccactccacctcccgctggaaccctcagaactcgcgctacatcttcggtattcgcgagggtattcacatcatctccctcgatatcacagcagcctaccttcgccgtgccgctaaggtcgtcgaggaagttgccgcgcgtggcggtctaatccttttcgccggcacacgaccaggccagaagcgcatcgtcgttcgtgcggcagaactctcgaagggttaccacattttcgagcgctggattcccggatctctcacaaacggcgaacagatcctcggtcactgcgagaagaaagttgtgaatgtgcttgatgaggagctgccggatctcaaggagtcacttgctgaccacgccattctcaaaccggacctcgtcatttgcctcaacccgctggagaacgagcctttgcttcacgagtgcgggctcaacaatgtccctaccattggaataatcgatacggatgcggaccccacgagggtgacttacccaattcccgccaatgatgacagtctgcgttccgttgctgtcatcgcaggtgtgctgggacgggctggtcaggctggtcagaagaggaggctggagcaggctaaaaaggatttagagaggaaagctctgcacggcgatgcagatattgtatggtcactgtattaa

SEQ ID NO: 30507 - protein, 331 aa, Aspergillus nidulans FGSC A4
MIVRQLYARQSRQLLALNRQGYIPRRFSSTGTETPTPVETIVHRSIPEPGTRQSSAALTNNPAAKALAQEAEQRHKFQQLGTSVTNVYKPENLIRHPPFPSDITLELLLANQTHLGHSTSRWNPQNSRYIFGIREGIHIISLDITAAYLRRAAKVVEEVAARGGLILFAGTRPGQKRIVVRAAELSKGYHIFERWIPGSLTNGEQILGHCEKKVVNVLDEELPDLKESLADHAILKPDLVICLNPLENEPLLHECGLNNVPTIGIIDTDADPTRVTYPIPANDDSLRSVAVIAGVLGRAGQAGQKRRLEQAKKDLERKALHGDADIVWSLY

SEQ ID NO: 30508 - DNA, 1383 bp, Candida albicans SC5314
  CDS (1)..(1383): transl_table=12
atgataagatcaaccacagctacaactacaacatcgagatattgtgctcgtatttttagaaatctcagtagaagttattctactgaaaattctcaacccaatccaaatgaacaaccacctttggaacatacattatctcataaagaattacgtgaacaagcaattgctgaagcattagctagagaagaagaagccattttaaaaacgaagaaattgagagaattaactcaagaaagtcaaaatttgatatcagcattaaataaaactccaacaactttaattaatgaaagattaaataaattacatgaagatttatcaaaattatctcaagataaaatcaaacaattagatgaagaattaaaagattatttaaatcaaaatatgattttacctgatcatttaaaagctaatcgtccatggcttagatcaagtgataataatgaggatatatccaaaaaattgaaaagttcaataaactctgcttcttcttcagattcaaatcatacatctactaccactacatcatctcgatacactgaacaattcccaaatttgaaacctactcctgattataaaccttattctgaacaagaattatatattagacaattgaatcataccagaataaatggaagaatagggtctcgtttaactcaagtttataaacctcaacgtgatatcaataatccaccaaaatttgataataccaccatagctaaattaatggctgctggatgtcatttaggccattcaacttcatctttccgtccaagcatgcaaccattcatatatggtatatatgataaagtccacattattgatttaaataaaactttagaaaaattgacattagcatgtaaagtgattgaaggagtcgttgaaaaaggtggtgttgttttatatgtcggtactcataaaaataattcatcgattcaagaagcattagttaaagctagtgaaagatctcatggttattatgtcaataagcgttggatcccgggtactataactaattacactgaagttacaaaacaatatggtcaaattaaaactaaaatggaagttgatatgaaagatcaaaaaattactaccaaaaattctaataaaattattaaaccggatttagtggtattattaaatccagtagaaaatagaaattgtattaaagaatgtatttctgctggtattccaaccattgggttatgtgatactgatatggaaccttctttattgacttatccaattccatgtaatgatgattcagttagatcagttaatttgatgttgggtattatgagtaaatcagctgaatctggtttacaaaaacgtatttctgctgttaaaaaattagaagaaaacgatgggaaagtagttaaagcttaa

SEQ ID NO: 30509 - protein, 460 aa, Candida albicans SC5314
MIRSTTATTTTSRYCARIFRNLSRSYSTENSQPNPNEQPPLEHTLSHKELREQAIAEALAREEEAILKTKKLRELTQESQNLISALNKTPTTLINERLNKLHEDLSKLSQDKIKQLDEELKDYLNQNMILPDHLKANRPWLRSSDNNEDISKKLKSSINSASSSDSNHTSTTTTSSRYTEQFPNLKPTPDYKPYSEQELYIRQLNHTRINGRIGSRLTQVYKPQRDINNPPKFDNTTIAKLMAAGCHLGHSTSSFRPSMQPFIYGIYDKVHIIDLNKTLEKLTLACKVIEGVVEKGGVVLYVGTHKNNSSIQEALVKASERSHGYYVNKRWIPGTITNYTEVTKQYGQIKTKMEVDMKDQKITTKNSNKIIKPDLVVLLNPVENRNCIKECISAGIPTIGLCDTDMEPSLLTYPIPCNDDSVRSVNLMLGIMSKSAESGLQKRISAVKKLEENDGKVVKA

SEQ ID NO: 30510 - DNA, 717 bp, Nuphar advena
  CDS (1)..(717): transl_table=11
atgacaagaagatattggaacatcagtttggaagagatgatggaagcgggggttcattttggtcatggtactaggaaatggaatcctagaatggcaccttacatctctgcaaagcgtaaaggtattcatattacaaatcttacgagaactgctcgttttttatcagaagcctgtgatttagtttttgacgcagcaagtagaggaaaacacttcttaatagttggtacgaaagataaagcagctgattcggtagcatcagctgcaataagggctcggtgtcattatgtcaataaaaaatggctcggtggtatgtcaacgaattggtccactacagaaacgagacttcataagttcagggacttgagagtgagagccgagatggggcaactcagtcgtctcccgaaacgggatgcagcaatattgaagagacaattatctcactttcaaacatatctgggtggtatcaaatatatgacggggttacccgatattgtaatcatcattgatcagcaagaagaatatacggcccttcgagaatgcgtcactttgggtattccaactatttgtttaatcgatacaaattgtgatccagatctcgcagatattccgattccagccaacgatgacgctatagcttccatccgattgattcttaacaaattagtatccgcaatttgtcagggacgttctagctatagctatataagaagtcgttga

SEQ ID NO: 30511 - protein, 238 aa, Nuphar advena
MTRRYWNISLEEMMEAGVHFGHGTRKWNPRMAPYISAKRKGIHITNLTRTARFLSEACDLVFDAASRGKHFLIVGTKDKAADSVASAAIRARCHYVNKKWLGGMSTNWSTTETRLHKFRDLRVRAEMGQLSRLPKRDAAILKRQLSHFQTYLGGIKYMTGLPDIVIIIDQQEEYTALRECVTLGIPTICLIDTNCDPDLADIPIPANDDAIASIRLILNKLVSAICQGRSSYSYIRSR

SEQ ID NO: 30512 - DNA, 687 bp, Chlorokybus atmophyticus
  CDS (1)..(687): transl_table=11
atgagaagtgtaactttagaagaaatgatggaagcaggggtccattttgggcatcaaacccgaggatggaatcctaagatggctccttatatttatggagaacggaatggtattcatttaattgacttaattcagacagctcgattactttctgaagcctctgattttgtattaaatgctgcaaaagaaggaaaagaatttttatttataggtactaaaaaccaagctgcggatattatttcatccgaagcacttcgttgccgttcacattttgtaaatcaaagatggcttgggggcatgttaactaattggcctactataaagactcgtataaaacgattaaaagatttagaacaaagcgaaaagaatggaactttagacaatcttcctaaaaaggaaagtgcagtattaaaaagacaattagataaattacgtaaatacttaggtggacttcaagatatgaagactcttccagatgtggtcataattgttgatcaaaaaagggaaatgaatgcggtgcgagagtgcatcaaattagggattcctattatagcactcttagataccaattgtgatccgagtttatcagatctacctattcctgctaatgatgatgctataagatctgttaatcttattataagcaagttggctgatgctatttatgaaggacaaggtattaaataa

SEQ ID NO: 30513 - protein, 228 aa, Chlorokybus atmophyticus
MRSVTLEEMMEAGVHFGHQTRGWNPKMAPYIYGERNGIHLIDLIQTARLLSEASDFVLNAAKEGKEFLFIGTKNQAADIISSEALRCRSHFVNQRWLGGMLTNWPTIKTRIKRLKDLEQSEKNGTLDNLPKKESAVLKRQLDKLRKYLGGLQDMKTLPDVVIIVDQKREMNAVRECIKLGIPIIALLDTNCDPSLSDLPIPANDDAIRSVNLIISKLADAIYEGQGIK

SEQ ID NO: 30514 - DNA, 717 bp, Angiopteris evecta
  CDS (1)..(717): transl_table=11
atgcaacaaaagaattggaatattaatttggaagagatgatggaagcaggaattcattttggtcatcggactcagaagtggaatcccaaaatgtcgccttatatctttacggaaagaaaaggtgttcatattctaaatctgactcaaactgctcgttttttatctgaagcttgtgatttagtatttcatgcagcaaatgagggaaaacaatttctaatagtaggtacaaaataccaagtatctgatttaatagcatcagccgcaataaaagctcgatgtcattatgtaaaccaaaaatggcttggtggtatgttaacaaattggtctaccatggaaacacgtctccaaagatttcaagatttggagaataaagcaaatacaggaggatttaatcgacttccaaagagagaggcagcaatattgaagagacagttatctcaattgcagaaatatcttggcgggattaaatatatgatagatccacctgatattgtaataatagctgatcaacacaaagaatctacagctatcaaagaatgtatcaatttaggtattcccacaatctgtgttgttgatacggattgtgatccagatcttactgatattccgattccagctaatgatgatgcacgatcttcaataagatggatcttgaacaaattaacgtttgcaattcatgaaggtcaatctaactatatgctttcaaaagattcctaa

SEQ ID NO: 30515 - protein, 238 aa, Angiopteris evecta
MQQKNWNINLEEMMEAGIHFGHRTQKWNPKMSPYIFTERKGVHILNLTQTARFLSEACDLVFHAANEGKQFLIVGTKYQVSDLIASAAIKARCHYVNQKWLGGMLTNWSTMETRLQRFQDLENKANTGGFNRLPKREAAILKRQLSQLQKYLGGIKYMIDPPDIVIIADQHKESTAIKECINLGIPTICVVDTDCDPDLTDIPIPANDDARSSIRWILNKLTFAIHEGQSNYMLSKDS

SEQ ID NO: 30516 - DNA, 759 bp, Clostridium thermocellum ATCC 27405
  CDS (1)..(759): transl_table=11
atgtcagttatttcaatgaaacaattattggaagcaggtgttcacttcggtcaccagaccagaagatggaacccgaaaatggccgaatacattttcacagagaggaacggtatatacattatagaccttcagaaaactgtgaaaaaggtagaagaggcttattatttcttaagagaagtggcaatgaacggccagggagtcctgtttgtaggtaccaagaagcaggctcaggattccataagggaagaagcacaaagagctgatcagtactatgtgaatgcaagatggctcggcggaatgcttaccaatttcaaaacaatcaaaggaagaataaacagattgaaagagctcaccaagatggaagaagaaggcgtttttgacgttctgcccaagaaagaagttacaaaacttagagctgaaaaggaaaaactcgaaaagtatcttggcggaatcaaagaaatgaaagaacttcccggagcattgtttgtagtggatcccagaaaagaaagaattgcggttcttgaagccagaaggcttggcatacctgtggtcgcaattgttgataccaactgtgacccggatgaagtggattatgtaattccgggaaatgacgatgccatcagagctgttaaattgattgcgtcaaaaatggccgatgccattatagaaggaagacagggcgaacagctttcagttgagagtaccgcccaggaacaggttgaagaaacggctcaggaagagactgctgtggaagcttga

SEQ ID NO: 30517 - protein, 252 aa, Clostridium thermocellum ATCC 27405
MSVISMKQLLEAGVHFGHQTRRWNPKMAEYIFTERNGIYIIDLQKTVKKVEEAYYFLREVAMNGQGVLFVGTKKQAQDSIREEAQRADQYYVNARWLGGMLTNFKTIKGRINRLKELTKMEEEGVFDVLPKKEVTKLRAEKEKLEKYLGGIKEMKELPGALFVVDPRKERIAVLEARRLGIPVVAIVDTNCDPDEVDYVIPGNDDAIRAVKLIASKMADAIIEGRQGEQLSVESTAQEQVEETAQEETAVEA

SEQ ID NO: 30518 - DNA, 714 bp, Clostridium difficile 630
  CDS (1)..(714): transl_table=11
atgtcagtaatatcaatgaaacaattattagaagcaggtgttcactttggtcaccaaacaagaagatggaaccctaaaatggctaagtatatattcacagagagaaatggaatatatataatcgacttacaaaaaacagttaaaaaagttgaagaagcttacaagttcactaaagaagtagctgaaacaggaaagccaatcttattcgtaggaactaaaaaacaagctcaagatgcgataaaagatgaagctgaaagatgtggaatgtactttgttaatgaaagatggttaggtggaatgttaacaaaccacaaaactataaaaacaagaataaataaattaagagaattagaaaaaatggaagaagaaggcgtatttaatgttcttcctaaaaaagaagttataaaattaagagctgaaaaagaaaaactagaaaaatacttaggtggaataaaagacatgcctgaattaccaggtgcaatgttcgtagttgacccaagaaaagaaaacatagctattcaagaagctcatagattaggtataccagtagttggtatagttgatactaactgtgacccagaacaattagactttgctataccaggaaatgatgacgctataagagccgtaaaattaataactggtgctatggcaacagctgtaattgaaggtagacaaggtgctgaggaagaagtagctgaagaccaagaataa

SEQ ID NO: 30519 - protein, 237 aa, Clostridium difficile 630
MSVISMKQLLEAGVHFGHQTRRWNPKMAKYIFTERNGIYIIDLQKTVKKVEEAYKFTKEVAETGKPILFVGTKKQAQDAIKDEAERCGMYFVNERWLGGMLTNHKTIKTRINKLRELEKMEEEGVFNVLPKKEVIKLRAEKEKLEKYLGGIKDMPELPGAMFVVDPRKENIAIQEAHRLGIPVVGIVDTNCDPEQLDFAIPGNDDAIRAVKLITGAMATAVIEGRQGAEEEVAEDQE

SEQ ID NO: 30520 - DNA, 747 bp, Herminiimonas arsenicoxydans
  CDS (1)..(747): transl_table=11
atgtcagtaactatgcgtgaaatgctggaagccggtgtccatttcggtcaccaaacccgcttctggaacccaaagatggctccttacattttcggccatcgcaacagaattcatatcgtcaatctggaaaaaaccctgggcatgtaccaggaggcgatgaagtacatcaagcaactgtcttccaatcgcggcaccgtgctgttcgttggcaccaagcgtcaagcgcgtgaaaccatcgccgctgaagcagcgcgcgccggcatgccttatgttgatcaacgctggttgggcggcatgctgaccaacttcaaaacgatcaagacatcgatcaagcgtttgaaagaactggaagcgctggttgaagacggctccatggaaaaactcagcaaaaaagaagcgctgatgttcgaacgcgaaaaaatcaagctggaaaaatccatcggcggcatcaaggacatgggcggcattcctgacgcaattttcgtggttgacgtcggttaccacaaaggcgcgatcactgaagccgccaagttgggcatcccggtcatcggcgtggtcgataccaaccactcgccagaaggcgtggcttacatcattccaggcaacgacgactcgtccaaagcgatcatgttgtacgctcgtggcgtggctgatgcgatcctcgaaggccgcgctagcgcgactaacgacctggttgaatcgatcaagggcggcgacgacttcgttgaggtcaacgagcaggcgtaa

SEQ ID NO: 30521 - protein, 248 aa, Herminiimonas arsenicoxydans
MSVTMREMLEAGVHFGHQTRFWNPKMAPYIFGHRNRIHIVNLEKTLGMYQEAMKYIKQLSSNRGTVLFVGTKRQARETIAAEAARAGMPYVDQRWLGGMLTNFKTIKTSIKRLKELEALVEDGSMEKLSKKEALMFEREKIKLEKSIGGIKDMGGIPDAIFVVDVGYHKGAITEAAKLGIPVIGVVDTNHSPEGVAYIIPGNDDSSKAIMLYARGVADAILEGRASATNDLVESIKGGDDFVEVNEQA

SEQ ID NO: 30522 - DNA, 711 bp, Populus trichocarpa
  CDS (1)..(711): transl_table=11
atgataagaagatattggaacattaatttgaaagagatgttggaaacaggagttcattttggtcatgctactagaaaatggaatccgaaaatggcaccttatatctctgcaaagcgtaagggtattcatattacaaatcttactagaactgctcgttttttatcagaagcgtgtgatttggtttttgatgcagcaagtaggagaaaacaattcttaattgttggtaccaaaaataaagcagctgatccagtagcgcgggctgcaataagagctcggtgtcattatgttaataaaaaatggctaggcggccttttaacgaattggtccactacagaaatgagacttcaaaagttcagggacttgagaatggaacaaaagacagggggaatccaccgccttccgaaaggggatgcggctcgattaaagagacagttatttcacttgcaaacatatttgggcgggattaaatatatgacagggttacccgatattgtaataatcgttgatcagcaagaagaatatatggctcttcaagaatgtatcactttgggaattccaacaatttgtttaattgatacaaactgtgacccggatctcacagatatttcgattccagcgaatgatgacgctatagcttcaatccgattaattcttaacaaattagtatttgcgatttgtgaagggcgttctagctatatacgaaatccctga

SEQ ID NO: 30523 - protein, 236 aa, Populus trichocarpa
MIRRYWNINLKEMLETGVHFGHATRKWNPKMAPYISAKRKGIHITNLTRTARFLSEACDLVFDAASRRKQFLIVGTKNKAADPVARAAIRARCHYVNKKWLGGLLTNWSTTEMRLQKFRDLRMEQKTGGIHRLPKGDAARLKRQLFHLQTYLGGIKYMTGLPDIVIIVDQQEEYMALQECITLGIPTICLIDTNCDPDLTDISIPANDDAIASIRLILNKLVFAICEGRSSYIRNP

SEQ ID NO: 30524 - DNA, 741 bp, Burkholderia vietnamiensis G4
  CDS (1)..(741): transl_table=11
atggcagtcacgatgcgccaaatgctggaagcaggtgtccacttcggtcaccagacgcgcttctggaacccgaagatggctccgttcattttcggtcaccgcaacaagattcacatcatcaacctcgaaaagacgctgccgatgttcacggacgcacagaagtacgtgcgccagctggcagcgaaccgcggcacgatcctgttcgtcggcacgaagcgccagtcgcgtgacacgatcgcccaggaagcgcaacgtgcgggcatgccgtacgtcaacgcacgctggctcggcggcatgatgaccaacttcaagacgctgaaggtgtcgatcaagcgcctgaaggacatggaagcggccgtcgaagcgggtgaaaccgaaaagatgagcaagaaggaagcgctgctgttcgaacgcgaaatcgccaagctgcaaaagtcgatcggcggcgtgaaggacatgggcggcattccggacgcgatcttcgtgatcgacgtcggctaccacaagattgccgtcaccgaagcgaacaagctgggcgtgccggtcatcgccgtggtcgacacgaaccactcgccggaaggtgtggactacgtgatcccgggtaacgacgactcgagcaaggccgttgcgctgtacgcgcaaggcgtggccgacgcgatcctcgaaggccgtgcgaacgcggtcaacgaagtggtccaggccgtgcgcggcgacgacgaatacgtcgaggaaaacgcgtaa

SEQ ID NO: 30525 - protein, 246 aa, Burkholderia vietnamiensis G4
MAVTMRQMLEAGVHFGHQTRFWNPKMAPFIFGHRNKIHIINLEKTLPMFTDAQKYVRQLAANRGTILFVGTKRQSRDTIAQEAQRAGMPYVNARWLGGMMTNFKTLKVSIKRLKDMEAAVEAGETEKMSKKEALLFEREIAKLQKSIGGVKDMGGIPDAIFVIDVGYHKIAVTEANKLGVPVIAVVDTNHSPEGVDYVIPGNDDSSKAVALYAQGVADAILEGRANAVNEVVQAVRGDDEYVEENA

SEQ ID NO: 30526 - DNA, 711 bp, Phaseolus vulgaris
  CDS (1)..(711): transl_table=11
atgacaaaaagatattggaacataattttggaagagatgatggaagctggagttcattttggccacggtactagaaaatggaatcctaaaatgtcaccttatatatctgcaaatcgtaagggtattcatattacaaatcttattagaactgctcggtttttatcagaatcttgtgatttagtttttcatgccgcaagtgggggaaaacaattcttaattgttggtacaaaaaaaaaagcagctgattcagtagcgcgggctgcaataagagctcggtgtcattatgttaataaaaaatggctcggcggtatgttaaccaattggtatactacaaaaacacgacttcaaaagttcagggacttgagaatgcaacaaaagacggggagattcgattgttttccaaaaaaagatgccgctatattgaagagacatttagctcaattggaaacatatcttggcggcattaaatatatgaaggggttacctgatattgtaataatcatcgatcaacaagaagaatatacggctcttcgagaatgtatcactttggaaattccaacaatttgtttaattgatacaaatagtgacccggacctcgctgatatttcaattccagctaatgatgatgctatagcctcaattcgattcattctgaacaaattagtttttgcaatttgtgagggtcgttctagatctatacgaaattcttga

SEQ ID NO: 30527 - protein, 236 aa, Phaseolus vulgaris
MTKRYWNIILEEMMEAGVHFGHGTRKWNPKMSPYISANRKGIHITNLIRTARFLSESCDLVFHAASGGKQFLIVGTKKKAADSVARAAIRARCHYVNKKWLGGMLTNWYTTKTRLQKFRDLRMQQKTGRFDCFPKKDAAILKRHLAQLETYLGGIKYMKGLPDIVIIIDQQEEYTALRECITLEIPTICLIDTNSDPDLADISIPANDDAIASIRFILNKLVFAICEGRSRSIRNS

SEQ ID NO: 30528 - DNA, 711 bp, Aethionema grandiflorum
  CDS (1)..(711): transl_table=11
atgacaaaaagatattggaacatcgatttggaagagatgatgagagcaggagttcattttggacatggtactaggaaatggaatcctagaatggcaccttatatttctgcaaagcgtaaaggtattcatattataaatctgactagaactgctcgttttttatcagaagcttgtgatttagtttttgatgcagcaagtaggggaaaacaattcttaattgttgggacaaaaaataaagcagctgatttggtgtcgcgggctgcaataagggctcggtgtcattatgttaataaaaaatggctcggcggcatgttaacaaattggtccactacagaaaaaagacttcataagtttagggacttgagaaccgaacaaaagacagagggactcaatcgtcttccgaaaagggatgcagctgtgttgaagagacaattctctcatttggaaacatatctaggcgggattaaatatatgacgggattgcctgatattgtaatcatcatcgatcagcaagaagaatatacggctcttcgagaatgtatcactttgggaattccaaccatttctttaatcgatacaaattgtaatcccgacctcgcggatatttctattccagcaaatgatgatgctatagcttcaattcgattcattcttaacaaattagtattcgcaatttgtgagggtcgttctagctatatacaaaattcttga

SEQ ID NO: 30529 - protein, 236 aa, Aethionema grandiflorum
MTKRYWNIDLEEMMRAGVHFGHGTRKWNPRMAPYISAKRKGIHIINLTRTARFLSEACDLVFDAASRGKQFLIVGTKNKAADLVSRAAIRARCHYVNKKWLGGMLTNWSTTEKRLHKFRDLRTEQKTEGLNRLPKRDAAVLKRQFSHLETYLGGIKYMTGLPDIVIIIDQQEEYTALRECITLGIPTISLIDTNCNPDLADISIPANDDAIASIRFILNKLVFAICEGRSSYIQNS

SEQ ID NO: 30530 - DNA, 711 bp, Barbarea verna
  CDS (1)..(711): transl_table=11
atgacaaaaagatattggaacatcgatttggaagagatgatgagagcaggagttcattttggacatggtacgaggaaatggaatcctagaatggcaccttatatttctgcaaagcgtaaaggtattcatattataaatctgactagaactgctcgttttttatcagaagcttgtgatttagtttttgatgcagcaagtaagggaaaacaattcttaattgttgggacaaaaaataaagcagctgatttagtgtcgcgggctgcaataagagctcggtgtcattatgttaataaaaaatggctcggcggcatgttaacaaattggtccactacagaaaaaagacttcataagtttagggacttgagaactgaacaaaagacagagggattcaaccgtcttccgaaaagggatgcagctgtgttgaagagacaattatctcgcttgaaaacatatctaggcgggattaaatatatgacgggattgcctgatattgtaatcatcatcgatcagcaagaagaatatacggctcttagagaatgtatcactttgggaattccaaccatttctttaatcgatacaaattgtaatcccgatctcgcggatatttctattccagcaaatgatgacgctatagcttcaattcgattcactcttaacaaattagtattcgcaatttgtgagggtcgttctagctatatacaaaattcttga

SEQ ID NO: 30531 - protein, 236 aa, Barbarea verna
MTKRYWNIDLEEMMRAGVHFGHGTRKWNPRMAPYISAKRKGIHIINLTRTARFLSEACDLVFDAASKGKQFLIVGTKNKAADLVSRAAIRARCHYVNKKWLGGMLTNWSTTEKRLHKFRDLRTEQKTEGFNRLPKRDAAVLKRQLSRLKTYLGGIKYMTGLPDIVIIIDQQEEYTALRECITLGIPTISLIDTNCNPDLADISIPANDDAIASIRFTLNKLVFAICEGRSSYIQNS

SEQ ID NO: 30532 - DNA, 711 bp, Capsella bursa-pastoris
  CDS (1)..(711): transl_table=11
atgacaaaaagatattggaacatcgatttggaagagatgatgagagcaggagttcattttggacatggtacgaggaaatggaatcctagaatggcaccttatatttctgcaaagcgtaaaggtattcatattataaatctgactagaactgctcgttttttatcagaagcttgtgatttagtttttgatgcagcaagtaggggaaaacaattcttaattgttgggacaaaaaataaagcagctgatttagtggcgcgggctgcaatacgggctcggtgtcattatgttaataaaaagtggctcggcggcatgttaacaaattggtccactacagaaaaaagacttcataagtttagggacttgagaactgaacaaaagacagagggattcaaccgtcttccgaaaagggatgcagctgtgttgaagagacaattgtctcgcttggaaacatatctaggcgggattaaatatatgacgggattgcctgatattgtaataatcctcgatcagcaagaagaatatacggctcttagagaatgtatcactttgggaattccaaccatttctttaatcgatacaaattgtaatcccgatctcgcggatatttctattccagcaaatgatgacgctatagcttcaattcgattcattcttaacaaattagtattcgcaatttgtgaggggcgttctagctatatacaaaattcttga

SEQ ID NO: 30533 - protein, 236 aa, Capsella bursa-pastoris
MTKRYWNIDLEEMMRAGVHFGHGTRKWNPRMAPYISAKRKGIHIINLTRTARFLSEACDLVFDAASRGKQFLIVGTKNKAADLVARAAIRARCHYVNKKWLGGMLTNWSTTEKRLHKFRDLRTEQKTEGFNRLPKRDAAVLKRQLSRLETYLGGIKYMTGLPDIVIILDQQEEYTALRECITLGIPTISLIDTNCNPDLADISIPANDDAIASIRFILNKLVFAICEGRSSYIQNS

SEQ ID NO: 30534 - DNA, 711 bp, Draba nemorosa
  CDS (1)..(711): transl_table=11
atgacaaaaagatattggaacatcgatttggaagagatgatgagagcaggagtgcattttggacatggtactaggaaatggaatcctagaatggcaccttatatttctgcaaagcgtaaaggtattcatattataaatctgactagaactgctcgttttttatcagaagcttgtgatttagtttttgatgcagcaagtaggggaaaacaattcttaattgttggaacaaaaaataaagcagctgatttagtgtcgcgggctgcaataagggctcgatgtcattatgttaataaaaagtggctcggcggtatgttaacaaattggtccactacagaaaaaagacttcataaatttagggacttgagaactgaacaaaagacagaggggttcaaccgtcttccgaaaagggatgcagctgtgttgaagagacaattatctcgtttggaaacatatctaggcgggattaaatatatgactggattgcctgatattgtaatcatcatcgatcagcaagaagaatatacggctctgagagagtgtataactttgggaattccaacgatttctttaatcgatacaaattgtaatcccgatctcgcggatatttctattccagcaaatgatgacgctatagcttcaattcgattcattcttaacaaattagtattcgcaatttgtgagggccgttctagctatatacaaaattattga

SEQ ID NO: 30535 - protein, 236 aa, Draba nemorosa
MTKRYWNIDLEEMMRAGVHFGHGTRKWNPRMAPYISAKRKGIHIINLTRTARFLSEACDLVFDAASRGKQFLIVGTKNKAADLVSRAAIRARCHYVNKKWLGGMLTNWSTTEKRLHKFRDLRTEQKTEGFNRLPKRDAAVLKRQLSRLETYLGGIKYMTGLPDIVIIIDQQEEYTALRECITLGIPTISLIDTNCNPDLADISIPANDDAIASIRFILNKLVFAICEGRSSYIQNY

SEQ ID NO: 30536 - DNA, 711 bp, Lepidium virginicum
  CDS (1)..(711): transl_table=11
atgacaaaaagatattggaacatcgatttggaagagatgatgagagcaggagttcattttggacatggtacgaggaaatggaatcctagaatggccccttatatttctgcaaagcgtaaaggtattcatattataaatctgactagaactgctcgttttttatcagaagcttgtgatttagtttttgatgcagcaagtaggggaaaacaattcttaattgttgggacaaaaaataaagcagctgatttagtgtcgcgggctgcaataagggctcggtgtcattatgttaataaaaaatggctcggcggcatgttaacaaattggtccactacagaaaaaagacttcataagtttagggacttgagaactgaacaaaagacagagggattcaaccgtcttccgaaaagggatgcagctgtgttgaagagacaattatctcgcttgaaaacatatctaggcgggattaaatatatgacgggattgcctgatattgtaatcatcatcgatcagcaagaagaatatactgctcttagagaatgtatcactttgggaattccaaccatttctttaatcgatacaaattgtaatcccgatctcgcggatatttctattccagcaaatgatgacgctatagcttcaattcgattcattcttaacaaattagtattcgcaattggtgagggtcgttctagctatatacaaaattcttga

SEQ ID NO: 30537 - protein, 236 aa, Lepidium virginicum
MTKRYWNIDLEEMMRAGVHFGHGTRKWNPRMAPYISAKRKGIHIINLTRTARFLSEACDLVFDAASRGKQFLIVGTKNKAADLVSRAAIRARCHYVNKKWLGGMLTNWSTTEKRLHKFRDLRTEQKTEGFNRLPKRDAAVLKRQLSRLKTYLGGIKYMTGLPDIVIIIDQQEEYTALRECITLGIPTISLIDTNCNPDLADISIPANDDAIASIRFILNKLVFAIGEGRSSYIQNS

SEQ ID NO: 30538 - DNA, 711 bp, Nasturtium officinale
  CDS (1)..(711): transl_table=11
atgacaaaaagatattggaacatcgatttggaagaaatgatgagagcaggagttcattttggacatggtacgaggaaatggaatcctagaatggcaccttatatttctgcaaagcgtaaaggtattcatattataaatctgactagaactgctcgttttttatcagaagcttgtgatttagtttttgatgcagcaagtaggggaaaacaattcttaattgttgggacaaaaaataaagcagctgatttagtgtcgcgcgctgcaataagggctcggtgtcattatgttaataaaaaatggctcggcggcatgttaacaaattggtccactacagaaaaaagacttcataagtttagggacttgagaactgaacaaaagacagagggattcaaccgtcttccgaaaagggatgcagctgtgttgaagagacaattatctcgcttggaaacatatctaggcgggataaaatatatgacgggattgcctgatattgtaatcatcatcgatcagcaagaagaatatacggctcttagagaatgtatcactttgggaattccaaccatttctttaatcgatacaaattgtaatcccgatctcgcggatatttctattccagcaaatgatgacgctatagcttcaattcgattcattcttaacaaattagtattcgcaatttgtgagggtcgttctagctatatacaaaattcttga

SEQ ID NO: 30539 - protein, 236 aa, Nasturtium officinale
MTKRYWNIDLEEMMRAGVHFGHGTRKWNPRMAPYISAKRKGIHIINLTRTARFLSEACDLVFDAASRGKQFLIVGTKNKAADLVSRAAIRARCHYVNKKWLGGMLTNWSTTEKRLHKFRDLRTEQKTEGFNRLPKRDAAVLKRQLSRLETYLGGIKYMTGLPDIVIIIDQQEEYTALRECITLGIPTISLIDTNCNPDLADISIPANDDAIASIRFILNKLVFAICEGRSSYIQNS

SEQ ID NO: 30540 - DNA, 990 bp, Bradyrhizobium sp. ORS278
  CDS (1)..(990): transl_table=11
atggcgctgcctgaattcaccatgcgccagctgctcgaagctggcgttcactttggccaccagtctcaccgctggaatccgaaaatggccgattacattttcggggctcgcaacaacatccacatcatcgacctcgctcagaccgtgccgctgctgcacacggcgctgcaggcggtgagcgacaccgtcgccaagggcggccgcatcctgttcgtcggcaccaagcgccaggcgcaggacaacgttgccgacgcggccaagcgctgcgcgcagtatttcgtcaattcgcgctggctcggcggcacgctgaccaactggaagacgatctcggcgtcgatcaagcgtctgcgtcacctcgatgaagtgctgtcctcgggcgaggccaactcctacaccaagaaggagcgcctgacgctgcagcgcgagcgcgacaagctcgaccgctcgctcggcggcatcaaggacatgggcggtctgcccgacatgatcttcgtgatcgacaccaacaaggaagacatcgcgatccaggaggcccagcgcctcaacatcccggtcgccgcgatcgtcgacaccaattgcgatccgaagggcatcacctacgtggtccccggcaatgacgacgccggccgcgccatctcgctgtattgcgacctgatcgcgcgcgctgccatcgacggcatctcgcgcgcccagggcgagctcggcatcgacgtcggcgcctccgccgcgccgctggaggaggatctcccggctgcttctgcctcgaccttccaggggctgccgggcccgcgcggcactgccgacgacctgaagaagctcaccggcgtgtccggtgcgatcgagaagaagctgaacgacctcggcatcttccacttctggcagcttgccgagctcaaccacgacacggcgcatcagatcggcgaagaagtcggtctgccgagccgcgccgacgcctgggtcgcccaggccaagtcgctcgccgacgcctaa

SEQ ID NO: 30541 - protein, 329 aa, Bradyrhizobium sp. ORS278
MALPEFTMRQLLEAGVHFGHQSHRWNPKMADYIFGARNNIHIIDLAQTVPLLHTALQAVSDTVAKGGRILFVGTKRQAQDNVADAAKRCAQYFVNSRWLGGTLTNWKTISASIKRLRHLDEVLSSGEANSYTKKERLTLQRERDKLDRSLGGIKDMGGLPDMIFVIDTNKEDIAIQEAQRLNIPVAAIVDTNCDPKGITYVVPGNDDAGRAISLYCDLIARAAIDGISRAQGELGIDVGASAAPLEEDLPAASASTFQGLPGPRGTADDLKKLTGVSGAIEKKLNDLGIFHFWQLAELNHDTAHQIGEEVGLPSRADAWVAQAKSLADA

SEQ ID NO: 30542 - DNA, 804 bp, Dichelobacter nodosus VCS1703A
  CDS (1)..(804): transl_table=11
atgacacaagtcagtatgcgcgatctatttgaagccggcgctcatttcggtcaccgcgcccgtttttggaatcctaaaatggcgccttatatttatggcaaacgtggcgacattcacattatcaatttggaacaaaccgttccgatgttaaacgatgctttgaactttttaagcgctgttgtgggcaatggcggacgcgtcatgtttgtaggcacaaaacgtagcgcaagcgatgctatttctgaagctgccagccgttgcggtatgccttatgtaaatttccgttggctcggcggcatgatgaccaactttaaaaccattcgccaatccattcgccgtttggaagaaattgaaaaaatggcagaagatggtacgtatgacaaattatctaaaaaagaagtcatcgttttagaacgcgaacgggaaaagttagcgcgcgcgttaaccggcattcgttctatgaaacatttgccagatgttttattcgtggttgacgtggggcacgaacgcatcgcaattcaagaagcgatgaaattgggcattccggtagttggcgtggttgatactaataacgatattgaaggcgttgactacattattccgggaaatgatgattctgtgcgcgcgattcgtttatatgtaaatgcggcagccgatacgattgaacacgctaaagcggcagcagctgtgcgcggtggcgataatgcggaagaagaattagcggaagcaatttctcaagaagaaccttctgcggcagaagagttgccagatgatatggcagataatgaaaacgaatttgagtaa

SEQ ID NO: 30543 - protein, 267 aa, Dichelobacter nodosus VCS1703A
MTQVSMRDLFEAGAHFGHRARFWNPKMAPYIYGKRGDIHIINLEQTVPMLNDALNFLSAVVGNGGRVMFVGTKRSASDAISEAASRCGMPYVNFRWLGGMMTNFKTIRQSIRRLEEIEKMAEDGTYDKLSKKEVIVLEREREKLARALTGIRSMKHLPDVLFVVDVGHERIAIQEAMKLGIPVVGVVDTNNDIEGVDYIIPGNDDSVRAIRLYVNAAADTIEHAKAAAAVRGGDNAEEELAEAISQEEPSAAEELPDDMADNENEFE

SEQ ID NO: 30544 - DNA, 711 bp, Chloranthus spicatus
  CDS (1)..(711): transl_table=11
atgacaagaagatattggaacataaatttggaagagatgatggaagcaggagttcattttggtcatggtactaggaaatggaatcctagaatggcaccttacatctccgcaaagcgtaaaggtattcatattacaaatcttactcgaactgctcgttttttatcagaagcctgtgatttagtttttgatgcagcaagtagtggaaaacacttcttaatagtcggtaccaaaaataaagcagcggattcagtagcatcagctgcaataagggctcggtgtcattatgttaataaaaaatggcttggtggtatgtcaacgaattggtcgactacagaaacgagacttcagaagttcagggacttgagagcggaacaaaagatgggtagactcaatcgtctcccaaaaagagatgcagcaatgttgaagagacaattatctcgcttgcaaacatatctgggtgggatcaaatatatgacgggtttacccgatattgtaatcatcgttgatcagcaagaagaatatacggctcttcgagaatgtgttactttggggattccgacgatttgtttaatcgatacaaattgtgacccggatctagcggatatttcgattccagccaatgatgacgctatagcttcaatacgattgattcttaacaaattagtatccgctatttgtgagggtcgttctggctatataagaaatcgttga

SEQ ID NO: 30545 - protein, 236 aa, Chloranthus spicatus
MTRRYWNINLEEMMEAGVHFGHGTRKWNPRMAPYISAKRKGIHITNLTRTARFLSEACDLVFDAASSGKHFLIVGTKNKAADSVASAAIRARCHYVNKKWLGGMSTNWSTTETRLQKFRDLRAEQKMGRLNRLPKRDAAMLKRQLSRLQTYLGGIKYMTGLPDIVIIVDQQEEYTALRECVTLGIPTICLIDTNCDPDLADISIPANDDAIASIRLILNKLVSAICEGRSGYIRNR

SEQ ID NO: 30546 - DNA, 711 bp, Buxus microphylla
  CDS (1)..(711): transl_table=11
atgacaagaagatattggaacatcaatttggaagagatgatggaagcaggagttcattttggtcatggtactaggaaatggaatcctagaatggcaccttacatctctgcaaagcgtaaaggtattcatattacaaatcttactagaactgctcgttttttatcagaagcttgtgatttactttttgatgcagcaagtaggggaaaacaattcttaattgttggtaccaaaaataaagcagctgatttagtagcatcggctgcaataagggctcggtgtcattatgttaataaaaaatggctcggtggtatgtcaacgaattggtccactacagaaacgagacttcataagttccgggacttgagagcggaacaaaagacggcgagactcgcccgtcttccgaaaagagatgcagcaatgttgaagagacaattatctcacttgcaaacatatttgggcgggatcaaatatatgacgaggttacccgatattgtaatcatcgttgatcagcaagaagaatatacagctattcgagaatgtgtcactttgggaattccaatgatttgtttaatcgatacaaattgtgatccggatctcgcagatatttctattccagcgaatgatgacgctatagcttcaatccgattaattcttaacaaattagtatccgcaatttgtgaaggtcgttctagctatataagaaatcgttga

SEQ ID NO: 30547 - protein, 236 aa, Buxus microphylla
MTRRYWNINLEEMMEAGVHFGHGTRKWNPRMAPYISAKRKGIHITNLTRTARFLSEACDLLFDAASRGKQFLIVGTKNKAADLVASAAIRARCHYVNKKWLGGMSTNWSTTETRLHKFRDLRAEQKTARLARLPKRDAAMLKRQLSHLQTYLGGIKYMTRLPDIVIIVDQQEEYTAIRECVTLGIPMICLIDTNCDPDLADISIPANDDAIASIRLILNKLVSAICEGRSSYIRNR

SEQ ID NO: 30548 - DNA, 711 bp, Illicium oligandrum
  CDS (1)..(711): transl_table=11
atgacaagaagatattggaacatcaatttggaagagatgctggaagcaggagttcattttggtcatggtactaggaaatggaatcctagaatggcaccttacatctctgcaaagcgtaaaggtattcatattacaaatcttactagaactgctcgttctttatccgaagcctgtgatttagtttttgatgcagcaagtagaggaaaacacttcttaatagttggtacgaaagataaagcagcggattcagtagcatcagctgcaataagggctcggtgccattatgtcaataaaaaatggcttggtggtatgttaactaattggttcactacagaaacgagacttcataagttcagggatttgagagcagaacaaaagacagggagactcaaccgtctcccgaaaagagatgcagcaatgttaaagagaaaattatctcacttgcaagcatatctgggcgggatcaaatatatgacggggttacccgatattgtaatcatcatcgatcagcaagaagaatatacagctattagagaatgtgccactttgggtattccaacgatttgtttaatcgatacaaattgtgacccggatctcgcggatattccgattccagccaatgatgacgctatagcttcaatcagattaattcttaacaaattagtatcggcaatttgtgagggccgttctagctatataagaaatcattga

SEQ ID NO: 30549 - protein, 236 aa, Illicium oligandrum
MTRRYWNINLEEMLEAGVHFGHGTRKWNPRMAPYISAKRKGIHITNLTRTARSLSEACDLVFDAASRGKHFLIVGTKDKAADSVASAAIRARCHYVNKKWLGGMLTNWFTTETRLHKFRDLRAEQKTGRLNRLPKRDAAMLKRKLSHLQAYLGGIKYMTGLPDIVIIIDQQEEYTAIRECATLGIPTICLIDTNCDPDLADIPIPANDDAIASIRLILNKLVSAICEGRSSYIRNH

SEQ ID NO: 30550 - DNA, 711 bp, Dioscorea elephantipes
  CDS (1)..(711): transl_table=11
gtgaaaagaagatattggaacatcaatttgccggagatgatggaagcaggagttcatttcggtcatggtactaagaaatggaatcctagaatggccccttacatctccgcaaaacgtaaaggtattcatattacaaatctcactataactgctcgttttttatcagaagcctgtgatttagtttttgatgcagcaagtaggggaaaaagctttttaatcgttggtaccaaaaataaagcagcggattcagtagcatcggctgcaataagggctcggtgtcattatgttaataaaaaatggcttggcggtatgttaacgaattggtccactacggaaacgagacttcataagttcagggacttaagagcagaacaaaacatggggaaactgaaccgtctccccaaaagagatgcagcgatgttgaagagaaaattatctgccctgcaatcatatctgggtgggatcaaatatatgacgggtttgcccgatattgtaatcatcgttgatcaggaaaaagaatatatggctcttcaagaatgtgccattttggggattccgacaatttgtttaatcgatacaaattgtaacccagatcttgcagatatttcgattccagccaacgatgatgctatagcttcaatccgattgattcttaacaaattagtatttgcaatttgcgagggtcgttatagctatataggaaatcgttga

SEQ ID NO: 30551 - protein, 236 aa, Dioscorea elephantipes
MKRRYWNINLPEMMEAGVHFGHGTKKWNPRMAPYISAKRKGIHITNLTITARFLSEACDLVFDAASRGKSFLIVGTKNKAADSVASAAIRARCHYVNKKWLGGMLTNWSTTETRLHKFRDLRAEQNMGKLNRLPKRDAAMLKRKLSALQSYLGGIKYMTGLPDIVIIVDQEKEYMALQECAILGIPTICLIDTNCNPDLADISIPANDDAIASIRLILNKLVFAICEGRYSYIGNR

SEQ ID NO: 30552 - DNA, 723 bp, Cycas taitungensis
  CDS (1)..(723): transl_table=11
atgacaaagagatattggaacatcaatttggaagagatgatggaagcaggagttcatttcggtcatcaagctaggaaatggaatcccagaatggcgccttacatttttacagagcgcagaggtattcatattataaatctgactcgaactgctcgctttttatcagaagcttgtgatttagtgttcgatgcagcaggtaaaggaaaacaattcccgatagttggtacaaaatatcaagcagctgattcagtagcatcagctgctataaaagctcgatgtcattatgtaaataaaaaatggcttggtggtatgttaaccaattggtccactacaggaacgagaccccggaagttcaaagatttgaagaaagaacaagatacgggacaatccaatcgacttccaaagaaagaggcagcaatgctcaagagacaattagctcaattgcagaaatatttaggtgggattaaatacatgacaagtttgcccgatatcgtaataattgccgatcaacaagaagaatccactgctattggggaatgcataactttaggtatcccgacaatttgcttagttgatacggattgtgatccagatctcacggatatcccaattccagccaatgatgatgctagagcttcaatccgattgatcttgaacaaattaacgtcatcaatctgcgaaggtcattatagctctatgaaaggtgaatcaatgaaaagttaa

SEQ ID NO: 30553 - protein, 240 aa, Cycas taitungensis
MTKRYWNINLEEMMEAGVHFGHQARKWNPRMAPYIFTERRGIHIINLTRTARFLSEACDLVFDAAGKGKQFPIVGTKYQAADSVASAAIKARCHYVNKKWLGGMLTNWSTTGTRPRKFKDLKKEQDTGQSNRLPKKEAAMLKRQLAQLQKYLGGIKYMTSLPDIVIIADQQEESTAIGECITLGIPTICLVDTDCDPDLTDIPIPANDDARASIRLILNKLTSSICEGHYSSMKGESMKS

SEQ ID NO: 30554 - DNA, 711 bp, Nymphaea alba
  CDS (1)..(711): transl_table=11
atgacaagaagatattggaacatcaatttggaagagatgatggaagcgggggttcattttggtcatggtactaggaaatgggatcctagaatggcaccttacatctctgcaaagcgtaaaggtattcatattacaaatcttacgagaactgctcgttttttatcagaagcctgtgatttagtttttgacgcagcaagtagaggaaaacacttcttaatagttggtacgaaagataaggcagctgattcggtagcatcagctgcaataagggctcggtgtcattatgtcaataaaaaatggctcggtggtatgtcaacgaattggtccactacggaaacgaggcttcagaagttcagggacttgagagtgagagccgagatggggcaattcagtcgtctcccgaaacgggatgcagcaatattgaagagacaattatctcactttcaaacatatctgggcggtatcaaatatatgacggggttacccgatattgtaatcatcattgatcagcaagaagaatatacggcccttcgagaatgcgtcactttgggtattccaactatttgtttaatcgatacaaattgtgatccagatctcgcagatattccgattccagccaacgatgacgctatagcttccatccgattgattcttaacaaattagtatccgcaatttgtcagggacgttctagctatataagaagtcgttga

SEQ ID NO: 30555 - protein, 236 aa, Nymphaea alba
MTRRYWNINLEEMMEAGVHFGHGTRKWDPRMAPYISAKRKGIHITNLTRTARFLSEACDLVFDAASRGKHFLIVGTKDKAADSVASAAIRARCHYVNKKWLGGMSTNWSTTETRLQKFRDLRVRAEMGQFSRLPKRDAAILKRQLSHFQTYLGGIKYMTGLPDIVIIIDQQEEYTALRECVTLGIPTICLIDTNCDPDLADIPIPANDDAIASIRLILNKLVSAICQGRSSYIRSR

SEQ ID NO: 30556 - DNA, 711 bp, Panax ginseng
  CDS (1)..(711): transl_table=11
  misc_feature (636)..(636): y is t or c
atgacaaaaagatattggaacatcaatttggaagagatgatgaaggccggagttcattttggacatggtactaagaaatggaatcctaaaatggccccttatatctctgcaaagcgtaaaggtattcatattacaaatcttactagaactgctcgttttttattagaagcttgtgatttggtttttgatgcagcaagtaggggaaaacaattcttaatcgttggcactaaaaataaagcagctaacttagtagcatgggctgcaataaaggctcggtgtcattatgttaataaaaaatggctcggcggtatgttaacgaattggtccactacagaaacaagacttcataagtttagagacttgagaacagaacaaaaaacggggagactcaaccgtcttccgaaaagagatgcggctatgttgaaaagacaattatcccacttgcaaacatatctgggcgggattaaatatatgacagggttaccagatattgtaatcatcgttgatcagcacgaagaatatacggcccttcgagaatgtatcactttgggaattccaacaatttgtttaatcgatacaaattgtgaccccgatcttgcagatatttcgattccagcgaacgacgatgctatatcytcaatccgattaattcttaacaaattagtattcgcaatttgtgaggggcgttctagctatataagaaatccgtga

SEQ ID NO: 30557 - protein, 236 aa, Panax ginseng
MTKRYWNINLEEMMKAGVHFGHGTKKWNPKMAPYISAKRKGIHITNLTRTARFLLEACDLVFDAASRGKQFLIVGTKNKAANLVAWAAIKARCHYVNKKWLGGMLTNWSTTETRLHKFRDLRTEQKTGRLNRLPKRDAAMLKRQLSHLQTYLGGIKYMTGLPDIVIIVDQHEEYTALRECITLGIPTICLIDTNCDPDLADISIPANDDAISSIRLILNKLVFAICEGRSSYIRNP

SEQ ID NO: 30558 - DNA, 771 bp, Mannheimia succiniciproducens MBEL55E
  CDS (1)..(771): transl_table=11
ttgatatgtggaggcaaaaccccaattaaaaaggaaaatattatggcacaagtttcaatgcgcgatatgctacaagcaggcgttcatttcggtcaccaaactcgttactggaaccctaaaatgaaaccattcatttatggtcctcgcaacggtgttcacatcattaacttagaaaaaacagttcctatgtttaatggtgcgttagccgaattaacacgtatcgcaagtaacaacggtaaaattttattcgttggtacaaaacgcgcagcgactgaagcagttcaagcagcagcattagactgtcaacaatattatgtaaatcaccgttggttaggcggtatgttgactaactggaaaacggttcgtcaatcaatcaaacgtttaaaagatttagaaactcaatctcaagacggtacattcgataaattaactaaaaaagaagctttagttcgtacacgtgaaatggaaaaacttgagttaagccttggcggtattaaagatatggccggccttcctgacgctattttcgtaatcggtgcagactacgaacatatcgcgatcaaagaagcaaataacttaggtattcctgtattcgcagtagttgatactaactctaatccggacggcattgatttcgttattcctggtaacgacgatgcgactcgcgcaattcagttatatgtaacggcagcggcagcggctgttaaagaaggtcgtagccaacaaactgcaaccgaagaaaaattcgctgaagaagtagcggcagagtaa

SEQ ID NO: 30559 - protein, 256 aa, Mannheimia succiniciproducens MBEL55E
MICGGKTPIKKENIMAQVSMRDMLQAGVHFGHQTRYWNPKMKPFIYGPRNGVHIINLEKTVPMFNGALAELTRIASNNGKILFVGTKRAATEAVQAAALDCQQYYVNHRWLGGMLTNWKTVRQSIKRLKDLETQSQDGTFDKLTKKEALVRTREMEKLELSLGGIKDMAGLPDAIFVIGADYEHIAIKEANNLGIPVFAVVDTNSNPDGIDFVIPGNDDATRAIQLYVTAAAAAVKEGRSQQTATEEKFAEEVAAE

SEQ ID NO: 30560 - DNA, 741 bp, Bacillus licheniformis ATCC 14580
  CDS (1)..(741): transl_table=11
atgtcagtcatttctatgaagcaattgcttgaagctggtgttcacttcggccaccaaacgcgccgctggaacccaaaaatgaagcgttacatcttcacggagcgtaacggaatctacatcatcgatcttcaaaaaacagtcaaaaaagttgaagaagcatacaacttcacgaaaaaccttgcagctgacggaggaaaaatccttttcgtcggtacgaaaaagcaagctcaagactctgttaaagaagaagcggaacgttctggaatgtactatgtcaaccaacgctggcttggcggtacattaacaaactttgaaacgatccaaaagcgtatcaaacgccttaaagatatcgaaaaaatgcaggaaaacggcacatttgacgtacttcctaaaaaagaagtcgttcaattgaaaaaagaattagagcgtcttgaaaaattcctcggcggaatcaaagaaatgaaagagcttcctgacgcactgttcatcatcgatcctcgcaaagagcgcatcgcggttgcagaagcgcgcaaactgaacattccgatcatcggaatcgttgacacaaactgcgatcctgatgaaatcgatgttgtcatccctgcgaacgatgacgccatccgcgctgttaaattgctgacttctaaaatggcagatgccatccttgaagcaaaacaaggtgaagaatcagctgaaacagaagcgaaagaagcagaaacaactgaaacaacaactgcttaa

SEQ ID NO: 30561 - protein, 246 aa, Bacillus licheniformis ATCC 14580
MSVISMKQLLEAGVHFGHQTRRWNPKMKRYIFTERNGIYIIDLQKTVKKVEEAYNFTKNLAADGGKILFVGTKKQAQDSVKEEAERSGMYYVNQRWLGGTLTNFETIQKRIKRLKDIEKMQENGTFDVLPKKEVVQLKKELERLEKFLGGIKEMKELPDALFIIDPRKERIAVAEARKLNIPIIGIVDTNCDPDEIDVVIPANDDAIRAVKLLTSKMADAILEAKQGEESAETEAKEAETTETTTA

SEQ ID NO: 30562 - DNA, 816 bp, Legionella pneumophila subsp. pneumophila str. Philadelphia 1
  CDS (1)..(816): transl_table=11
ttggtgggtttcgtatgggaagcgtggaggcttaaccctggagatatatatatgaataatgttagtatgcgtgaattgctcgaagcaggtgctcattttgggcacagaacacgtttctggaatccaaaaatgagtgaatacatttttggctcaagaaataaaatccatatcattaaccttgaaaaaacattacccatgctgagtgacgtaacgaattacgttagtcgattggcagcaaacaaggcaaaaattctttttgtaggcactaaaagagcagctcaagacagcattcgagagcatgcaaaacgatgcgggatgccttatgtagaccatagatggttaggaggtatgctgaccaactataaaacagtccgtcaatcaatattccgtttaaaagaattaaaagaaatgaaggaaaagggattgtttaatgacatgattaagaaagaagcgctaatgctgacaagagagcttgaaaaactggagcgtagccttggtggaatcgagaacatgggcggcctacctgatgcgttatttgtggttgatgttggttttgaacatattgctgttgaagaagcgcgtcgattaagaattccggtaattggtgttgttgataccaataatagccctgacaacattgattatgttataccaggcaatgatgattctatgcgtgctgtggacatttatgttcgctgtgtcgctgatgctattttagatggtaaaaatagcaatactgtaggaagagtatcatctgattcagagtttgttgaggttacttcaaattctaatgaagaagaaaaatccggagaataa

SEQ ID NO: 30563 - protein, 271 aa, Legionella pneumophila subsp. pneumophila str. Philadelphia 1
MVGFVWEAWRLNPGDIYMNNVSMRELLEAGAHFGHRTRFWNPKMSEYIFGSRNKIHIINLEKTLPMLSDVTNYVSRLAANKAKILFVGTKRAAQDSIREHAKRCGMPYVDHRWLGGMLTNYKTVRQSIFRLKELKEMKEKGLFNDMIKKEALMLTRELEKLERSLGGIENMGGLPDALFVVDVGFEHIAVEEARRLRIPVIGVVDTNNSPDNIDYVIPGNDDSMRAVDIYVRCVADAILDGKNSNTVGRVSSDSEFVEVTSNSNEEEKSGE

SEQ ID NO: 30564 - DNA, 1098 bp, Anaplasma marginale str. St. Maries
  CDS (1)..(1098): transl_table=11
gtgtttttccaacgctggtggcgtgccatttcgcacatagccgtacaatggtcccgtatttatatgcgggttgggctatggaggtttaactgttgtagtagttttggagtaatgatgggtaatctgcctgaatttagtatccgcgatctcgttgaggctggggtacatcttggacacaaggctggccgctggaacccagcgatggccccttacatatatggagtgcacaagtataaagacattcacgtaatagatctgagaaagactttagtgcttctcagagatgccctttctgtgctttatgatgtggtgctcaaaagaggaagagtgctttttgtaggcactaaggttcaagcttccaacatcgttgctgaggaggccactagatgtggccagtattacgtaaaccacaggtggcttgggggaatgcttacaaactgggaaactgtttcttcttccatccggcgcttggtagagtttgagaggctcattaacaataacgaggggcagtttacgaaaaaggagctcttaatgcttgataagcagaggggtaaattggaaagatcgctgggtggtataagagaaatgggcgggctgccccatgccttatttgtgattgacaccaacaaagagcatatagctattagagaggctaataagctaaagatccccgtggttgccattcttgatacgaattctgatcccggtggtgtggattacccaattcccggaaacgacgattcggtgaggtctatagacttcttttgtcgcgctgtgtcgagaactattttggaggctatacgctcggatttggcaagttccggggtgaatattgctgctaagggaagtgatgttgcggagtcttatgcggggacggcagcggatgctggtcatacacctgtgagtgagacgttaagcgctggtgggcccaccgctggggctagcccttatatacctgaggttggtccatctgttgtggaagttgatacacacaagagcgcggcgttgccggacagtaggcctaacgatgctgatgtacccgcggaggatggcgtgcttccagatcccggtgttgctgatggtgcagctttggaataa

SEQ ID NO: 30565 - protein, 365 aa, Anaplasma marginale str. St. Maries
MFFQRWWRAISHIAVQWSRIYMRVGLWRFNCCSSFGVMMGNLPEFSIRDLVEAGVHLGHKAGRWNPAMAPYIYGVHKYKDIHVIDLRKTLVLLRDALSVLYDVVLKRGRVLFVGTKVQASNIVAEEATRCGQYYVNHRWLGGMLTNWETVSSSIRRLVEFERLINNNEGQFTKKELLMLDKQRGKLERSLGGIREMGGLPHALFVIDTNKEHIAIREANKLKIPVVAILDTNSDPGGVDYPIPGNDDSVRSIDFFCRAVSRTILEAIRSDLASSGVNIAAKGSDVAESYAGTAADAGHTPVSETLSAGGPTAGASPYIPEVGPSVVEVDTHKSAALPDSRPNDADVPAEDGVLPDPGVADGAALE

SEQ ID NO: 30566 - DNA, 729 bp, Neisseria gonorrhoeae FA 1090
  CDS (1)..(729): transl_table=11
atgtctcaaattactatgcgtcagatgattgaagccggtgttcacttcggtcaccaaacccgtttctggaacccgaaaatggctcaatacattttcggcgcgcgcaacaaaatccatatcgtaaacttggaaaaaaccctgccgatgttccaagaggcgcaagaagccgtacgtcgtctggttgccaacaaaggtacggtattgttcgtaggtaccaaacgccaggcacgcgacatcatccgcgaagaagcgacccgcgccggtatgcctttcgtcgaccaccgctggttgggcggtatgctgaccaactacaaaaccgttaagcaatccatcaaacgcctggaagaaaaaaccgcagccttggaaaatgctgccgaaagcggtttcagcaaaaaagaaattctggaaatgcaacgcgacgttgaaaaactggaacgctctttgggcggtatcaaaaacatgaaaggcctgcccgacgcgattttcgttatcgataccggctaccaaaaaggtactttggttgaggctgaaaaactgggcatccccgttatcgccgtagtcgataccaacaacagcccagacggcgtgaaatacgtcatccccggcaacgacgactccgccaaagccatccgcctgtactgccgaggcatcgccgacgcagttttggaaggcaaaaaccaagcgctgcaagaaaccgtagccgctgcccaagaaaccgctgccgagtaa

SEQ ID NO: 30567 - protein, 242 aa, Neisseria gonorrhoeae FA 1090
MSQITMRQMIEAGVHFGHQTRFWNPKMAQYIFGARNKIHIVNLEKTLPMFQEAQEAVRRLVANKGTVLFVGTKRQARDIIREEATRAGMPFVDHRWLGGMLTNYKTVKQSIKRLEEKTAALENAAESGFSKKEILEMQRDVEKLERSLGGIKNMKGLPDAIFVIDTGYQKGTLVEAEKLGIPVIAVVDTNNSPDGVKYVIPGNDDSAKAIRLYCRGIADAVLEGKNQALQETVAAAQETAAE

SEQ ID NO: 30568 - DNA, 708 bp, Huperzia lucidula
  CDS (1)..(708): transl_table=11
atggaaccaaaatattggaatattaatttggaagaaatgatggaagctggagttcattctggtcatcaagctcgaaaatggaatcctaagatggcaccttatatttttgcagaacgtaaaggtattcatattataaatcttactcgaactgctcgtttttcatcagaagcttgtgattcagtagctaatgtagcgagtgaagggaaacaattttcaatggtcggtacaaagtatcaagcagctgatttaacagcatcggctgctattaaagcccgatgtcactatgtaaataagaaatggcttggaggtatgttaaccaattggtctactatggagaagcgcctccaaaaacttagagatttggagaacaaagaaaagacaggaggattcgatagacttccagaaaaagaagcagctatttcgaaaggacaattagctaaacttaaaaagtatctaggtggaattgaatatatggcaagtttacccgatgttgtaacaattgttgatcaacgagaagaatctattgctattaaagaatgtataactttaaatattccaactatttgcttagtagatacagattgtgatccggatcttgcagatattccaattccagctaatgatgatgctagagcctcaattcgatggatttcagacaaattggcgtcagcaatttgtgaaggtcgtaaaagttatatgaaagattaa

SEQ ID NO: 30569 - protein, 235 aa, Huperzia lucidula
MEPKYWNINLEEMMEAGVHSGHQARKWNPKMAPYIFAERKGIHIINLTRTARFSSEACDSVANVASEGKQFSMVGTKYQAADLTASAAIKARCHYVNKKWLGGMLTNWSTMEKRLQKLRDLENKEKTGGFDRLPEKEAAISKGQLAKLKKYLGGIEYMASLPDVVTIVDQREESIAIKECITLNIPTICLVDTDCDPDLADIPIPANDDARASIRWISDKLASAICEGRKSYMKD

SEQ ID NO: 30570 - DNA, 744 bp, Pseudomonas syringae pv. syringae B728a
  CDS (1)..(744): transl_table=11
atgtcccaagtcaatatgcgcgatatgctgaaggctggttgccacttcggtcaccagacccgttactggaatccgaaaatgggtaaatacattttcggcgcgcgtaacaagattcacatcatcaaccttgaaaaaaccctgcctatgttcaacgaagcgctgactttcgttgagcgcctggcttcgggcaaaaacaagattctgttcgtcggcaccaagcgttccgctggcaagatcgttgctgaagaagcagcacgttgcggttcgccgtacgtcgaccatcgctggttgggcggcatgctgaccaacttcaagaccatccgtcagtcgatcaagcgtctgcgcgagctggaagtacaggctgaagacggtactttcgccaagctgaccaagaaagaagccctgatgcgtacccgtgatctggaaaaactggatcgcagcctgggtggtatcaaggacatgggcggtctgccggacgctctgttcgttatcgacgttgatcacgagcgcatcgcgatcaccgaagccaacaagctgggcatcccggttatcggcgtcgtcgataccaacagcagcccggaaggcgttgactacatcatccctggcaacgatgacgcaatccgcgccatccagctgtacatgggttcgatggctgatgctgttatccgtggtcgtaacaatgttgctggcggcaccgacgtcttcgtcgaagaagctccagctgcagctgctgtagaaggctga

SEQ ID NO: 30571 - protein, 247 aa, Pseudomonas syringae pv. syringae B728a
MSQVNMRDMLKAGCHFGHQTRYWNPKMGKYIFGARNKIHIINLEKTLPMFNEALTFVERLASGKNKILFVGTKRSAGKIVAEEAARCGSPYVDHRWLGGMLTNFKTIRQSIKRLRELEVQAEDGTFAKLTKKEALMRTRDLEKLDRSLGGIKDMGGLPDALFVIDVDHERIAITEANKLGIPVIGVVDTNSSPEGVDYIIPGNDDAIRAIQLYMGSMADAVIRGRNNVAGGTDVFVEEAPAAAAVEG

SEQ ID NO: 30572 - DNA, 711 bp, Cucumis sativus
  CDS (1)..(711): transl_table=11
atgacaagaagatattggaacatccatttggaagagatgatggaagcaggagttcattttggtcatggtactaggaaatggaatcctagaatggcaccttatatctctgcaaaacgtaaaggtattcatattataaatcttactagaactgctcgttttttatcagaagcttgtgatttagtttttgatgcagcaactaggggcaaacaattcttaattgttggtaccaaaaataaagcagcggattcagtagcccgggctgcaacaaggactcggtgtcattatgttaataaaaaatggctcggggggatgttaacaaattggtctactacagaaacgagacttcataagttcagggacttgagaacggaacaaaagacggggggactcaaccgtcttccgaaaagggatgccgctatgttcaagagacaattatctcacttgcaaacatatctgggcgggattaaatatatgacggggttacccgatattgtaataatcgttgatcaacaagaagaatatcgggctcttcaagaatgtatcacgttgggaattccaactatttgtttaattgatacaaattgtgaccccgatctcgccgatatttcgattccagcgaatgatgatgctatagcttcaatccgattaattcttaacaaattagtatttgctatttcggagggtcgttctagctctatacgaaattcttga

SEQ ID NO: 30573 - protein, 236 aa, Cucumis sativus
MTRRYWNIHLEEMMEAGVHFGHGTRKWNPRMAPYISAKRKGIHIINLTRTARFLSEACDLVFDAATRGKQFLIVGTKNKAADSVARAATRTRCHYVNKKWLGGMLTNWSTTETRLHKFRDLRTEQKTGGLNRLPKRDAAMFKRQLSHLQTYLGGIKYMTGLPDIVIIVDQQEEYRALQECITLGIPTICLIDTNCDPDLADISIPANDDAIASIRLILNKLVFAISEGRSSSIRNS

SEQ ID NO: 30574 - DNA, 738 bp, Pseudomonas fluorescens Pf-5
  CDS (1)..(738): transl_table=11
atgtcccaagtcaacatgcgcgatatgctgaaggccggtgtgcacttcggtcaccaaacccgttactggaatccgaaaatgggcaagtacattttcggcgcgcgcaacaagatccacatcatcaaccttgaaaaaaccctgccaatgttcaacgaagctctgactttcgtagaacgtctggcccagggcaaaaacaagattctgttcgtcggcaccaagcgttccgctggcaagatcgttgctgaagaagcagcacgttgcggttcgccgtacgtcgatcaccgctggttgggcggcatgctgaccaactacaaaaccatccgtgcttccatcaagcgtctgcgtgaccttgaagtgcaagcagaagacggcaccttcgccaagctgaccaagaaagaggcgctgatgcgcactcgcgatctggaaaagctggatcgttccctgggtggtatcaaggacatgggcggcctgcctgacgcactgttcgtgatcgacgttgaccacgagcgcatcgcgatcaccgaagccaacaagctgggcatcccggtcatcggcgttgtcgataccaacagcagcccggaaggcgttgactacatcatcccaggcaacgatgacgccattcgcgccatccagctgtacatgggttcgatggctgacgctgtgatccgtggtcgcaacaacgttgctggcggcaccgaagtgttcgaagaagctgcagcaccggcggctgaagcctga

SEQ ID NO: 30575 - protein, 245 aa, Pseudomonas fluorescens Pf-5
MSQVNMRDMLKAGVHFGHQTRYWNPKMGKYIFGARNKIHIINLEKTLPMFNEALTFVERLAQGKNKILFVGTKRSAGKIVAEEAARCGSPYVDHRWLGGMLTNYKTIRASIKRLRDLEVQAEDGTFAKLTKKEALMRTRDLEKLDRSLGGIKDMGGLPDALFVIDVDHERIAITEANKLGIPVIGVVDTNSSPEGVDYIIPGNDDAIRAIQLYMGSMADAVIRGRNNVAGGTEVFEEAAAPAAEA

SEQ ID NO: 30576 - DNA, 795 bp, Psychrobacter arcticus 273-4
  CDS (1)..(795): transl_table=11
atggctacaaagaatccaaccaaaattgaaatgcgcgacctactacaagccggcgctcactttggtcaccaaacacgtttttggaatccaaaaatgggtccatatatctttggcgcccgtaacaagattcacatcattaacctagagcacacggtaaaagcgtttaacgaagcattgacttacgttaacggcttagcagctaagaaaaacaaagtattatttgttggtactaaacgcgcagcaagtggtgttatcgctgagcaagcagcacgcgctggtatgccatacgttgaccatcgctggttaggtggtatgttgactaactggaaaacactacgccagtcaatcaatcgtctaaaagagcttgagaagcaagctgaagacggtacatttgctaagctaaccaaacgtgaagcgttagagcgtactcgcgatatggaaaaacttgagcgttcattgggcggtatcaaagacatgggcggtctacctgacgcaatcttcgttgtagacgtagatcatgaagcaatcgctatcaaagaagctaaaaacctaggtatcccagttatcggtatcgttgatactaactctaacccagataacgttgattacatcatcccagcaaacgatgatgctatccgtgccgtgactttgtacgtaacttctatggctgatgcaatcatcgctggtaaagaatacgcacaaactcaagctggtggtaaagctgagcaagaagcacctgctactgaagaagcggctgatgctcaaactgaagaagctgctactccagcagaataa

SEQ ID NO: 30577 - protein, 264 aa, Psychrobacter arcticus 273-4
MATKNPTKIEMRDLLQAGAHFGHQTRFWNPKMGPYIFGARNKIHIINLEHTVKAFNEALTYVNGLAAKKNKVLFVGTKRAASGVIAEQAARAGMPYVDHRWLGGMLTNWKTLRQSINRLKELEKQAEDGTFAKLTKREALERTRDMEKLERSLGGIKDMGGLPDAIFVVDVDHEAIAIKEAKNLGIPVIGIVDTNSNPDNVDYIIPANDDAIRAVTLYVTSMADAIIAGKEYAQTQAGGKAEQEAPATEEAADAQTEEAATPAE

SEQ ID NO: 30578 - DNA, 729 bp, Colwellia psychrerythraea 34H
  CDS (1)..(729): transl_table=11
atgtcaaacgtttcaatgcgcgatatgcttaaagcaggtgttcacttcggtcacaaaactcgttactggaatcctaaaatgaagcaattcatttttggtgctcgcgataaagttcatatcattaaccttgaacaaacagttcctatgttcaatgaagcacttgcttttgtaaacaatgtttcatcgaaaaaaggtaaagtattatttgttggtactaaacgtgctgcaagtgatgcaatcaaagatgctgctattaagtctgaccaattctacgttaaccaccgctggttaggtggtatgttgactaactggaaaacagttcgtcaatctatcaaacgtttaaaagatttagaatctcaaagcactgacggtactttcgaagcgttaactaagaaagaagcgttaatgcgtactcgtgaaatggaaaagcttgataaaagcttaggtggtatcaaaaacatgggtggtttacctgacgttttatttatcattgatgctgatcacgagcacattgctattaaagaagcaaacaaccttggtatcccagtaatttctgttgttgatactaactcaaaccctgatggcgttgattacgttgttccaggtaacgatgatgcaattcgtgctgtcactttatattgtgatgctgttgctaactctgtgcttagcggccgtgagcaaaacatcgtagtacaagctgaaaaagacggttttgttgaagctgaataa

SEQ ID NO: 30579 - protein, 242 aa, Colwellia psychrerythraea 34H
MSNVSMRDMLKAGVHFGHKTRYWNPKMKQFIFGARDKVHIINLEQTVPMFNEALAFVNNVSSKKGKVLFVGTKRAASDAIKDAAIKSDQFYVNHRWLGGMLTNWKTVRQSIKRLKDLESQSTDGTFEALTKKEALMRTREMEKLDKSLGGIKNMGGLPDVLFIIDADHEHIAIKEANNLGIPVISVVDTNSNPDGVDYVVPGNDDAIRAVTLYCDAVANSVLSGREQNIVVQAEKDGFVEAE

SEQ ID NO: 30580 - DNA, 744 bp, Pseudomonas syringae pv. phaseolicola 1448A
  CDS (1)..(744): transl_table=11
atgtcccaagtcaatatgcgcgatatgctgaaggccggtgtgcacttcggtcaccaaacccgttactggaacccgaaaatgggtaagtacattttcggcgcgcgtaacaagattcacatcatcaaccttgaaaaaaccctgcctatgttcaacgaagctctgactttcgttgagcgcctggcttcgggcaaaaacaagattctgttcgtcggcaccaagcgttccgctggcaaaatcgttgctgaagaagcagcacgttgcggttcgccgtacgtcgaccatcgctggttgggtggcatgctgaccaacttcaagaccatccgtcagtcgatcaaacgtctgcgcgagctggaagtacagtccgaagacggtactttcgccaagctgaccaagaaagaagccctgatgcgcacccgtgatctggaaaaactggatcgcagcctgggtggtatcaaggacatgggcggtctgccagacgcactgttcgttatcgacgttgatcacgagcgcatcgcgatcaccgaagccaacaagctgggtatcccggttatcggcgttgtcgataccaacagcagcccggaaggcgttgactacatcatcccgggcaacgatgacgccattcgcgccatccagctgtacatgggttcgatggctgacgctgttatccgtggtcgtaacaatgttgctggcggcaccgacgtattcgtcgaagaagctccagctgcagctgctgtagaaggctga

SEQ ID NO: 30581 - protein, 247 aa, Pseudomonas syringae pv. phaseolicola 1448A
MSQVNMRDMLKAGVHFGHQTRYWNPKMGKYIFGARNKIHIINLEKTLPMFNEALTFVERLASGKNKILFVGTKRSAGKIVAEEAARCGSPYVDHRWLGGMLTNFKTIRQSIKRLRELEVQSEDGTFAKLTKKEALMRTRDLEKLDRSLGGIKDMGGLPDALFVIDVDHERIAITEANKLGIPVIGVVDTNSSPEGVDYIIPGNDDAIRAIQLYMGSMADAVIRGRNNVAGGTDVFVEEAPAAAAVEG

SEQ ID NO: 30582 - DNA, 747 bp, Dechloromonas aromatica RCB
  CDS (1)..(747): transl_table=11
atgtccgttaccatgcgcgaaatgctggaggctggtgtccacttcggtcaccagacccgtttctggtcccccaagatggccccgtacatcttcggtgcacgcaacaagattcacatcgtcaatctcgaaaagaccctggctaagtacaacgaagctatggcgttcgtgaagaagctggcttccagccgcggcaccatcctgtttgtcggtaccaagcgtcaggctcgcgaaatcatcggcgaagaagcgctgcgtgccggtgctccgtttgtcgatcagcgttggctgggtggcatgctgaccaacttcaagacggtcaagacctcgatcaagcgcctgaaagacatggaagtggctgttgaggctggcgagctggaaaaaatgccgaagaaggaagcgctgaccttccgtcgcgaactggaaaagctgcagaagtccatcggcggcatcaaggaaatggccggtctgccggatgctatcttcgtcatcgacgttggttaccacaagatcgccatcaccgaagccgaaaagctcggtatcccggttatcggtgtggtcgataccaaccactctccggacggtgttgcttacgtcattccgggtaatgatgactcttcccgtgccattcagttgtatgcccgtggtgtcgctgatgccatcctcgaaggtcgcagccaggtggttcaggatatcgtggccgctggcggcgacgacgaattcgtcgaagtccaggacgctgcacagtaa

SEQ ID NO: 30583 - protein, 248 aa, Dechloromonas aromatica RCB
MSVTMREMLEAGVHFGHQTRFWSPKMAPYIFGARNKIHIVNLEKTLAKYNEAMAFVKKLASSRGTILFVGTKRQAREIIGEEALRAGAPFVDQRWLGGMLTNFKTVKTSIKRLKDMEVAVEAGELEKMPKKEALTFRRELEKLQKSIGGIKEMAGLPDAIFVIDVGYHKIAITEAEKLGIPVIGVVDTNHSPDGVAYVIPGNDDSSRAIQLYARGVADAILEGRSQVVQDIVAAGGDDEFVEVQDAAQ

SEQ ID NO: 30584 - DNA, 879 bp, Thermobifida fusca YX
  CDS (1)..(879): transl_table=11
atggccacagtggtgaccattcgccagttgctggagagcggcgttcacttcgggcaccagacccggcgctggaacccgaagatgaagcgcttcatcttcactgagcgcaacggcatctacatcatcgacctgcagaagtcgctgtcctacatcgaccgcgcctacgagtttgtcaaggagacggtcgcgcacggcggcaccatcctgttcgtcggtaccaagaagcaggctcaggaagccatctacgagcaggcgcgccgcgtcggcatgccgtatgtgaaccagcgctggctgggcggcatgctcaccaacttctccaccgtgcacaagcgcctgcagcgcctcaaggagctggaggagatcgacttcgacgacgtcgcttcctccggcctgacgaagaaggagctcctcgggctgcgccgggagaaggagaagctggagcgcaccctgggcggtatccgcgacatgaaccgcgtgccgagcgcggtgtggatcgtggacaccaagaaggagcacatcgcgatcagcgaggcccgcaagctcaacatcccggtggtggcgatcctcgacaccaactgcgacccggacgaggtcgactacccgattccgggcaacgacgacgcgatccgcagcgtcagcctgctgacccgcgtggtcgcggacgctgtcgccgagggtctgatgatccgctccggcggtgccccgggttcggagaagggcgctggggagccgctggccgagtgggaacgcgagctcctggaaggcaagaccgaggctgcgggcgaggaagcgactcccgccgctgaggctccggctaaggaagagaaggcccaggccccggaggaaaaaaaagaagccgggagcggcgaggaagcctag

SEQ ID NO: 30585 - protein, 292 aa, Thermobifida fusca YX
MATVVTIRQLLESGVHFGHQTRRWNPKMKRFIFTERNGIYIIDLQKSLSYIDRAYEFVKETVAHGGTILFVGTKKQAQEAIYEQARRVGMPYVNQRWLGGMLTNFSTVHKRLQRLKELEEIDFDDVASSGLTKKELLGLRREKEKLERTLGGIRDMNRVPSAVWIVDTKKEHIAISEARKLNIPVVAILDTNCDPDEVDYPIPGNDDAIRSVSLLTRVVADAVAEGLMIRSGGAPGSEKGAGEPLAEWERELLEGKTEAAGEEATPAAEAPAKEEKAQAPEEKKEAGSGEEA

SEQ ID NO: 30586 - DNA, 744 bp, Ralstonia eutropha JMP134
  CDS (1)..(744): transl_table=11
atgtccgttaccatgcgcgaaatgctggaagccggttgccacttcggccaccagacccgcttctggaacccgaagatggcccccttcatcttcggccatcgcaacaagatccacatcatcaacctcgaaaagacgttgccgatgttccaggacgcactgaagtacgtgcgtcagctggcagccaatcgcggcaccatcatgttcgtgggtaccaagcgccagtcgcgcgaaatcctggctgaagaagccggccgcgcaggcatgccctacgtcgacgcccgctggctcggtggcatgctgaccaacttcaagacggtcaagacctcgatcaagcgcctgaaggacatggaagccgccaaggaagccggcgcgctggacaccatgagcaagaaggaagcgctgatgttcgagcgcgagatgatcaagctggaaaagtcgatcggcggcatcaaggaaatgggcggcattcctgacgccatcttcgtggtggacgtcggctaccacaagatcgccgtgaccgaagccaacaagctgggcatccccgtaatcggtgtggttgataccaaccactcgccggaaggcatcgattacgtgatcccgggcaacgacgactcgtccaaggctgtggccctgtacgtgcgcggcgtggctgacgcgatcctggaaggccgtgcgaacgccgtgcaggaagtcgttgaagccgcccgcggcggtgacgatttcgtcgaagtgcaagaaggctga

SEQ ID NO: 30587 - protein, 247 aa, Ralstonia eutropha JMP134
MSVTMREMLEAGCHFGHQTRFWNPKMAPFIFGHRNKIHIINLEKTLPMFQDALKYVRQLAANRGTIMFVGTKRQSREILAEEAGRAGMPYVDARWLGGMLTNFKTVKTSIKRLKDMEAAKEAGALDTMSKKEALMFEREMIKLEKSIGGIKEMGGIPDAIFVVDVGYHKIAVTEANKLGIPVIGVVDTNHSPEGIDYVIPGNDDSSKAVALYVRGVADAILEGRANAVQEVVEAARGGDDFVEVQEG

SEQ ID NO: 30588 - DNA, 747 bp, Thiobacillus denitrificans ATCC 25259
  CDS (1)..(747): transl_table=11
atgtctgtcaccatgcgccaaatgctggaggccggtgtccatttcggtcaccagacccgcttctggaacccccggatggccccgttcattttcggccatcgcaacaagatccatatcgtcaacctggaaaaatcgctgccgatgttccaggaggcgcaaaaattcgtgcgtcagctctcggccaacaagggcaacgtgctgttcgtcggcaccaagcgcgccgcgcgcgacatcgtgcgtgaggaagcgcagcgcgccggcatgccctacgtcgaccagcgctggctcggcggcatgctgaccaacttcaagaccgtcaagcagtcgatcaagcgcctgaacgacctcgaggcgcagatcgccgagccgggccgcctgtcgaagaaggaaatcctcacggtccagcgcgaagtcgacaagctcaaccgcagcctcggcggcatccgcgaaatgggcgggctgcccgacgcgctcttcatcatcgacgtcggctaccagaagggagccgtggtcgaggccaagaagctcggcatcccggtgatcggcgtcgtcgacaccaataacagccccgaaggcgtcgactacgtgatccccggcaacgacgactcggcccgcgcgatccgtctctacgcccgcggcatggccgacgcggcgctcgaaggccgcgcccaggtgatcagcgagatcgtcggcggcgaggaattcgtcgaggtcgaggaagaagagggtggtgtcgccgccgagtaa

SEQ ID NO: 30589 - protein, 248 aa, Thiobacillus denitrificans ATCC 25259
MSVTMRQMLEAGVHFGHQTRFWNPRMAPFIFGHRNKIHIVNLEKSLPMFQEAQKFVRQLSANKGNVLFVGTKRAARDIVREEAQRAGMPYVDQRWLGGMLTNFKTVKQSIKRLNDLEAQIAEPGRLSKKEILTVQREVDKLNRSLGGIREMGGLPDALFIIDVGYQKGAVVEAKKLGIPVIGVVDTNNSPEGVDYVIPGNDDSARAIRLYARGMADAALEGRAQVISEIVGGEEFVEVEEEEGGVAAE

SEQ ID NO: 30590 - DNA, 711 bp, Acorus calamus
  CDS (1)..(711): transl_table=11
atgacaaaaagatattggaacatcaatttggaagagatgatggaagcaggagtgcatttcggtcacggtactaggaaatggaatcctagaatggcaccttacatttctgcaaagcgtaaaggtattcatattacaaatcttactagaactgctcgttttttatcagaagcctgtgatttactttttgatgcagcaagtgggggaaaacacttcttaatcgttggtaccaaaaagaaagcagctgattcagtagcatcggctgcaataagggctcggtgtcattatgttaataaaaaatggcttggtggtatgtcaacgaattggtccactacagaaacgagacttcaaaattttagggacttaagagcagaacaaaaggctgggaaaatcgaccgtctcccgaaaagggatgcagcaatgttgaagagacaattatctaccttgcaaacatatctgggtgggatcaaatatatgacgggtttacctgatattgtaatcatcgttgatcagcaagaagactatacggctcttcgagaatgtgtcattttaggaattccgactatttgtttaatcgatacaaattctgacccggatctcgcagacatttcgattcccgccaacgatgacgctatagcttcaatccgattgattcttaacaaattagtattcgcaatttgcgagggtcgttctagctatataagaaatcgttaa

SEQ ID NO: 30591 - protein, 236 aa, Acorus calamus
MTKRYWNINLEEMMEAGVHFGHGTRKWNPRMAPYISAKRKGIHITNLTRTARFLSEACDLLFDAASGGKHFLIVGTKKKAADSVASAAIRARCHYVNKKWLGGMSTNWSTTETRLQNFRDLRAEQKAGKIDRLPKRDAAMLKRQLSTLQTYLGGIKYMTGLPDIVIIVDQQEDYTALRECVILGIPTICLIDTNSDPDLADISIPANDDAIASIRLILNKLVFAICEGRSSYIRNR

SEQ ID NO: 30592 - DNA, 771 bp, Streptococcus agalactiae A909
  CDS (1)..(771): transl_table=11
atggcagtaatttcaatgaaacaacttcttgaggctggtgttcactttggtcaccaaactcgtcgctggaaccctaagatggctaagtacatcttcacagaacgtaatggtatccacgttatcgaccttcaacaaactgtaaaattagctgaccaagcttacgaatttgttcgtgatgctgcagcaaacgatgcagttatcttgtttgttggtactaagaaacaagcagctgaagctgttgctgaagaagctaaacgtgctggtcaatacttcattaaccaccgttggttaggtggaactcttactaactggggaactatccaaaaacgtattgctcgtttgaaagaaatcaaacgtatggaagaagaaggaacttttgaacttcttcctaagaaagaagttgcattgttaaacaaacaacgtgcacgtcttgaaaaattcttgggtggtatcgaagatatgccacgcatcccagatgtaatgtatgttgttgacccacataaagagcaaatcgctgttaaagaagctaaaaagcttggtattccagttgtagctatggttgacactaacgctgatccagatgatatcgatgttatcatcccagcaaacgatgacgctattcgcgccgttaaattaattacttctaaattagctgatgcagttattgaaggtcgtcaaggtgaagatgctgacgttgacttcgctcaagaagcacaagcagattcaattgaagaaatcgttgaagtagttgaaggatcaaaaaacgactaa

SEQ ID NO: 30593 - protein, 256 aa, Streptococcus agalactiae A909
MAVISMKQLLEAGVHFGHQTRRWNPKMAKYIFTERNGIHVIDLQQTVKLADQAYEFVRDAAANDAVILFVGTKKQAAEAVAEEAKRAGQYFINHRWLGGTLTNWGTIQKRIARLKEIKRMEEEGTFELLPKKEVALLNKQRARLEKFLGGIEDMPRIPDVMYVVDPHKEQIAVKEAKKLGIPVVAMVDTNADPDDIDVIIPANDDAIRAVKLITSKLADAVIEGRQGEDADVDFAQEAQADSIEEIVEVVEGSKND

SEQ ID NO: 30594 - DNA, 738 bp, Pseudomonas fluorescens PfO-1
  CDS (1)..(738): transl_table=11
atgtcccaagtcaacatgcgcgatatgctgaaggccggtgtgcacttcggtcaccaaacccgttactggaatccgaaaatgggcaagtacattttcggcgcgcgtaacaagattcacatcatcaaccttgaaaaaaccctgccaatgttcaacgaagctctgactttcgtagagcgtctggcccagggcaaaaacaagattctgttcgtcggcaccaagcgttccgctggcaagatcgttgctgaagaagcagcacgttgcggttcgccgtacgtcgatcaccgctggttgggcggcatgctgaccaacttcaagaccatccgtgcttccatcaagcgtctgcgtgaccttgaagtacaagccgaagacggtactttcgccaagctgaccaagaaagaagcgctgatgcgcactcgcgatcttgagaagctggatcgctccctgggcggcatcaaggacatgggcggtctgccagacgcactgttcgtgatcgacgttgaccacgagcgcatcgcgatcaccgaagccaacaagctgggcatcccggtcatcggcgttgtcgataccaacagcagcccggaaggcgttgactacatcatcccaggcaacgatgacgcaatccgcgctatccagctgtacatgggttcgatggctgacgcagtgatccgcggtcgcaacaacgttgctggcggtactgtagaattcgcagctgaagaaactcaggctgcagctgagtaa

SEQ ID NO: 30595 - protein, 245 aa, Pseudomonas fluorescens PfO-1
MSQVNMRDMLKAGVHFGHQTRYWNPKMGKYIFGARNKIHIINLEKTLPMFNEALTFVERLAQGKNKILFVGTKRSAGKIVAEEAARCGSPYVDHRWLGGMLTNFKTIRASIKRLRDLEVQAEDGTFAKLTKKEALMRTRDLEKLDRSLGGIKDMGGLPDALFVIDVDHERIAITEANKLGIPVIGVVDTNSSPEGVDYIIPGNDDAIRAIQLYMGSMADAVIRGRNNVAGGTVEFAAEETQAAAE

SEQ ID NO: 30596 - DNA, 762 bp, Rhodobacter sphaeroides 2.4.1
  CDS (1)..(762): transl_table=11
atggacatggcgctccccgagttttccatgcgtcagctgcttgaagctggcgttcactacggccaccagaccgctcgctggaacccgaagatggcggagttcatctacggcgaccgcaacggcatccatatcgtcgacctgacgcagacggtcccgatgctggaccaggcgctcaaggtcgtgcgcgacaccgtggccaagggcggccgcatcctcttcgtcggcaccaagcgtcaggcccagaagccgatcgccgaagccgccgagaaatgcgcgcagcactacatgaaccaccgctggctgggcggcacgctcaccaactggaagaccgtctcgcagtcgatccagcgcctgaagcagctcgacgaggttctggccaccggcgccgagggcctgaccaagaaagagcggctgaacatggagcgcgagcagcagaagctgcaggcctcgctcggcggcatccgcgagatgggcggcaccccggacctgctcttcatcatcgacgtgggcaaggaagacctcgccatcgccgaagcgcagaagctgggcatcccggtcgtggccgtggtcgataccaacaactcgcccaagggcgtggactatgtgatcccgggcaacgacgacgcggcccgtgccatcgcgctctactgtgacctcgtgtcgcgggcggcgctcgacggcatgagcgcccagatgggtgctgccggcatcgacctcggcgcgctcgacgtggcccccgaggaagagacgctcgaggcctga

SEQ ID NO: 30597 - protein, 253 aa, Rhodobacter sphaeroides 2.4.1
MDMALPEFSMRQLLEAGVHYGHQTARWNPKMAEFIYGDRNGIHIVDLTQTVPMLDQALKVVRDTVAKGGRILFVGTKRQAQKPIAEAAEKCAQHYMNHRWLGGTLTNWKTVSQSIQRLKQLDEVLATGAEGLTKKERLNMEREQQKLQASLGGIREMGGTPDLLFIIDVGKEDLAIAEAQKLGIPVVAVVDTNNSPKGVDYVIPGNDDAARAIALYCDLVSRAALDGMSAQMGAAGIDLGALDVAPEEETLEA

SEQ ID NO: 30598 - DNA, 699 bp, Carboxydothermus hydrogenoformans Z-2901
  CDS (1)..(699): transl_table=11
atggctgtaatttccatgaagcaacttttagaagcgggggttcattttggtcatcaaacccggcgctggaaccccaaaatggcggagtatatctttaccgaccggaacgggatttacatcattgacctgcagaaaaccgccaaaaaattagaggaagcttatagttttgttagagaattgtcggcacagggtggtacgattttatttgttggaacgaaaaagcaagctcaggatgccattaaggaagaagcggaacgttgcggaatgttttacgtaaatcagcggtggctgggaggtacccttaccaactttaaaaccatcagaaaacgggtagaaaggcttattgaaattgaaaaaatggagcaagaaggtgcgctgtcggtacttccgaaaaaagaggtagcaaaaattttaaaggaaaaggaaaaattaagccgctttttgtccggtatcaaggaaatgaaaaagttacccgatgcgctgtttgtggttgaccctcggaaggaaaaaattgccgtggcggaagcccggaaactggatattcctgtagttgctatcgtggatacaaactgcgatcccgatgaggtggattacgtaattcccggtaacgacgatgctatccgggcggtaaagttaattacttccaaaattgctgatgcggtaattgaaggccgtcaaggcgagcaatatgcggaataa

SEQ ID NO: 30599 - protein, 232 aa, Carboxydothermus hydrogenoformans Z-2901
MAVISMKQLLEAGVHFGHQTRRWNPKMAEYIFTDRNGIYIIDLQKTAKKLEEAYSFVRELSAQGGTILFVGTKKQAQDAIKEEAERCGMFYVNQRWLGGTLTNFKTIRKRVERLIEIEKMEQEGALSVLPKKEVAKILKEKEKLSRFLSGIKEMKKLPDALFVVDPRKEKIAVAEARKLDIPVVAIVDTNCDPDEVDYVIPGNDDAIRAVKLITSKIADAVIEGRQGEQYAE

SEQ ID NO: 30600 - DNA, 741 bp, Burkholderia sp. 383
  CDS (1)..(741): transl_table=11
atggcagttacgatgcgccaaatgctggaagcgggtgtccacttcggtcaccagacgcgcttctggaacccgaagatggctccgttcattttcggtcaccgcaacaagattcacatcatcaacctcgaaaagacgctgccgatgttcacggacgcacagaagtacgtgcgccagctggcagcaaaccgcggcacgatcctgttcgtcggcacgaagcgtcaatcgcgtgacacgatcgcccaggaagcgcagcgcgcaggcatgccgtacgtcaacgcacgctggctcggcggcatgatgaccaacttcaagacgctgaaggtttcgatcaagcgcctgaaggacatggaagcggccgtcgaatcgggtgaaaccgagaagatgagcaagaaggaagcgctgctgttcgaacgcgaaatcgccaagctgcagaagtcgatcggtggcgtgaaggacatgggcggcattccggacgcaatcttcgtcgtcgacgtcggctaccacaagatcgccgtgaccgaagcgaacaagctgggcgtgccggtcatcgccgtggtcgatacgaaccactcgccggaaggtgtggattacgtgatcccgggtaacgacgactcgagcaaggcagtcgcgctgtacgctgaaggcgtggccgacgcaatcctcgaaggccgtgcgaacgcggtcaacgaagtggtccaggccgcacgcggcgacgacgagtacgtcgaggaaaacgcgtaa

SEQ ID NO: 30601 - protein, 246 aa, Burkholderia sp. 383
MAVTMRQMLEAGVHFGHQTRFWNPKMAPFIFGHRNKIHIINLEKTLPMFTDAQKYVRQLAANRGTILFVGTKRQSRDTIAQEAQRAGMPYVNARWLGGMMTNFKTLKVSIKRLKDMEAAVESGETEKMSKKEALLFEREIAKLQKSIGGVKDMGGIPDAIFVVDVGYHKIAVTEANKLGVPVIAVVDTNHSPEGVDYVIPGNDDSSKAVALYAEGVADAILEGRANAVNEVVQAARGDDEYVEENA

SEQ ID NO: 30602 - DNA, 756 bp, Geobacter metallireducens GS-15
  CDS (1)..(756): transl_table=11
atgtccagtgtaacaatgaaggagctgctggaggccggcgtacatttcggtcaccaaaccaagagatggaatccgaagatgaagccgtacattttcggggcgcggaacgggatttatatcatcgatctccagaagaccgtccgcctgttcaaaaatgcttacagctttgttcgcgagtgtgcccagtccggtgagacgatactctttgtcgggaccaagaagcaggcccaggacgccattggtgaggaagcgtcgcgttgcaatatgtattatgttaaccaacgctggcttggcgggatgcttaccaacttcgccaccgtgaagcagagcattgatcgcctcaagcgtcttgatgccatgtttgccgatggtaccgttgaagcctacaccaagaaggaagccctccagttggaaaaagagcgccagaagctcgaaaagaccctcggcggtatcaaggggatgggaaaggttcccggtgcgcttttcgtgattgacccgaagaacgaaacgattgccatcaacgaagccaaaaagctcggcattcctgtcgtggcggttgttgataccaactgcgatccggatccgatcgattatgtcattcccggaaacgatgatgcaattcgcgccattcgtcttctgacctctaagatggccgatgcggttctcgaaggtgcccaggcccgggatgcgcagttgcagaccggggaagaagagatggctgctgccgaaggtgagtcggagcaggtagaagcgtaa

SEQ ID NO: 30603 - protein, 251 aa, Geobacter metallireducens GS-15
MSSVTMKELLEAGVHFGHQTKRWNPKMKPYIFGARNGIYIIDLQKTVRLFKNAYSFVRECAQSGETILFVGTKKQAQDAIGEEASRCNMYYVNQRWLGGMLTNFATVKQSIDRLKRLDAMFADGTVEAYTKKEALQLEKERQKLEKTLGGIKGMGKVPGALFVIDPKNETIAINEAKKLGIPVVAVVDTNCDPDPIDYVIPGNDDAIRAIRLLTSKMADAVLEGAQARDAQLQTGEEEMAAAEGESEQVEA

SEQ ID NO: 30604 - DNA, 783 bp, Desulfovibrio desulfuricans G20
  CDS (1)..(783): transl_table=11
atggcttacgtaactatgaaaggaatgctggaaaccggcgttcacttcggtcaccagacccgccgctggaaccccaagatgggtacctacatcttcggcgcccgtaacggcatccacatcatcgacctgcagcagaccgtaaagctgttccgcacggcccatgacaaagtggtcgacaccgttgcacgcggcggcaaggttatcttcatcggcaccaagcgtcaggctcaggaagctgtgcagaccgaagccggacgcgccggtcagtactacgtgaccaaccgctggatgggcggcaccctgaccaacttccagactatccgcaagagcatcgaccgcctgaaaaagctcgaagtcatgttcgaagacggcaccgtgaaccgctaccagaaaaaggaagtgcttcgcctgcgccgtgagatggacaagctgaatctggttctgggcggcatcaaagatatggaaaacctgccgcagctggctttcatcatcgaccccaaccgcgaagacatcgccgttaaggaatgccgccgcctcggtattccgatcgtggccgttaccgataccaactgcgatcccgacctgatcgactacgtcattcccggcaacgacgacgccatccgcgccatcaagctgtttgtcggccacattgccgatgcctgtcttgaaggcgaggccatgcgcaaggaaaccaaagccgagaacgctgaagaagccatgaagcaggctgccgaagctgaagccgaagctgctgctcccgctgccgaagaatccgccgaataa

SEQ ID NO: 30605 - protein, 260 aa, Desulfovibrio desulfuricans G20
MAYVTMKGMLETGVHFGHQTRRWNPKMGTYIFGARNGIHIIDLQQTVKLFRTAHDKVVDTVARGGKVIFIGTKRQAQEAVQTEAGRAGQYYVTNRWMGGTLTNFQTIRKSIDRLKKLEVMFEDGTVNRYQKKEVLRLRREMDKLNLVLGGIKDMENLPQLAFIIDPNREDIAVKECRRLGIPIVAVTDTNCDPDLIDYVIPGNDDAIRAIKLFVGHIADACLEGEAMRKETKAENAEEAMKQAAEAEAEAAAPAAEESAE

SEQ ID NO: 30606 - DNA, 711 bp, Lactuca sativa
  CDS (1)..(711): transl_table=11
atgacaagaagatattggaacattaatttagaagagatgatggaagcaggagttcattttggccatggtactaggaaatggaatcctaaaatggcaccttatatctctgcaaaacgtaaaggtattcatattacaaatcttactagaactgctcgttttttatcagaagcttgtgatttggtttttgatgcagcaagcagaggaaaacaattcttaattgttggcactaaaaataaagaagctgattcagtagcatgggctgcaataagggctcggtgtcattatgttaataaaaaatggctcggtggtatgttaacgaattggtccactacagaaacaagacttcataagtttagagacttgagaaccgaacaaaaaacaggggggctcgaccgtcttccgaaaagagatgcggctatgttgaaaagacaattatctcatttgcaaacatatctgggtgggattaaatatatgacagggttacccgatattgtaatcatcgttgatcagcacgaagaatatacggcccttcaagaatgtatcacgttgggaattccaacaatttgtttaatcgatacaaattgtgaccccgatctcgcagatatttcgattccagccaatgatgacgctatatcttcaatccgattaattcttaacaaattagtatttgcaatttgtgaaggccgttctggctatataagaaatccgtga

SEQ ID NO: 30607 - protein, 236 aa, Lactuca sativa
MTRRYWNINLEEMMEAGVHFGHGTRKWNPKMAPYISAKRKGIHITNLTRTARFLSEACDLVFDAASRGKQFLIVGTKNKEADSVAWAAIRARCHYVNKKWLGGMLTNWSTTETRLHKFRDLRTEQKTGGLDRLPKRDAAMLKRQLSHLQTYLGGIKYMTGLPDIVIIVDQHEEYTALQECITLGIPTICLIDTNCDPDLADISIPANDDAISSIRLILNKLVFAICEGRSGYIRNP

SEQ ID NO: 30608 - DNA, 711 bp, Nicotiana tomentosiformis
  CDS (1)..(711): transl_table=11
atgacaagaagatattggaacataaatttggaagagatgatggaggcaggagttcattttggtcatggtactaggaaatggaatcctaaaatggcgccttatatctctgcaaagcgtaagggtattcatattacaaatcttactagaactgctcgttttttatcagaagcttgtgatttagtttttgacgcagcaagtaggggaaaacaattcttaattgttggtaccaaaaataaagcagctgattcagtagagtgggctgcaataagggcccggtgtcattatgttaataaaaaatggcttggcggtatgttaacgaattggtccactaccgaaacaagacttcataagttcagggacttgagaatggaacaaaaaacagggagactcaaccgtctcccgaaaagagatgcagctatgttgaaaagacaattatctcgcttgcaaacatatctgggcgggattaaatatatgacaggggtacccgatattgtaatcatcgttgatcagcacgaagaatatacggccctgcgagagtgtattactttaggaattccaacaatttatttaaccgatacaaattgtgaccccgatctcgcagatatttcaattccagcgaatgatgacgccatatcctcaatccgattaattcttaacaaattagtattcgcaatttgtgagggtcgttctagctatataagaaatccttga

SEQ ID NO: 30609 - protein, 236 aa, Nicotiana tomentosiformis
MTRRYWNINLEEMMEAGVHFGHGTRKWNPKMAPYISAKRKGIHITNLTRTARFLSEACDLVFDAASRGKQFLIVGTKNKAADSVEWAAIRARCHYVNKKWLGGMLTNWSTTETRLHKFRDLRMEQKTGRLNRLPKRDAAMLKRQLSRLQTYLGGIKYMTGVPDIVIIVDQHEEYTALRECITLGIPTIYLTDTNCDPDLADISIPANDDAISSIRLILNKLVFAICEGRSSYIRNP

SEQ ID NO: 30610 - DNA, 789 bp, Rhodospirillum rubrum ATCC 11170
  CDS (1)..(789): transl_table=11
atggctctccccacattctccatgcgccagctcatcgaagcgggctgtcacttcggccacaacacccgtcgttggaacccgaagatggcgccctacctttatggtcagcgcgataacgttcacatcatcgatctgcagcagaccgtgccgatgctctatcgcgccatgcaggccgtgcgcgatgtcaccgccggcggcggtcgcgtgctgttcgtcggcaccaagcgtcaggcccaggatgtggtcgccgagcacgcccgtcgttgcggtcagtattatgtgaaccaccgttggcttggcggcatgctgaccaactggaagaccatttcccattcgatcaagcgtctgcgcgatctggaagagcgtttcggcggtggcgacctgttgggtctgaccaagaaggagcagctcaacctcggccgcgagaaggacaagctcgatatggctctgggcggcatcaaggaaatgggcggtctgcccgacatgctgttcatcatcgataccgtcaaggagagcctggcggtcaacgaagccaacaagctgggtctgccggtcgtcgccgtgatcgattcgaattccgatccgcgtggcatcacctatccgatccccggcaatgatgacgccattcgcgccatccagacctattgcgagctgatcagtggcgccgccatcgacggcatccaggctcagctcggcgccgccggcgtcgacgtcggtgccgccgagatcgtgccggccgagacccttgccgccgaagcccccgccgccgagcagcagccgaccgcctga

SEQ ID NO: 30611 - protein, 262 aa, Rhodospirillum rubrum ATCC 11170
MALPTFSMRQLIEAGCHFGHNTRRWNPKMAPYLYGQRDNVHIIDLQQTVPMLYRAMQAVRDVTAGGGRVLFVGTKRQAQDVVAEHARRCGQYYVNHRWLGGMLTNWKTISHSIKRLRDLEERFGGGDLLGLTKKEQLNLGREKDKLDMALGGIKEMGGLPDMLFIIDTVKESLAVNEANKLGLPVVAVIDSNSDPRGITYPIPGNDDAIRAIQTYCELISGAAIDGIQAQLGAAGVDVGAAEIVPAETLAAEAPAAEQQPTA

SEQ ID NO: 30612 - DNA, 717 bp, Moorella thermoacetica ATCC 39073
  CDS (1)..(717): transl_table=11
atggcaattatttccatgaaacagttgctggaggccggggttcacttcggtcaccagaccaggcgctggaaccccaaaatggctccatatatctttacggaacgtaacgggatctatatcattgatctccagcgcaccgtcaaaaagatcgaagaggcttacaacttcatccgtgatctctcccgggatggcggtaaggtcctattcgtagggacaaagaaacaggcccaggagtccgttaaggaagaagccgaacgctgtggtatgttctatgtcaatgtgcgctggctgggcgggacattgaccaacttccagaccatccgtcggcgtattgaacgcctaaaggaactggaaaggatggaagaagagggtacctttgatctcttgcccaagaaggaagtagcccacctgcgtggtgaaagggagaaacttgagcgcttcctgggcggtattaaagaaatgaaaagcttgcccgacgccctctttattatcgatccgcgaaaagagcggattgccgttgccgagggccggcgccttggtattcccattgtggccatagtggataccaactgtgatcccgacgaaatagattatgtaatccccggtaatgatgatgctatccgggctgtccgtctcttgaccagtaaaatggccgatgccgttattgaaggccagcaaggtcaggatcagccggaggaagaagcagtagtagaataa

SEQ ID NO: 30613 - protein, 238 aa, Moorella thermoacetica ATCC 39073
MAIISMKQLLEAGVHFGHQTRRWNPKMAPYIFTERNGIYIIDLQRTVKKIEEAYNFIRDLSRDGGKVLFVGTKKQAQESVKEEAERCGMFYVNVRWLGGTLTNFQTIRRRIERLKELERMEEEGTFDLLPKKEVAHLRGEREKLERFLGGIKEMKSLPDALFIIDPRKERIAVAEGRRLGIPIVAIVDTNCDPDEIDYVIPGNDDAIRAVRLLTSKMADAVIEGQQGQDQPEEEAVVE

SEQ ID NO: 30614 - DNA, 915 bp, Burkholderia thailandensis E264
  CDS (1)..(915): transl_table=11
atggcggcggcggaggcctcgggcgcgaagctttcgaatttctttcgaagatgcgcgccgaaatcgcgagccggcgcacccagggtgtcgcggcgcgaacggcaagggcggtgcccgccgtcgcgccatgatacggcagccggcttaagacccaaaccctcgtggagaatacaaatggcagtcacgatgcgccaaatgctggaagccggtgtccacttcggtcaccagacgcgcttctggaacccgaagatggcccccttcattttcggccaccgcaacaagattcacatcatcaacctcgaaaagacgctgccgatgttcaacgacgcacagaagtacgtgcgtcagctggcggcgaaccgcggcacgatcctcttcgtcggcacgaagcgccagtcgcgcgacacgatcgcccaggaagcgcagcgcgcgggcatgccgtacgttaatgcgcgctggctcggcggcatgatgaccaatttcaagacgctgaaggtgtcgatcaagcgcctgaaggacatggaagcggcggtcgaggcgggcgagctcgagaagatgagcaagaaggaagcgctgttgttcgagcgcgaaatcgccaagctgcagaagtcgatcggcggcgtgaaggacatgggcggcattccggacgcgatcttcgtcgtcgacgtcggctaccacaagattgccgtcaccgaggcgaacaagctgggcgtgcccgtcatcgcggtggtcgatacgaaccactcgccggaaggcgtggattacgtgatcccgggtaacgacgactcgagcaaggcagtcgcgctgtacgccgaaggcgttgccgacgcgatcctcgaaggccgcgcgaacgcggtcaacgaagtggtccaggcggtgcgcggcgacgacgaatacgtcgaggaaaacgcgtaa

SEQ ID NO: 30615 - protein, 304 aa, Burkholderia thailandensis E264
MAAAEASGAKLSNFFRRCAPKSRAGAPRVSRRERQGRCPPSRHDTAAGLRPKPSWRIQMAVTMRQMLEAGVHFGHQTRFWNPKMAPFIFGHRNKIHIINLEKTLPMFNDAQKYVRQLAANRGTILFVGTKRQSRDTIAQEAQRAGMPYVNARWLGGMMTNFKTLKVSIKRLKDMEAAVEAGELEKMSKKEALLFEREIAKLQKSIGGVKDMGGIPDAIFVVDVGYHKIAVTEANKLGVPVIAVVDTNHSPEGVDYVIPGNDDSSKAVALYAEGVADAILEGRANAVNEVVQAVRGDDEYVEENA

SEQ ID NO: 30616 - DNA, 870 bp, Frankia sp. CcI3
  CDS (1)..(870): transl_table=11
atggccgtcgtcaccatgaagcagctgctggagagcggtgtgcacttcgggcaccagaccaagcgctggaatccgaagatgaagcggtacatcttcaccgaacgtaacggcatttacatcatcgacctgcagcagacactgtcctacatcgaccgcgcctacgacttcgtcaaggagaccgtggcgcacggtgggacggtcctgttcatcgggacgaagaagcaggcccaggaggcaatcgaggaacacgcggcccgggtcggaatgccgtacgtcaaggagcggtggctcggtggcatgttgaccaacttctccacggtctacaagcgtcttcagcggctcaaggagctcgaggagatcgaggtgaccggtggtaccgaggtgcgcacgaagaaggagcagctcgtgctgacccgggagaaggtcaagctggagcgcaccctcggcggtatccgcgacatgagccgggtgccgagcgcggtgtgggtcgtcgacaccaagaaggagcacatcgccgtcggtgaggcccgcaagctcggcattcccgtcgtggcgattctcgacacgaactgcgacccggacgaggtcgactacccgatccccggcaacgacgacgcgatccgcagcgctgccctgctcacccgggtggtcgccgatgcggtcgcggacggtctgatggcccgtgcgggcgcctcgagctctgccgatgccaagcccgagcagtccgcgggtgaggagccgctcgccgagtgggagcaggccctgctgcgtggtgaggcacctgccgaggccccgggtgcggtggagccggcgacggcggagcccgcggacgggacacggccggacgccgcggtcggcaccgcggtctga

SEQ ID NO: 30617 - protein, 289 aa, Frankia sp. CcI3
MAVVTMKQLLESGVHFGHQTKRWNPKMKRYIFTERNGIYIIDLQQTLSYIDRAYDFVKETVAHGGTVLFIGTKKQAQEAIEEHAARVGMPYVKERWLGGMLTNFSTVYKRLQRLKELEEIEVTGGTEVRTKKEQLVLTREKVKLERTLGGIRDMSRVPSAVWVVDTKKEHIAVGEARKLGIPVVAILDTNCDPDEVDYPIPGNDDAIRSAALLTRVVADAVADGLMARAGASSSADAKPEQSAGEEPLAEWEQALLRGEAPAEAPGAVEPATAEPADGTRPDAAVGTAV

SEQ ID NO: 30618 - DNA, 756 bp, Novosphingobium aromaticivorans DSM 12444
  CDS (1)..(756): transl_table=11
atggcggctcctgtcgtcacgatgcatcagcttatcgaagccggcgcgcacttcggccaccagacccaccgctggaacccgcgcatgaagccgtacatcttcggcgcccgcaacggcatccacatcctcgacctgtcgcagaccgttccgctcatggcgcgcgcgctcgagttcatctcggccaccgtccaggctggcggcaaggtcctgttcgtcggcaccaagcgccaggcgcaggagccgatcgcccaggctgcgcgcgcttcgggccagcactatgtcaaccaccgctggctgggcggcatgctcaccaactggaagaccatctcgggttcgatcaagcgtttcaaggcgctggaagagcagctcgcaggtgacaccgcgggcctcaccaagaaggaagtcctccagctcacgcgcgagcgtgacaagttcgagctttcgctcggcggcatccgcgacatgggcggcatccccgacgtgatgttcgtgatcgacgccaacaaggaagagctggcgatcaaggaagccaacgtcctcggcatcccggtcgtcgcaatcctcgactcgaacgtctcgcccgaaggcatcgcgttcccgatcccggcgaacgacgacgccagccgcgcgatccgcctctactgcgaagccgttgctgctgcggctaccaagggtggccgcgacgccgctcttgcttcgggtgcggacctcggcgccatggccgagccgcttgctgaagaagctgcggaagtctga

SEQ ID NO: 30619 - protein, 251 aa, Novosphingobium aromaticivorans DSM 12444
MAAPVVTMHQLIEAGAHFGHQTHRWNPRMKPYIFGARNGIHILDLSQTVPLMARALEFISATVQAGGKVLFVGTKRQAQEPIAQAARASGQHYVNHRWLGGMLTNWKTISGSIKRFKALEEQLAGDTAGLTKKEVLQLTRERDKFELSLGGIRDMGGIPDVMFVIDANKEELAIKEANVLGIPVVAILDSNVSPEGIAFPIPANDDASRAIRLYCEAVAAAATKGGRDAALASGADLGAMAEPLAEEAAEV

SEQ ID NO: 30620 - DNA, 720 bp, Francisella tularensis subsp. holarctica
  CDS (1)..(720): transl_table=11
atgtctttaatgaaagaaatgttatcggctggtgttcacttcgggcacaaaaaggctttctggaatccacaaatgaaagaatacatctttggtattaatcatggtgtacatatcattaacctagaaaaaacagttccgcttttccaagatgcggttaactttgttggtaaaactgttgctaacggtggaaaaattctatttgttggtacaaaaagacaagcacaagatatcgttgaagctgaagctaaaagatgtggtatgccatttgtaagccatagatggctaggtggtatgcttactaactacaaaacggttagacagtctatcaagagattggcgcaactagaaaaaatgagagaagatggtactttagaatctcttactaaaaaagagatgttacaaaatattagaactatcgaaaaattagagaaagttcttggtggtatcaaagaaatgggcggtttacctgatgcaatcgttgttattgatggcaacaaagagcatatcgctattcaagaagcacaaaagctaggtatcaaagttgtagcaatcgtagatacaaattcaaacccagaaggtattgattatataatcccaggtaatgatgatgctgttaagtcaatatctttctatatgaaaaaatttgccgatgctgttattgatgctcaaggtctagatagagcagttgaagcaaaagctgatgaagccgctcaagcataa

SEQ ID NO: 30621 - protein, 239 aa, Francisella tularensis subsp. holarctica
MSLMKEMLSAGVHFGHKKAFWNPQMKEYIFGINHGVHIINLEKTVPLFQDAVNFVGKTVANGGKILFVGTKRQAQDIVEAEAKRCGMPFVSHRWLGGMLTNYKTVRQSIKRLAQLEKMREDGTLESLTKKEMLQNIRTIEKLEKVLGGIKEMGGLPDAIVVIDGNKEHIAIQEAQKLGIKVVAIVDTNSNPEGIDYIIPGNDDAVKSISFYMKKFADAVIDAQGLDRAVEAKADEAAQA

SEQ ID NO: 30622 - DNA, 735 bp, Desulfitobacterium hafniense Y51
  CDS (1)..(735): transl_table=11
atggctgtaatttctatgaagcaattactagaagccggtgttcacttcggtcatcaaactcgtcgttggaatcctaaaatggctcgttacatttttacggagcgcaatggtatttatatcattgacctgcaaaaaaccgtaagaaaggtagaggaagcctacaattacgtgcggaatttagcggcagacggtggtacggttttgttcgtcggtaccaagaagcaagctcaggagtccgtgaaagaagaagctgaacgctgcggtatgtactatgtcaatgagcgttggctcggcggcatgatgaccaacttccaaaccattcaaaagcgcgtcagccgtcttcgtgaattggaaaagatggaagctgaaggtgtattcgaagttcttcctaagaaagaagttgctgcacttcgccatgaaatggagaagctggagagattcttaggcggaatcaaaagcatgaagaaacttcctgatgctctgtttgttgtggatccacgcaaagagcggatcgctgtggctgaagcccgccgcttgaacatccctatcgttggtattgtggatacgaactgcgatcctgatgaaatcgacgtggtcattccagcgaatgatgacgccattcgcgcagtaaagcttttaacaggccgtatagcagatgccatcattgagggacaacaaggaagcgatgaggctgaagaagcagaagaagctgctgaagaagtcgttgctgaataa

SEQ ID NO: 30623 - protein, 244 aa, Desulfitobacterium hafniense Y51
MAVISMKQLLEAGVHFGHQTRRWNPKMARYIFTERNGIYIIDLQKTVRKVEEAYNYVRNLAADGGTVLFVGTKKQAQESVKEEAERCGMYYVNERWLGGMMTNFQTIQKRVSRLRELEKMEAEGVFEVLPKKEVAALRHEMEKLERFLGGIKSMKKLPDALFVVDPRKERIAVAEARRLNIPIVGIVDTNCDPDEIDVVIPANDDAIRAVKLLTGRIADAIIEGQQGSDEAEEAEEAAEEVVAE

SEQ ID NO: 30624 - DNA, 741 bp, Saccharophagus degradans 2-40
  CDS (1)..(741): transl_table=11
atgcctactgtaagcatgcgcgatatgctgcaagccggtgtccactttggtcaccaaactcgttactggaaccctaagatgggtaaatacatcttcggcgctcgtaacaaaattcatatcattaacttggagcacactgttcctgcgtttaatgaagcgttggccattgttaagcaattgggcagccaaaagaaaaaagttttgtttgttggcactaagcgcgctgcgcaaaagtctattaaagagcaagcagaacgttcaaacatgcctttcgttagccatcgctggttaggtggtatgttgaccaactacaaaactatccgcgcttctattcgccgttaccgcgaacttgaaactcaaagccaagacggtactttcgaaaagctaactaaaaaagaagctttagttcgtactcgtatcatggagaagctagagaagtctatcggtggtattaaagacatgggcggtctaccagacgctttgtttatcatcgatgttgagcacgagcgtattgctattcaagaagctaataaattgggtatcccagttattggtgttgttgatactaacagtgatcccgctggtgttgactacgtaatcccaggtaacgacgatgctatccgtgctatcaagctatacgctactgcagttgcagacgcgtgtattgaaggcgctgcggactctgcatctgttcctaataaagacgaattcgtagaagaaaaagctgctgacgccgagtaa

SEQ ID NO: 30625 - protein, 246 aa, Saccharophagus degradans 2-40
MPTVSMRDMLQAGVHFGHQTRYWNPKMGKYIFGARNKIHIINLEHTVPAFNEALAIVKQLGSQKKKVLFVGTKRAAQKSIKEQAERSNMPFVSHRWLGGMLTNYKTIRASIRRYRELETQSQDGTFEKLTKKEALVRTRIMEKLEKSIGGIKDMGGLPDALFIIDVEHERIAIQEANKLGIPVIGVVDTNSDPAGVDYVIPGNDDAIRAIKLYATAVADACIEGAADSASVPNKDEFVEEKAADAE

SEQ ID NO: 30626 - DNA, 750 bp, Methylobacillus flagellatus KT
  CDS (1)..(750): transl_table=11
atgtccgttaccatgcgtcaaatgctggaggctggtgtccatttcggccaccagacacgctactggaatcccaagatggcaccgtacatctttggtgaacgcaacaaaattcatattatcaacctggaaaaaaccctgccgctgtttgaggacgcgttgaagtatgtccgccaactgtctgcaaacaaggggcgcatcctgtttgtcggtaccaagcgtcaagcccgcgacattatcaaggaagaggcgcagcgcgctggttgcccctatgtcaatcatcgctggctgggcggcatgctgaccaacttcaagaccgtcaagcagtcgatcaagcgtctgaccgaatacgaagctctcttgcaggatggtggtattgagaagttcggcaagaaggaagcccttggttacaagcgcgaagtggaaaagctcgaacgctccatcggtggtatcaaggaaatgggcgggttgccagatgcaatcttcattattgatgttggccacgaaagtggtgctgtcactgaagccgctaagcttgggattcctgtgattggcgtggttgacaccaacaactccccggaaggcgtggcttacgtcattcccggaaatgacgactccagtcgtgcgattcgtctctatgcccgcggcattgctgacgcggtattggaaggccgtaaccagagcatcaatgaaatcgtcaaggcagcctccgaggaggagtttgtcgaagttgaagaagtcgcggcagagtaa

SEQ ID NO: 30627 - protein, 249 aa, Methylobacillus flagellatus KT
MSVTMRQMLEAGVHFGHQTRYWNPKMAPYIFGERNKIHIINLEKTLPLFEDALKYVRQLSANKGRILFVGTKRQARDIIKEEAQRAGCPYVNHRWLGGMLTNFKTVKQSIKRLTEYEALLQDGGIEKFGKKEALGYKREVEKLERSIGGIKEMGGLPDAIFIIDVGHESGAVTEAAKLGIPVIGVVDTNNSPEGVAYVIPGNDDSSRAIRLYARGIADAVLEGRNQSINEIVKAASEEEFVEVEEVAAE

SEQ ID NO: 30628 - DNA, 753 bp, Burkholderia xenovorans LB400
  CDS (1)..(753): transl_table=11
atggcagttaccatgcgtcaaatgctggaagccggtgtccacttcggtcaccaaacgcgcttctggaacccgaagatggccccgttcattttcggtcatcgcaacaagatccacatcatcaacctcgaaaagacgctgccgatgtacaacgacgcgctgaagtacgcgcgtcaactggcagcgaatcgcggcaccatcctgttcgtgggcacgaagcgtcaatcgcgcgacacgatcgctgaagaagcgcaacgcgccggcatgccgtacgtcaacgcacgctggctcggcggcatgctgaccaacttcaagacgctgaaggtttcgatcaagcgcctgaaggacatggaagccgcgctggaagcaggcgaaaccgagcgtatgagcaagaaggaagcgctcctgttcgaacgcgaaatggccaagctgcaaaagtcgatcggcggcgtgaaggacatgggcggcattccggacgcgatcttcgtggtcgacgtcggctaccacaagattgccgtgaccgaagcgaacaagctcggcattccggtcatcgccgtggtcgatacgaaccactcgccggaaggcatcgactacgtgatcccgggtaacgacgacgcctccaaggctgtcgctctgtacacggctggcgtggctgacgcgatcgtcgaaggccgtgcgaacgcggtcaacgaagtggtgcaggctgcacgtggcggcgacggcgacgagttcgtcgaggtcaacgcggaagcgtaa

SEQ ID NO: 30629 - protein, 250 aa, Burkholderia xenovorans LB400
MAVTMRQMLEAGVHFGHQTRFWNPKMAPFIFGHRNKIHIINLEKTLPMYNDALKYARQLAANRGTILFVGTKRQSRDTIAEEAQRAGMPYVNARWLGGMLTNFKTLKVSIKRLKDMEAALEAGETERMSKKEALLFEREMAKLQKSIGGVKDMGGIPDAIFVVDVGYHKIAVTEANKLGIPVIAVVDTNHSPEGIDYVIPGNDDASKAVALYTAGVADAIVEGRANAVNEVVQAARGGDGDEFVEVNAEA

SEQ ID NO: 30630 - DNA, 711 bp, Vitis vinifera
  CDS (1)..(711): transl_table=11
atgacaagaagatattggaacatcaatttggaagagatgatggaagcaggagttcattttggtcatggtactaggaaatggaatcctagaatggcgccttatatctcggcaaagcgtaaaggtattcatattacaaatcttactagaactgctcgctttttatcagaagcttgtgatttagtttttgatgcagcaagtaggggaaaacaattcttaattgttggtaccaaaaataaagcagcggattcagtagcacgggctgcaataaaggctcggtgtcattatgttaataaaaaatggctcggtggtatgtcaacgaattggtccactacagaaacgagacttcataaattcagggacttgagaacggaacaaaagacggggagactcaatcgtcttccgaaaagagatgcagctatgttgaagagacaattatctcacttgcaaacatatttgggtgggattaaatatatgacggggttacccgatattgtaataatcgttgatcagcaagaagaatatacggctcttcgagaatgtatcactttaggaattccaacgatttgtttaatcgatacaaattgtgaccccgatctcgcagatatttcgattccagcaaatgatgacgctatagcttcaatccgattaattcttaataaattagtattcgctatttgtgagggtcgttctagctatataagaaatccttga

SEQ ID NO: 30631 - protein, 236 aa, Vitis vinifera
MTRRYWNINLEEMMEAGVHFGHGTRKWNPRMAPYISAKRKGIHITNLTRTARFLSEACDLVFDAASRGKQFLIVGTKNKAADSVARAAIKARCHYVNKKWLGGMSTNWSTTETRLHKFRDLRTEQKTGRLNRLPKRDAAMLKRQLSHLQTYLGGIKYMTGLPDIVIIVDQQEEYTALRECITLGIPTICLIDTNCDPDLADISIPANDDAIASIRLILNKLVFAICEGRSSYIRNP

SEQ ID NO: 30632 - DNA, 744 bp, Ralstonia metallidurans CH34
  CDS (1)..(744): transl_table=11
atgtccgtgactatgcgcgaaatgctggaagccggttgccactttggccaccagacccgcttctggaacccgaagatggcccccttcattttcggtcaccgcaacaagatccacattatcaacctcgaaaagaccctgccgatgttccaggacgcgctgaagtacgtgcgccaactggcagcaaaccgcggcaccgtgcttttcgtgggtaccaagcgtcaatcgcgcgaaatcctggctgaagaagctggtcgcgctggcatgccctacgtcgacgcccgctggctcggcggcatgctgacgaacttcaagaccgtcaagatctcgatcaagcgcctgaaggacatggaagccgccaaggaagccggcgcgctggaaaccatgagcaagaaggaagcgctgatgttcgagcgcgagatggaaaagctggaaaagtccatcggcggcatcaaggacatgggtggcattcctgacgccatcttcgtggtggatgtcggctaccacaagatcgccgtgaccgaagccaacaagctgggtatccccgtgatcggtgtggtcgacacgaaccactcgccggaaggcatcgactacgtgatcccgggtaacgacgactcgagcaaggctgtggccctgtacgtgcgcggcgtggccgacgcgatcctggaaggccgtgcaaacgcggttcaggaagtcgtggaagccgcacgcggcgacgacgaattcgtcgaagtccaggaaggctga

SEQ ID NO: 30633 - protein, 247 aa, Ralstonia metallidurans CH34
MSVTMREMLEAGCHFGHQTRFWNPKMAPFIFGHRNKIHIINLEKTLPMFQDALKYVRQLAANRGTVLFVGTKRQSREILAEEAGRAGMPYVDARWLGGMLTNFKTVKISIKRLKDMEAAKEAGALETMSKKEALMFEREMEKLEKSIGGIKDMGGIPDAIFVVDVGYHKIAVTEANKLGIPVIGVVDTNHSPEGIDYVIPGNDDSSKAVALYVRGVADAILEGRANAVQEVVEAARGDDEFVEVQEG

SEQ ID NO: 30634 - DNA, 711 bp, Helianthus annuus
  CDS (1)..(711): transl_table=11
atgacaagaagatattggaacattaatttagaagagatgatggaagcaggagttcattttggccatggtactaggaaatggaatcctaaaatggcaccttatatctctgcaaaacgtaaaggtattcatattacaaatcttactagaactgctcgttttttatcagaagcttgtgatttggtttttgatgcagcaagtaggggaaaacaattcttaattgttggcactaaaaataaagaagctgattcagtagcatgggctgcaataagggctcggtgtcattatgttaataaaaaatggctcggtggtatgttaacgaattggtccactacagaaacgagacttcataagtttagagacttgagaactgaacaaaaaacaggggggctcagccgtcttccgaaaagagatgcggctatgttgaaaagacaattatctcatttgcaaacatatctgggcgggattaaatatatgacagggttacccgatattgtaatcatcgttgatcagcacgaagaatatacggcccttcaagaatgtatcacattgggaattccaacaatttgtttaatcgatacaaattgtgaccccgatctcgcagatatttcgattccagcgaatgatgacgctatatcttcaatccgattaattcttaacaaattagtatttgcaatttgtgagggccgttctggctatataagaaatccgtga

SEQ ID NO: 30635 - protein, 236 aa, Helianthus annuus
MTRRYWNINLEEMMEAGVHFGHGTRKWNPKMAPYISAKRKGIHITNLTRTARFLSEACDLVFDAASRGKQFLIVGTKNKEADSVAWAAIRARCHYVNKKWLGGMLTNWSTTETRLHKFRDLRTEQKTGGLSRLPKRDAAMLKRQLSHLQTYLGGIKYMTGLPDIVIIVDQHEEYTALQECITLGIPTICLIDTNCDPDLADISIPANDDAISSIRLILNKLVFAICEGRSGYIRNP

SEQ ID NO: 30636 - DNA, 906 bp, Acidobacteria bacterium Ellin345
  CDS (1)..(906): transl_table=11
ttggctaacatcaccatgaaggagttgctcgaagctggcgttcacttcgggcatcagacgaagcgttggaatccaaagatgaaggaatacatctttggcgaacgcaacgggatttacatcattgacctgcagaagacgctgaagatgttcaaggaagcgtccaagtttgtgtcggatgtggccgccgagggcaagcttgtcctctttgtcggcaccaagcgccaggcacaagatgccattgctgaagaagcaaagcgctgcggaatgttctacatcaaccagcgttggctgggtggattgctcaccaattgggtgaccgtccagaagtcggtgaagcggctgaaggaactcgacgaaatggccacggatggccgttacgagctgctcccgaagaaagaagtgatcaagctcgagcgcgagcgcaagcatctccaggcgaacctggcgggcatcaagaacctgaaccggctgccggactgcttgttcgtgatcgactccaacaaggagcagatcgcggtgaaggaagctcgcaagctgggcattccggtggttgcagtcgtcgacacgaactgcgatccgagcgaagtggattacgtgatcccgggcaacgatgacgcgctgcgcgcgatccgcctgttcgcctcgaagattgcggactcggttgccgagggctcgcagttggccgacaagagcatgatcgagagcacgaatgtgagcaacgcggccgaagtaattccgcagagctacatcggtgacgacgaagagcatggtcttgcacaaccgacggaagaggccgctccggtggaagaagagatcaacatggaagaagtgctgggcaagggcgtgcgcaagcagccagtctcagagaacgagaacgtggaagccgccgcggcggaacagaaataa

SEQ ID NO: 30637 - protein, 301 aa, Acidobacteria bacterium Ellin345
MANITMKELLEAGVHFGHQTKRWNPKMKEYIFGERNGIYIIDLQKTLKMFKEASKFVSDVAAEGKLVLFVGTKRQAQDAIAEEAKRCGMFYINQRWLGGLLTNWVTVQKSVKRLKELDEMATDGRYELLPKKEVIKLERERKHLQANLAGIKNLNRLPDCLFVIDSNKEQIAVKEARKLGIPVVAVVDTNCDPSEVDYVIPGNDDALRAIRLFASKIADSVAEGSQLADKSMIESTNVSNAAEVIPQSYIGDDEEHGLAQPTEEAAPVEEEINMEEVLGKGVRKQPVSENENVEAAAAEQK

SEQ ID NO: 30638 - DNA, 771 bp, Silicibacter sp. TM1040
  CDS (1)..(771): transl_table=11
atggctcttcccgagttcaccatgcgtcagctgctcgaagctggcgttcactttggtcaccagactcagcgctggaacccgcgcatgtcgcccttcatctacggcgcgcgcaacggcatccacatcatggacctcacccagactgttccgatgctggaccaggctctgaccgcgatccgtgacaccgtcgccaaaggcggccgcgttctgtttgttggcaccaagcgtcaggccgcagcgccgatcgccgaagccgcagagaaatccgcgcagtactacatgaaccaccgttggctcggcggcacgctgaccaactggaaaaccgtatcccagtcgatcaaccgtctgaaagagatcgacgagcgcatggctgctggtgccgaaggcctgaccaagaaagagcgtctgggcatggagcgtgaccaggagaagctgcaagcgtccctcggcggtatccgcgacatgggcggcgttccggacctgctgttcgtcatcgacgtgaaaaaagaagcgctggcaatcgccgaagccaacaaactgggtatcccggttgtggctgttgtcgataccaactgctcgcccgatggtgtagactacatcatccccggcaacgatgacgcggcgcgcgcgatttcgctctactgcgatctggttgcccgtgcagcactggacggcatgtccgcgcagctcggcgctgccggtgttgacctcggtgctctggaagaggcacctgtcgaagaagccgtcgctgaagaagcagccggcgcctga

SEQ ID NO: 30639 - protein, 256 aa, Silicibacter sp. TM1040
MALPEFTMRQLLEAGVHFGHQTQRWNPRMSPFIYGARNGIHIMDLTQTVPMLDQALTAIRDTVAKGGRVLFVGTKRQAAAPIAEAAEKSAQYYMNHRWLGGTLTNWKTVSQSINRLKEIDERMAAGAEGLTKKERLGMERDQEKLQASLGGIRDMGGVPDLLFVIDVKKEALAIAEANKLGIPVVAVVDTNCSPDGVDYIIPGNDDAARAISLYCDLVARAALDGMSAQLGAAGVDLGALEEAPVEEAVAEEAAGA

SEQ ID NO: 30640 - DNA, 939 bp, Myxococcus xanthus DK 1622
  CDS (1)..(939): transl_table=11
atggccgccgccggtggcatcacgatgaggcagctcctggaggccggtgttcacttcggccaccagacgaagcgctggaacccgaagatgaagccgttcatcttcggcgcgcgcaacggcatctacatcatcgacctgcagaagacggtcgtgatggcccgctcggcgttccgcttcgtggcggacatcaccgcgcgcggtggctcggtgctcttcgtcggcaccaagaagcaggcgcaggacgtggtccgcgaggaggcctcgcgcgccggtcagttcttcgtcaccagccgctggctgggtggcacgctgaccaacttcaagaccatcaagcagggcatcgaccgcctgaagacgctggagaagatggccgaggacggcaccttcgagcgccttcccaagaaggaagtcgcccagctcgagcgtgagcgcgagaagctggagaagaacctgggtggcgtgaaggagatgtcgaagctgccccgctgcgtcttcgtcatcgacccgaagaaggagcacatcgccatccacgaggcgggccgcctgggcatcccggtcatcggcctggtggacaccaactgcgatccggacggcatcgacttcgtcatccccggcaacgacgacgccatccgctccatcaagctgttcacctccaagatcgccgaggcctgcctcgagggcgccgcgcgttaccgcgcctcgggcgccgccgagcgcgacgagcaggaggagcgcgagggccgtgacgaccgtggcgaccgccgcgatgaccgccgtggcccgcgccgcggtgaccgccgcgacgaccgtcgcgaccggggtggtgaccgtggcggcgaccgccgtggccccctcgttgagatgaagggcgcggcccctgtcgcgtccgccgagccggccgccgaggccgctcccgagggtgaggcggcggccgagtag

SEQ ID NO: 30641 - protein, 312 aa, Myxococcus xanthus DK 1622
MAAAGGITMRQLLEAGVHFGHQTKRWNPKMKPFIFGARNGIYIIDLQKTVVMARSAFRFVADITARGGSVLFVGTKKQAQDVVREEASRAGQFFVTSRWLGGTLTNFKTIKQGIDRLKTLEKMAEDGTFERLPKKEVAQLEREREKLEKNLGGVKEMSKLPRCVFVIDPKKEHIAIHEAGRLGIPVIGLVDTNCDPDGIDFVIPGNDDAIRSIKLFTSKIAEACLEGAARYRASGAAERDEQEEREGRDDRGDRRDDRRGPRRGDRRDDRRDRGGDRGGDRRGPLVEMKGAAPVASAEPAAEAAPEGEAAAE

SEQ ID NO: 30642 - DNA, 726 bp, Chara vulgaris
  CDS (1)..(726): transl_table=11
atgtcagatcaatctttttactttctttcacccatgaatcatttatactcaaaaacaaacttagaagaaatgctcgaagcaggagttcattttggacatcaatcacataaatggaatcctagaatggctccttatatttttagtgaacgaaaaggagttcatataattgaccttatacagacatctaacttattgcatgaagcttgtgattttttagctaatgcagctagtaataagaaagaatttttattagtaggaacaaaatttcaagcttctgacctaataaaatcagaagcacttaaatctagatgtcattatgtaaatcaaagatggttaggcggtatgttaactaattggatgacaatagaaactcgaatacaaaggcttaagaacctagagacacaagaaaagttaggtgcttttcatcatttacctaaaaaagatgcagcacatctaaaaaggcaattaaatcaattgcaaaaatatttaggtggaatgaaatacatgaaaaatttaccagatgttgtaattattgttgatcaacaaaaagaaataattgcagttcaagaatgtagagttttagggattccaatcatagctttagtagatactaattgtgatcccgaaattgtagacattcctatccctgcaaatgatgatgctcgttcttcaattcgttggatcttgtccaaattgactgcagcaattcgtgataatcgtttttaa

SEQ ID NO: 30643 - protein, 241 aa, Chara vulgaris
MSDQSFYFLSPMNHLYSKTNLEEMLEAGVHFGHQSHKWNPRMAPYIFSERKGVHIIDLIQTSNLLHEACDFLANAASNKKEFLLVGTKFQASDLIKSEALKSRCHYVNQRWLGGMLTNWMTIETRIQRLKNLETQEKLGAFHHLPKKDAAHLKRQLNQLQKYLGGMKYMKNLPDVVIIVDQQKEIIAVQECRVLGIPIIALVDTNCDPEIVDIPIPANDDARSSIRWILSKLTAAIRDNRF

SEQ ID NO: 30644 - DNA, 717 bp, Oltmannsiellopsis viridis
  CDS (1)..(717): transl_table=11
atgaaagttagtattgaagaaatggtccaagtaggtatgcattttggtcaccagtctcgtaaatggaacccaaaaatggctcctttcatttacacggagcgtaacggaattcacattattgatttaatccaaacacatgcttatttaaaacaagtatctcagtttttaacagaatcaagtgctgctggtaaaaccattttatttgttggtacaaaaaaacaagcttctggtttaattgcaaaagtggctttacaatgtaactctccttatgtaaatcaacgttggttaggtgggatgttaacaaactggaaaacaattcaaacatcaattaaaaaattaaatgagtttgactaccaagaaaaaacaggcggttttgatttattatcgaaacaagaagctgcgcaagctcgaaaagaaaaagctcgtttacaaaaatatttaggtggaatgaaacacatgacaacaattcctgatgttgtagttattgttggtcaaccagatgaattaaatgctgttgcagagtgtcgccgattaggtattcgcagtgtaacaattttagatacagattgtgatccatctttagctgacttatttgttccagcaaacgatgattccgttgcttcaattcaactaattttaactgagtttttacgttcgattttaaacggtcaacaaatgtttagtgaaaaacagcaacgtggtaaaaagactgcataa

SEQ ID NO: 30645 - protein, 238 aa, Oltmannsiellopsis viridis
MKVSIEEMVQVGMHFGHQSRKWNPKMAPFIYTERNGIHIIDLIQTHAYLKQVSQFLTESSAAGKTILFVGTKKQASGLIAKVALQCNSPYVNQRWLGGMLTNWKTIQTSIKKLNEFDYQEKTGGFDLLSKQEAAQARKEKARLQKYLGGMKHMTTIPDVVVIVGQPDELNAVAECRRLGIRSVTILDTDCDPSLADLFVPANDDSVASIQLILTEFLRSILNGQQMFSEKQQRGKKTA

SEQ ID NO: 30646 - DNA, 711 bp, Eucalyptus globulus subsp. globulus
  CDS (1)..(711): transl_table=11
atgacaagaaggtattggaatatcaatttggaagagatgatggaagcgggagttcattttggtcatggtactaggaaatggaatcctaggatggcaccttatatttctgccaagcgtaaaggtattcatattacaaatcttactaaaactgctcgttttttatcagaagcttgtgatttagtttttgatgcagcaagtaggggaaaacagtttttaattgttggtaccaagaataaagcagctgattcagtagcacgggctgcaataagggctcgatgtcattatgttaataaaaagtggctcggtggtatgttaacgaattggtccactacagaaacgagacttcataagttcagggacttgagaacggaacaaaaggcggggagactcaatcgtcttccgaaaagagacgcagctatgttgaagagacaattatctcacttgcaaacatatctgggcgggattaaatatatgacggggttacctgatattgtaattattgttgatcaacaagaagaatatacggctcttcgagaatgtatcactttgggaattccaacaatttgtttaatcgatacaaattgtgacccggatcttgcagatatttcgattccagcaaatgatgacgctatagcttcaatccgattaattcttaacaaattagtatttgcaatttgtgagggtcgttctagctatatacgaaatccttga

SEQ ID NO: 30647 - protein, 236 aa, Eucalyptus globulus subsp. globulus
MTRRYWNINLEEMMEAGVHFGHGTRKWNPRMAPYISAKRKGIHITNLTKTARFLSEACDLVFDAASRGKQFLIVGTKNKAADSVARAAIRARCHYVNKKWLGGMLTNWSTTETRLHKFRDLRTEQKAGRLNRLPKRDAAMLKRQLSHLQTYLGGIKYMTGLPDIVIIVDQQEEYTALRECITLGIPTICLIDTNCDPDLADISIPANDDAIASIRLILNKLVFAICEGRSSYIRNP

SEQ ID NO: 30648 - DNA, 702 bp, Staurastrum punctulatum
  CDS (1)..(702): transl_table=11
atgaaaacagaatcattaactataagtttagaggaaatgatggaagcaggagttcattttggtcaccaaactcgtaaatggaatccaaaaatggcgccttatatttttacaaaaagacgaggtatttatatacttcatatttttaaaacagctcgattattagccgaagcttgtgaatttagtgctaatgcagcttctcaagggaaacaattcttaatagtcggtacgaaatatcaagcagcagatctggttagcgcagcagccaaaaaagctagatgtcactatgtaaaccaaaaatggttaggtggcatgcttactaattggtctacaatagaaacacgagtaactagacttaaacaacttgaagatcaagaaaatgcaggtgtacttaatcagctaccaaagaaagaggctgctgtcttaaaaagacaacttatccaattgcgaaaatatttagaaggcattaagtatatgacacgcttaccggatatagtcataataattgaccaacagaaagaagctacggcggttgaagaatgtattaaattaggcattcctacaatctgtttagttgatacggattgtgatccagatcttacagatatgcctatacccgctaatgatgatgcacgatcttcaattcgatggatattagataaattaactactgcaattcgagaaggccgtaatagagttacttaa

SEQ ID NO: 30649 - protein, 233 aa, Staurastrum punctulatum
MKTESLTISLEEMMEAGVHFGHQTRKWNPKMAPYIFTKRRGIYILHIFKTARLLAEACEFSANAASQGKQFLIVGTKYQAADLVSAAAKKARCHYVNQKWLGGMLTNWSTIETRVTRLKQLEDQENAGVLNQLPKKEAAVLKRQLIQLRKYLEGIKYMTRLPDIVIIIDQQKEATAVEECIKLGIPTICLVDTDCDPDLTDMPIPANDDARSSIRWILDKLTTAIREGRNRVT

SEQ ID NO: 30650 - DNA, 855 bp, Mycobacterium sp. MCS
  CDS (1)..(855): transl_table=11
atggccgtagtcaccatgaagcagctgctcgacagcggcacccacttcgggcatcagacccgtcgctggaaccccaagatgaagcggttcatcttcaccgaccgcaacggcatctacatcatcgatctgcagcagacgctgacctacatcgacaaggcgtacgaattcgtcaaggagaccgttgcgcacggcggttccatcatgttcgtcggcaccaagaagcaggcgcaggagtccatcgccgaagaggcgacccgtgtcggcatgccgtatgtgaaccagcgctggctcggcggcatgctcaccaacttctcgaccgtgcacaagcgtctgcagcgcctcaaggaactcgaggcgatggagcagaccggtggcttcgagggtcgcaccaagaaggaaatcctgatgctgacccgcgagaagaacaagctcgagcgcagcctcggcggtatccgcgacatgcagaaggtgccctcggccatctgggtcgtcgacaccaacaaggagcacctggcggtcgccgaagcgcggaagctgaacatcccgatcatcgcgatcctcgacaccaactgcgatcccgacgtcgtcgactacccgatcccgggcaacgacgacgcgatccgttccgctgcactgctgaccaaggtcgtggcctccgcggtcgccgagggtctgcaggcccgggccggcggcggtaacggcaacaagccggaagccgaggctgccgagccgctcgccgagtgggagcaggaactgctcgccggcgcgacggcgtcgccgaccgcggccggtgccgcgcccggtacgcccgaggcggacatccagaccgaacccaccgcccctcagaacccgtag

SEQ ID NO: 30651 - protein, 284 aa, Mycobacterium sp. MCS
MAVVTMKQLLDSGTHFGHQTRRWNPKMKRFIFTDRNGIYIIDLQQTLTYIDKAYEFVKETVAHGGSIMFVGTKKQAQESIAEEATRVGMPYVNQRWLGGMLTNFSTVHKRLQRLKELEAMEQTGGFEGRTKKEILMLTREKNKLERSLGGIRDMQKVPSAIWVVDTNKEHLAVAEARKLNIPIIAILDTNCDPDVVDYPIPGNDDAIRSAALLTKVVASAVAEGLQARAGGGNGNKPEAEAAEPLAEWEQELLAGATASPTAAGAAPGTPEADIQTEPTAPQNP

SEQ ID NO: 30652 - DNA, 804 bp, Mesorhizobium sp. BNC1
  CDS (1)..(804): transl_table=11
atggcactgcctgatttcagcatgcgccagctgcttgaagctggtgttcacttcggccaccagacccatcgctggaacccgaaaatgactccctacatcttcggggagcgcaacaacatccacatcatcgatctcagccagacggtgccgctgctgcaccaggcgctgaaggtcgtttccgacacggtgggacgcgggggccgtctgctcttcgtcggcaccaagcgccaggcatcagacatcgtggccgatgcggcgcgccgttccgcacagtattacgtcaactcgcgctggcttggcgggatgctgacgaactggaagacgatttccaattcgatccagcgcctgcgccgactcgacgagatgctttcgagcgagaatctgggcctcaccaagaaggagcgcctcaacctggagcgcgagcgcgataagctcgagcgcgcgcttggcggtatccgcgacatgggctccacgcccgacatgatgttcgtcatcgacacgaacaaggaagcgatcgcggtccaggaagcccgccggctgggcattccggtgattgccgttatcgattcgaactgcgatccggatgtcgtcgactacccgatccccggcaatgacgatgccgcccgtgcgatcgcgctatattgcgatctgatcgccaaggctgccattgacggcatcgagcgccagcagggctcgctgggagttgacatcggcgaatctgccgcggcgccttccgagcctgcgctggagactgcttccgcagaagccacggcggaaggcgagcagccgggtagccaagcatag

SEQ ID NO: 30653 - protein, 267 aa, Mesorhizobium sp. BNC1
MALPDFSMRQLLEAGVHFGHQTHRWNPKMTPYIFGERNNIHIIDLSQTVPLLHQALKVVSDTVGRGGRLLFVGTKRQASDIVADAARRSAQYYVNSRWLGGMLTNWKTISNSIQRLRRLDEMLSSENLGLTKKERLNLERERDKLERALGGIRDMGSTPDMMFVIDTNKEAIAVQEARRLGIPVIAVIDSNCDPDVVDYPIPGNDDAARAIALYCDLIAKAAIDGIERQQGSLGVDIGESAAAPSEPALETASAEATAEGEQPGSQA

SEQ ID NO: 30654 - DNA, 903 bp, Rhodococcus sp. RHA1
  CDS (1)..(903): transl_table=11
atggctgtcgtaacaatgaagcagctgctcgacagcggcacgcacttcggtcaccagacccgtcgttggaacccgaagatgaagcgtttcatcttcaccgaccgcaacggcatctacatcatcgacttgcagcagacgctgacgtacatcgacaaggcgtacgagttcgtcaaggagaccgttgcccacggcggcaccgtcctcttcgtcggcaccaagaagcaggcccaggaatccatcgcggccgaggccactcgcgtcgggatgccctacgtcaaccagcgttggctcggcggcatgctcaccaacttcaccaccgtccacaagcgtcttctccgcctcaaggagctcgaggcaatggagcagaccggtggcttcgagggtcgcaccaagaaggagatcctcatgctcacgcgtgagatgaccaagctggaccgcactctcggtggtatccgcgacatggccaaggtcccctccgcggtgtgggtcgtcgacaccaacaaggagcacctggccgttgccgaggctcgcaagctgaacatcccggtcatcgcgatcctggacaccaactgcgaccccgacctcgtcgactacccgatcccgggcaacgacgacgccatccgcagcgccgccctgctcaccaaggtcgtcgcatccgcagtggccgagggcgtgcaggcccgtgccggactgagcgccgacaaggacgcgaagcccgaggccggcgccggcgaacccctcgccgagtgggagcaggaactgctctcgcaggccgcgcccgccgctgaggccgcgcccgccgctgaggcagcgcccgccgcagaggccgctcccgcagctgaggcacaggcggctccggctgccgaggcccccgcagcagaggcaccctccaccgaggcctga

SEQ ID NO: 30655 - protein, 300 aa, Rhodococcus sp. RHA1
MAVVTMKQLLDSGTHFGHQTRRWNPKMKRFIFTDRNGIYIIDLQQTLTYIDKAYEFVKETVAHGGTVLFVGTKKQAQESIAAEATRVGMPYVNQRWLGGMLTNFTTVHKRLLRLKELEAMEQTGGFEGRTKKEILMLTREMTKLDRTLGGIRDMAKVPSAVWVVDTNKEHLAVAEARKLNIPVIAILDTNCDPDLVDYPIPGNDDAIRSAALLTKVVASAVAEGVQARAGLSADKDAKPEAGAGEPLAEWEQELLSQAAPAAEAAPAAEAAPAAEAAPAAEAQAAPAAEAPAAEAPSTEA

SEQ ID NO: 30656 - DNA, 720 bp, Haemophilus somnus 129PT
  CDS (1)..(720): transl_table=11
atggcacaagtttcaatgcgtgatatgctgcaagctggcgttcacttcggtcaccaaactcgttactggaacccaaaaatgaaaccgttcattttcggacctcgtaatggtgttcacatcatcaacttagaaaaaactgtcccaatgttcaatgaagcgttagttgaattaactcgtattgcgagtaataacggcagaattttatttgttggtacaaaacgtgcagcttctgaagttgttaaagcagcagcattagactgtcaacaatattatgtaaatcaccgttggttaggcgggatgttgacaaactggaaaacagtgcgtcaatcaatcaaacgtttaaaagatttagaaacccaatctcaagatggtacttttgataaattaacgaaaaaagaagcgttagtacgtactcgtgagatggaaaaacttgaattaagtcttggcggtatcaaagatatgggcggtcttcctgatgcaatttttgtgatcggtgcagatcatgaacatatcgcaatcaaagaagcaaataatctaggaatccctgtatttgcaattgttgatactaactcaagcccagatggcgtagattttgttattccaggtaacgatgatgcgtcacgtgcaattcaattatatctttctgcagctaccacagcagtaaaagaaggtcgtaatcaagaaacggtaactgaagaagtttttgcagcagcagaataa

SEQ ID NO: 30657 - protein, 239 aa, Haemophilus somnus 129PT
MAQVSMRDMLQAGVHFGHQTRYWNPKMKPFIFGPRNGVHIINLEKTVPMFNEALVELTRIASNNGRILFVGTKRAASEVVKAAALDCQQYYVNHRWLGGMLTNWKTVRQSIKRLKDLETQSQDGTFDKLTKKEALVRTREMEKLELSLGGIKDMGGLPDAIFVIGADHEHIAIKEANNLGIPVFAIVDTNSSPDGVDFVIPGNDDASRAIQLYLSAATTAVKEGRNQETVTEEVFAAAE

SEQ ID NO: 30658 - DNA, 711 bp, Daucus carota
  CDS (1)..(711): transl_table=11
atgacaaaaagatattggaacatcgatttggaagagatgatgaaggccggagttcattttggacatggtactaggaaatggaatcctaaaatggccccttatatttctgcaaagcgtaaaggtattcatattataaatcttactagaaccgctcgttttttatcagaagcttgtgatttggtttttgatgcagcaagtaggggaaaacaattcttaatcgttggcacgaaaaataaagcagctgacctagtagcatgggctgcaataagggctcggtgtcattatgttaataaaaaatggctcggcggtatgttaacgaattggtccactacagaaacgagacttcataagtttagagacttgagaacagaacaaaaaacagggagacttcgtcgtcttccgaaaagagatgcggccgtgttgaaaagacaattatctcacttgcaaacatatctgggcgggattaaatatatgacggggttaccagatattgtaatcatcattgatcaacacgaagaatatacggcacttcaagaatgtatcactttgggaattccaacaatttctttaatcgatacaaattgtgaccccgatcttgcagatatttcgattccagccaatgatgacgctatatcttcaatccgattaattcttaacaaattagtattcgcaattcgtgaagggcgttctagctatataagaaatccgtga

SEQ ID NO: 30659 - protein, 236 aa, Daucus carota
MTKRYWNIDLEEMMKAGVHFGHGTRKWNPKMAPYISAKRKGIHIINLTRTARFLSEACDLVFDAASRGKQFLIVGTKNKAADLVAWAAIRARCHYVNKKWLGGMLTNWSTTETRLHKFRDLRTEQKTGRLRRLPKRDAAVLKRQLSHLQTYLGGIKYMTGLPDIVIIIDQHEEYTALQECITLGIPTISLIDTNCDPDLADISIPANDDAISSIRLILNKLVFAIREGRSSYIRNP

SEQ ID NO: 30660 - DNA, 711 bp, Liriodendron tulipifera
  CDS (1)..(711): transl_table=11
atgacaagaagatattggaacatccatttggaagagatgatggaggcaggagttcattttggtcatggtactaggaaatggaatcctagaatggcaccttacatctctgcaaagcgtaaaggtattcatattacaaatcttactagaactgctcgttttttatcagaagcctgtgatttagtttttgatgcagcaagtaggggaaaaaacttcttactagttggtaccaaaaataaagcagctgattcagtagcatcagctgcaataagggctcggtgtcattatgttaataaaaaatggctcggtggtatgttaacgaattggtccactacagaaacgagacttcataagttcagggacttgagagcggaacaaaagacggggaaactcaatcgtctcccgaaaagagatgcagcaatgttgaagagacaattatctcacttgcaaacatatctgggtgggatcaaatatatgacggggttacctgatattgtcatcatcgttgatcagcaagaagaatatacggctcttcgagaatgtctgactttaggaattccgacgatttgtctaatcgatacaaattgtgacccagatctcgcggatatttcgattccagccaacgatgacgctatagcctcaattcgattgattcttaacaaattagtatccgcaatttgtgagggtcgttctagctctataagaaatcgttga

SEQ ID NO: 30661 - protein, 236 aa, Liriodendron tulipifera
MTRRYWNIHLEEMMEAGVHFGHGTRKWNPRMAPYISAKRKGIHITNLTRTARFLSEACDLVFDAASRGKNFLLVGTKNKAADSVASAAIRARCHYVNKKWLGGMLTNWSTTETRLHKFRDLRAEQKTGKLNRLPKRDAAMLKRQLSHLQTYLGGIKYMTGLPDIVIIVDQQEEYTALRECLTLGIPTICLIDTNCDPDLADISIPANDDAIASIRLILNKLVSAICEGRSSSIRNR

SEQ ID NO: 30662 - DNA, 711 bp, Citrus sinensis
  CDS (1)..(711): transl_table=11
atggcaagaaggtattggaacatccatttggaagagatgatggaagcaggaattcattttggtcatggtactcggaaatggaatcctagaatggcaccttatatatctgcaaaacataaaggtattcatattacaaatctgactcgaactgctcggtttttatcagaagcttgtgatttagtttttgatgcagcaagtaggggaaaacaattcttaattgttggtactaaaaataaagcagctgatttagtcgcgcgagctgcaataagggctcggtgccattatgttaatcaaaaatggctcggcggtatgttaaccaattggtccactacagaaacgcgacttcacaagttcagggatttgagaacggaacaaaaaggggggagactcgacagtcttcccaaaagggatgccgctattttgaagagacaattatcgcgtctgcaaacgtatctgggcgggattaaatatatgacgagggtacccgatattgtaatcgtcgttgatcagcaagaagaatatacggctcttcgagaatgtatcactttgggaattccaacaatttgtttaatcgatacaaattgtgaccccgatctcgcagatatttcgattccagcaaacgatgacgctatagcctcaatccgattaattcttaacaaattagtattcgcaatttgtgagggtcgctctagctatatacgaaatccttga

SEQ ID NO: 30663 - protein, 236 aa, Citrus sinensis
MARRYWNIHLEEMMEAGIHFGHGTRKWNPRMAPYISAKHKGIHITNLTRTARFLSEACDLVFDAASRGKQFLIVGTKNKAADLVARAAIRARCHYVNQKWLGGMLTNWSTTETRLHKFRDLRTEQKGGRLDSLPKRDAAILKRQLSRLQTYLGGIKYMTRVPDIVIVVDQQEEYTALRECITLGIPTICLIDTNCDPDLADISIPANDDAIASIRLILNKLVFAICEGRSSYIRNP

SEQ ID NO: 30664 - DNA, 711 bp, Platanus occidentalis
  CDS (1)..(711): transl_table=11
atgacaagaagatattggaacatcaatttggaagagatgatggaagccggggttcattttggtcatggtactcggaaatggaatcctagaatggcaccttacatctctgcaaagcgtaaaggtattcatattataaatcttactagaactgctcgttttttatcagaagcttgtgatttagtttttgatgcagcaagaaggggaaaacgattcttaatagttggcaccaaaaataaagtagttgatttagtagcatcggctgcaataagggctcggtgtcattatgttaataaaaaatggctcggtggtatgtcaacgaattggtccactacagaaacgagacttcataagttcagggacttgagagcggaacaaaaggcggggagactcaaccatcttccgaaaagagatgcagcaatgttgaaaagacagttatctcacttggaaacatatttgggtggaatcaaatatatgacggggttacccgatattgtaatcatcgttgatcagcaagaagaatatacggctcttcgagaatgtgtcactttgggaattccaacgatttgtttaatcgatacaaattgtgacccggatctcgcagatatttcaattccagcgaatgatgacgctatagcttcaatccgattagttcttaacaaattagtatccgcaatttgtgagggtcgttctagctatataagaaatcattga

SEQ ID NO: 30665 - protein, 236 aa, Platanus occidentalis
MTRRYWNINLEEMMEAGVHFGHGTRKWNPRMAPYISAKRKGIHIINLTRTARFLSEACDLVFDAARRGKRFLIVGTKNKVVDLVASAAIRARCHYVNKKWLGGMSTNWSTTETRLHKFRDLRAEQKAGRLNHLPKRDAAMLKRQLSHLETYLGGIKYMTGLPDIVIIVDQQEEYTALRECVTLGIPTICLIDTNCDPDLADISIPANDDAIASIRLVLNKLVSAICEGRSSYIRNH

SEQ ID NO: 30666 - DNA, 711 bp, Nandina domestica
  CDS (1)..(711): transl_table=11
atgacaagaagatattggaacatcaatttggaagagatgatggaagcaggagttcattttggtcatggtactaggaaatggaatcctagaatggcaccttacatctctgcaaaacgtaaaggtattcatattacaaatcttactagaactgctcgttttttatcagaagcttgtgatttagtttttgatgcagcaagtagaggaaaacaattcttaatagttggtaccaaaaataaagcggctgattcagtagcatcggctgcaataagggctcgatgccattatgttaataaaaaatggctcggtggtatgtcaacgaattggtccactacggaaacgagacttcataaattcagggacttgagagcggaacaaaagacgggaagattcaatcgtcttccgaaaagagatgcagcaatgttgaagagacaattatctcacttgcaaacatatctgggtggcatcaaatatatgaccgggttgccagatattgtaatcatcgttgatcagcaagaagaatatacggctcttcgagaatgtgtcactttgggaattccaacaatttgtttaatcgatacaaattgtgacccggatctcgcagatatttcgattcccgccaatgatgacgctatagcttcaatccgattcattcttaacaaattagtatccgcaatttgtgagggtcgttctagctatataagaaatcgttga

SEQ ID NO: 30667 - protein, 236 aa, Nandina domestica
MTRRYWNINLEEMMEAGVHFGHGTRKWNPRMAPYISAKRKGIHITNLTRTARFLSEACDLVFDAASRGKQFLIVGTKNKAADSVASAAIRARCHYVNKKWLGGMSTNWSTTETRLHKFRDLRAEQKTGRFNRLPKRDAAMLKRQLSHLQTYLGGIKYMTGLPDIVIIVDQQEEYTALRECVTLGIPTICLIDTNCDPDLADISIPANDDAIASIRFILNKLVSAICEGRSSYIRNR

SEQ ID NO: 30668 - DNA, 747 bp, Alkalilimnicola ehrlichei MLHE-1
  CDS (1)..(747): transl_table=11
atggcgaatgtcagcatgcgtgacatgctggaggccggcgttcatttcggccaccagacccgttactggaacccgaagatggccccctacatcttcggccagcgtaacaagatccacatcatcaacctggaaaagaccctgcccctgtaccaggaggccatgaactacgtcggccgtctggccgccgagggtggcaaggtgctgttcgtcggtaccaagcgctccgcccgcaaggccgtgcgcgaggaggcctcccgctgcggcatgccctatgtcgatcaccgctggctcggcggcatgctcaccaacttccgcaccgtcaagggctccatccgccgcctgaaagacctggaggcccaggccgaggacggcaccttcgataagctgaccaagcgcgaggcgctgtcgctgagccgcgagatggagaagctcaatcgcaccctctccggcatcaaggacatgaacggtctgccggacgcgatgttcgtcatcgacgtgggcttcgagcacatcgccgtacaggaggcccgcaagctgggtatcccggtggtggccgtggttgataccaacaactccccgcgcgaagtcgactacgtcattccgggcaacgacgacgccatccgtgccatccagctctatctgagcggcgcggccgatgccgtgctcgaggcaaagacggccactgcgcgtcccggcggcgatgacgacttcgtcgaggtggacgaggccaccgagcagcagggctga

SEQ ID NO: 30669 - protein, 248 aa, Alkalilimnicola ehrlichei MLHE-1
MANVSMRDMLEAGVHFGHQTRYWNPKMAPYIFGQRNKIHIINLEKTLPLYQEAMNYVGRLAAEGGKVLFVGTKRSARKAVREEASRCGMPYVDHRWLGGMLTNFRTVKGSIRRLKDLEAQAEDGTFDKLTKREALSLSREMEKLNRTLSGIKDMNGLPDAMFVIDVGFEHIAVQEARKLGIPVVAVVDTNNSPREVDYVIPGNDDAIRAIQLYLSGAADAVLEAKTATARPGGDDDFVEVDEATEQQG

SEQ ID NO: 30670 - DNA, 792 bp, Hyphomonas neptunium ATCC 15444
  CDS (1)..(792): transl_table=11
atggcccttcctgacttctcgatgcgtcagttgctcgaggctggtgttcactttggtcaccagacccaccgctggaacccccgcatgaagccgtacatctacggcgagcgttccggcatccacatcatggacctttcgcacactgttcccgcgctgcaccagtcgctggtgtttgtgcgcgatactgtcgccaagggcggccgtgttctgttcgtgggtacaaaacgtcaggctcaggagcccgttgctgaggctgcacagcgctgcgcacagtattacatgaaccatcgctggctcggcggcacgctgaccaactggtccacagtttccaactccatcaagcagctgcgcgaacttaacgccatgtttgagagtggtggcggctctggcctgaccaagaaagagctgctcgacctgcagcgccgccgtgacaagctgcaaaagtcgctgggcggtatcgctgacatgggcggcctgccagctgcaatcgtcgttatcgacacgaataaagaagcgattgccgttcaagaggcacgcaagctcggtattccggtcgttgctgttctggacaccaattgtaacccatctgatgccgactttggtttcccaggcaatgatgacgcggctcgcgcgatctcgctttattgcaacctctttgcggatgcggttctggatggacttgcggaatcaacagcgggcctgggcgttgatcttggcgcatccgccgacatcgcgtcgcttgcagacgctgatgtcaaactggctgacgaagaagctgcgggcgaagcttaa

SEQ ID NO: 30671 - protein, 263 aa, Hyphomonas neptunium ATCC 15444
MALPDFSMRQLLEAGVHFGHQTHRWNPRMKPYIYGERSGIHIMDLSHTVPALHQSLVFVRDTVAKGGRVLFVGTKRQAQEPVAEAAQRCAQYYMNHRWLGGTLTNWSTVSNSIKQLRELNAMFESGGGSGLTKKELLDLQRRRDKLQKSLGGIADMGGLPAAIVVIDTNKEAIAVQEARKLGIPVVAVLDTNCNPSDADFGFPGNDDAARAISLYCNLFADAVLDGLAESTAGLGVDLGASADIASLADADVKLADEEAAGEA

SEQ ID NO: 30672 - DNA, 711 bp, Morus indica
  CDS (1)..(711): transl_table=11
atgacaagacgatactggaacatcaatttggaagagatgatggacgcaggaattcattttggtcatggtactaggaaatggaatcctaaaatggcaccttatatctctgcaaagcgtaaaggtattcatattataaatcttactagaacggctcggtttttatcagaagcttgtgatttagtttttgatgcagcaagcaggggaaaacaattcttaattgttggtaccaaaaataaagcagctgattcagtagcacaggctgcaataaaggctcggtgtcattatgttaataaaaaatggcttggtggtatgttaacgaattggtatactacagaaacgagacttcataagttcagggacttgagaacggaacaaaaaacaggcagactcaaacgccttccgaagagagatgcggctgtgttgaagagacaaatatctcacttgcaaacatatctgggcgggattaaatatatgacagggttacctgatattgtaataattgttgatcagcaagaagaatatacggctcttcaagaatgtatcactttgcgaattccaacgatttgtttaatcgatacaaattgtgacccggatctagcagatatttctattccagcgaatgatgacgctatagcttcaatccgattaattcttaacaaattagtatttgcaatttgtgagggtcgttctagctatatacgaaattcttga

SEQ ID NO: 30673 - protein, 236 aa, Morus indica
MTRRYWNINLEEMMDAGIHFGHGTRKWNPKMAPYISAKRKGIHIINLTRTARFLSEACDLVFDAASRGKQFLIVGTKNKAADSVAQAAIKARCHYVNKKWLGGMLTNWYTTETRLHKFRDLRTEQKTGRLKRLPKRDAAVLKRQISHLQTYLGGIKYMTGLPDIVIIVDQQEEYTALQECITLRIPTICLIDTNCDPDLADISIPANDDAIASIRLILNKLVFAICEGRSSYIRNS

SEQ ID NO: 30674 - DNA, 768 bp, Rhizobium leguminosarum bv. viciae 3841
  CDS (1)..(768): transl_table=11
atggcattgcctgatttttctatgcgccagcttcttgaggcaggcgtccacttcggccaccagacgcatcgctggaacccgaagatgaagccgtacatcttcggcgatcgcaacaacattcacatcatcgatctggcccagaccgttccgatgctgtcgcgcgcccttcaggtcgtcagcgacaccgttgcccgcggcggccgcgttctcttcgtcggcaccaagcgccaggcgtccgagatcattgccgacagcgccaagcgctcggcccagtactacgtcaattcgcgctggctcggcggcatgatgacgaactggaagacgatctccaactcgatccagcgtctgcgcaagctcgacgagatcctgaacggcgaagcccagggcttcaccaagaaggaacgcctgaacctcgagcgcgaacgtgaaaagctggacaaggctcttggcggtattcgcgatatgggcggcacgcccgacctgatgttcatcatcgacaccaacaaggaaaagatcgcgatcgacgaagccaagcgcctcggcatcccggttgtcgccatcatcgactcgaactgcgatccggacctgatcgactatccgatcccgggtaacgacgacgcatcgcgtgcgatcgctctttactgcgagctgatctcccgcgccgcgatcgacggcatcgcgcgtcagcagggctcttccggccgcgatctcggcgcatcctccgaagttccggtcgagccggccctcgaggaagcagccgaaggctga

SEQ ID NO: 30675 - protein, 255 aa, Rhizobium leguminosarum bv. viciae 3841
MALPDFSMRQLLEAGVHFGHQTHRWNPKMKPYIFGDRNNIHIIDLAQTVPMLSRALQVVSDTVARGGRVLFVGTKRQASEIIADSAKRSAQYYVNSRWLGGMMTNWKTISNSIQRLRKLDEILNGEAQGFTKKERLNLEREREKLDKALGGIRDMGGTPDLMFIIDTNKEKIAIDEAKRLGIPVVAIIDSNCDPDLIDYPIPGNDDASRAIALYCELISRAAIDGIARQQGSSGRDLGASSEVPVEPALEEAAEG

SEQ ID NO: 30676 - DNA, 717 bp, Jasminum nudiflorum
  CDS (1)..(717): transl_table=11
atggcaagaagatattggaatatcaatttggaagagatgatggtggccggagttcattttggccatccgactaagcaatggaatcctaaaatggcaccttatatctatgcaaaggtaaagcgtaaaggtattcatattccaaatcttactagaactgctcgttttttatccgaagcctgtgatttggtttttgatgcagcaagtaggggaaaagaattcttaattgttggtaccaaaccgaaagcagctggttcagtagtacgggctgcgataagggcccggtgtcattatgttaataaaaaatggctcggcggtatgttaacgaattggttcactacaaaaacgagacttcatacgttcagggacttgagaatggaacaaaaaacaggaagactcaaccgtcttccgaaaagggacgtagctatgttgaaaagacaattatctcgcttgcaagcatatctgggcgggattcaatatatgacagggttacccgatattgtaattctcgttgatcagcacgaagaatatacggccctacgagagtgtatcactttgggaattccaacaatttgtttaatcgatacaaattgtgaccccgatcttgcagatcttccgattccagcgaatgatgacgctaaaccttcaatccgcttaattcttaacaaattagtattcgcaatttgtgagggtcgttctagctatataagaaatccttga

SEQ ID NO: 30677 - protein, 238 aa, Jasminum nudiflorum
MARRYWNINLEEMMVAGVHFGHPTKQWNPKMAPYIYAKVKRKGIHIPNLTRTARFLSEACDLVFDAASRGKEFLIVGTKPKAAGSVVRAAIRARCHYVNKKWLGGMLTNWFTTKTRLHTFRDLRMEQKTGRLNRLPKRDVAMLKRQLSRLQAYLGGIQYMTGLPDIVILVDQHEEYTALRECITLGIPTICLIDTNCDPDLADLPIPANDDAKPSIRLILNKLVFAICEGRSSYIRNP

SEQ ID NO: 30678 - DNA, 711 bp, Drimys granadensis
  CDS (1)..(711): transl_table=11
atgacaaaaagatattggaacattaatttagaagagatgatggaagcaggagttcattttggtcatggtactaggaaatggaatcctagaatggcaccttacatctctgcaaagcgtaaaggtattcatattacaaatcttactagaactgctcgttttttttcagaagcctgtgatttagtttttgatgcagcaagtaggggaaaacacttcttaatagttggtaccaaaaataaagcagctgattcagtagcatcagctgcaataaaggctcggtgtcattatgttaataaaaaatggctcggtggtatgtcaacgaattggtccactacagaaacgagacttcataagttcagggatttgaaagcggaacaaaaggcggggaaactcaaccgtttaccgaaaagagatgcagcaatgttgaagagacaattatctcacctgcaaacatatttgggtgggatcaaatatatgacgggcttacccgatattgtaatcatcgttgatcagcaagaagaatatacggctcttcgagaatgtctcactttagggattccgacgatttgcttaatcgatacaaattgtaacccagatctcgcagatatttctattccagccaacgatgacgctatagcgtcaatccgattgattcttaacaaattagtatccgcaatttgtgagggtcgttctagctatataagaaatcgttga

SEQ ID NO: 30679 - protein, 236 aa, Drimys granadensis
MTKRYWNINLEEMMEAGVHFGHGTRKWNPRMAPYISAKRKGIHITNLTRTARFFSEACDLVFDAASRGKHFLIVGTKNKAADSVASAAIKARCHYVNKKWLGGMSTNWSTTETRLHKFRDLKAEQKAGKLNRLPKRDAAMLKRQLSHLQTYLGGIKYMTGLPDIVIIVDQQEEYTALRECLTLGIPTICLIDTNCNPDLADISIPANDDAIASIRLILNKLVSAICEGRSSYIRNR

SEQ ID NO: 30680 - DNA, 783 bp, Pediococcus pentosaceus ATCC 25745
  CDS (1)..(783): transl_table=11
atgtctgttatttctatgaaacaattgcttgaagctggtgtacatttcggacaccaaacacgtcgctggaaccctaagatgaagccatttatctttactgaacgtaatggtatttacatcattgatttacaaaaaactgttaaattaattgacaatgcatataacttcgttaaagatgttgctgcaaatgatggtgtagttctttttgttggtacaaagaagcaagcacaaactgctatcgaagaagaagcaaaacgtgctggtcaatactttgttaaccatcgttggttaggtggaactcttacaaactggaacacaatccaaaaacgtatcaagcgtttgaaagatttgaaagcaatggaagaagacggtacatttgatcgtctacctaagaaagaagttgctcttttgaacaagcaaaaagacaagcttgaaaaattcttgggtggtatcgaagatatgcctcatactccagacgtattgtttgttgttgatcctcgtaaggaacaaattgctatcaaggaagctcaaaaattgaatattcctgttgtagctatggtcgacacaaactctgatccagatcaagttgatgttattatcccatcaaatgatgatgctattcgtgccgttcgtttaatcactgctaagatggctgacgctgttatcgaaggtcgccaaggtgaagacgaagaagaagcttcacaagaagtcgctgaaggcgtaagcaaggactctcttgaagacttgaagaagtctgttgaagaaggaagcaacgaagaataa

SEQ ID NO: 30681 - protein, 260 aa, Pediococcus pentosaceus ATCC 25745
MSVISMKQLLEAGVHFGHQTRRWNPKMKPFIFTERNGIYIIDLQKTVKLIDNAYNFVKDVAANDGVVLFVGTKKQAQTAIEEEAKRAGQYFVNHRWLGGTLTNWNTIQKRIKRLKDLKAMEEDGTFDRLPKKEVALLNKQKDKLEKFLGGIEDMPHTPDVLFVVDPRKEQIAIKEAQKLNIPVVAMVDTNSDPDQVDVIIPSNDDAIRAVRLITAKMADAVIEGRQGEDEEEASQEVAEGVSKDSLEDLKKSVEEGSNEE

SEQ ID NO: 30682 - DNA, 783 bp, Oenococcus oeni PSU-1
  CDS (1)..(783): transl_table=11
atggctgcaatttcaatgaaagaacttttagaggctggcgcgcattttggtcatcagacccgtcgctgggatcctcggatggatgaatatatatttacttctcgtaatggtattcatattatcgatttacaaaaaactttacggatggcagacgatgcctataactgggttaagggagaagctgccgacggagctaatttcctgtttgttggtacgaaaaaacaagcgaccgaagcaattgaagaagaggcgaaacgtgccggagtcgcttatgtaaaccatcgctggttgggcggtacattaacaaattggaacacaatcaaaacccgtatcaacaagttgaaggaacttcgcgctgccgaagaggatggtagtttcgacaagcttccaaaaaaggaagcttctcagcttggtaagcaaaaagcaaagttggaaaagttccttggtggaattgcggacatggaagatattcctgatgttatgtttgttgttgacccaaagacagaagaaatcgctgttaaagaagctcgcagtttaaacattccggtagtggcaatgattgataccaatggaaatccagatttggttgatgttaagattcctgcaaatgatgatgcgattcgtgcggttaaattaatcacttccaaaatggctgatgccattattgaaggtcgtcaaggacaggatgccggcgaagattccgcagagaagactttcgccgatactgctgatggcgaaggagattttgaagaatcatcaaataacgaaaatcaagaagcataa

SEQ ID NO: 30683 - protein, 260 aa, Oenococcus oeni PSU-1
MAAISMKELLEAGAHFGHQTRRWDPRMDEYIFTSRNGIHIIDLQKTLRMADDAYNWVKGEAADGANFLFVGTKKQATEAIEEEAKRAGVAYVNHRWLGGTLTNWNTIKTRINKLKELRAAEEDGSFDKLPKKEASQLGKQKAKLEKFLGGIADMEDIPDVMFVVDPKTEEIAVKEARSLNIPVVAMIDTNGNPDLVDVKIPANDDAIRAVKLITSKMADAIIEGRQGQDAGEDSAEKTFADTADGEGDFEESSNNENQEA

SEQ ID NO: 30684 - DNA, 711 bp, Coffea arabica
  CDS (1)..(711): transl_table=11
atgacaagaagatattggaacatcaatttagaagagatgatggaggcaggggttcattttggccatggtactaggaaatggaatcctaaaatggaaccttatatctctgcaaagcgtaagggtattcatattacaaatcttactagaactgctcgttttttatcagaagcttgtgatttggtctttgatgcgggaagtcgaggaaaacaattcttaattgttggtaccaaaaataaagcagcagattcagtagcatgggctgcaataagggcccggtgtcattatgttaataaaaaatggctcggcggtatgttaacgaattggtccactacagaaacgagacttcataagttcagggacttgagaatggaacaaaaaacagggagacttaatcgtcttccaaaaagagatgcagctatgttgaaaagacaattatctcgtttgcaaacatatctgggcgggattaaatatatgacagggttacccgatattgtaatcatcattgatcagcacgaagaatatacggccctacgagagtgtattactttgggaattccaacaatttgtttaatcgatacaaattgcgaccccgatttagcagatatttcgattccggcgaatgatgacgctatatcttcaatccgattaattcttaacaaattagtattcgcaatttgtgagggtcgctctagctatataagaaatccttga

SEQ ID NO: 30685 - protein, 236 aa, Coffea arabica
MTRRYWNINLEEMMEAGVHFGHGTRKWNPKMEPYISAKRKGIHITNLTRTARFLSEACDLVFDAGSRGKQFLIVGTKNKAADSVAWAAIRARCHYVNKKWLGGMLTNWSTTETRLHKFRDLRMEQKTGRLNRLPKRDAAMLKRQLSRLQTYLGGIKYMTGLPDIVIIIDQHEEYTALRECITLGIPTICLIDTNCDPDLADISIPANDDAISSIRLILNKLVFAICEGRSSYIRNP

SEQ ID NO: 30686 - DNA, 777 bp, Leuconostoc mesenteroides subsp. mesenteroides ATCC 8293
  CDS (1)..(777): transl_table=11
atggcagttatttcaatgaaagaactcctcgaagcaggagtacacttcggtcaccaaacacgtcgttgggacccaaagatggacgaatatatctttacagaacgtaatggtattcacatcatcgatttacaaaagacagttaagttagttgacgaagcttataactttattcgtaacgcttctactgatggcgctaacgtattattcgttggtacaaagaaacaagcttctgatgcgattgctgaagaagcaacacgtgctggccaatactatatcaaccatcgttggttgggtggtacattgacaaactggaacactatcaagacacgtatccaacgtttgaaggatttgcaaacaatggccgaagacggtacatttgagcaattgcctaaaaaagaagttgttttgttgaacaagcaacgtgaaaagttggaaaagttcttaggtggtattcaagacatgcctggcttgccagatgtattgtttgttgttgatccaaagaaggaagaaattgccgtcaaggaagcaaacatgttgaatatcccagttgtagctatgatcgatacaaatgctaacccagatgtagtcgatgttaagattcctgctaacgatgatgctattcgtgccgtacgtttgatcacatcaaagattgccgatgctgttattgaaggtcgtcaaggccaagattcagcacctgaagatgcattcgttgaaggtgacgaaaacacagaatcaatcgaagaaattgctaacatcgttgaagaaggcaataactaa

SEQ ID NO: 30687 - protein, 258 aa, Leuconostoc mesenteroides subsp. mesenteroides ATCC 8293
MAVISMKELLEAGVHFGHQTRRWDPKMDEYIFTERNGIHIIDLQKTVKLVDEAYNFIRNASTDGANVLFVGTKKQASDAIAEEATRAGQYYINHRWLGGTLTNWNTIKTRIQRLKDLQTMAEDGTFEQLPKKEVVLLNKQREKLEKFLGGIQDMPGLPDVLFVVDPKKEEIAVKEANMLNIPVVAMIDTNANPDVVDVKIPANDDAIRAVRLITSKIADAVIEGRQGQDSAPEDAFVEGDENTESIEEIANIVEEGNN

SEQ ID NO: 30688 - DNA, 912 bp, Solibacter usitatus Ellin6076
  CDS (1)..(912): transl_table=11
ttgcctgcaatttcgatgaaagaattgctcgaagctggcgttcacttcgggcaccagaccaagcgctggaatcccaagatgaaagaatacatcttcggcgaacgcaacggcatttacattatcgatcttcagaaaactttgaagatgtttaaggacgccgcacgcttcgtcggcgaaatggccgcacaaggcaagaacgtgctcttcgtgggcaccaaacgccaggcgcaggaagcgatcgctgaagaagccaatcgctgccagatgtactacgtcaaccagcgctggctgggcggcctgttgaccaacatgctgacggttcagaagtcgatcaaacggctgaaggaactggaagccatggcttcggtggaaggcggctatgccggccgtcccaagaaggaagtcatccggctggaacgcgaacgcaagcacctggaccagaacctttccggtatcaaggacatgccgggtctgccggacgtcctgttcgtgatcgattccaacaaggaaggcatcgccgtgaaggaagcgcggcgcctgggcatcccggtggttgccatcgtggataccaattgcgatccggacgaagtggattgggtgatcccgggcaatgacgacgccctgcgcgccatccgcctgttcgccagcaagatcgccgacgccgtggtcgaaggccgcgccctggcgaccgagcaggatttcacggccgacaagatcatcagcgacgaaaccccggccgaggaaggcatgatggaatacacggagtacgtggatcccaagtatgccgagaagatcatggcggagagcctgagcatggccgaagagccggctccgccctcgcagcgcaagggccctgcttccgagacagccgaaccggtagccgagccggccgtcaccgagagcggcagctaa

SEQ ID NO: 30689 - protein, 303 aa, Solibacter usitatus Ellin6076
MPAISMKELLEAGVHFGHQTKRWNPKMKEYIFGERNGIYIIDLQKTLKMFKDAARFVGEMAAQGKNVLFVGTKRQAQEAIAEEANRCQMYYVNQRWLGGLLTNMLTVQKSIKRLKELEAMASVEGGYAGRPKKEVIRLERERKHLDQNLSGIKDMPGLPDVLFVIDSNKEGIAVKEARRLGIPVVAIVDTNCDPDEVDWVIPGNDDALRAIRLFASKIADAVVEGRALATEQDFTADKIISDETPAEEGMMEYTEYVDPKYAEKIMAESLSMAEEPAPPSQRKGPASETAEPVAEPAVTESGS

SEQ ID NO: 30690 - DNA, 789 bp, Magnetococcus sp. MC-1
  CDS (1)..(789): transl_table=11
atggctaagtattctgttcgcgaactgttggaagccggtttccattttggtcaccagaccaagcgttggaaccccaaaatgaagcgtcacatcttcggtgcccgcaacggcgtgcatatcatcaacctgcaaaaatcggtggtgatgctgcgtgacgcctgtaattttgtgcgggataccgtgcaaggcgggggtaccgtattgtttgttgggaccaagcgccaagccgttgaattggtctcggcagaagccagacgtaccggtcagttctacgttaaccatcgttggttgggcggcactttgaccaactggcgtaccattcaaggctccatccgtcgtcttaaagagatcgacaaaatgcgtgtggatggcacctttgaggcgttgaccaagcgcgagacccagcagcttgaccgtgaagggcagaagattgagcgtgccctgggtgggatcaaggatatggagcgtcagcccaacttgatcatcgttgtggatacccggaaggagtccatcgctgttaaagaggccaacaaattgggcattcctgtggtggcgttggtggacagcaactgtgaccccgatcctatcgactaccccgttcctggtaacgatgatgctattcgcgccttgaccctgtttatcagcaagatgggtgattctgtgatcgagggcatgcaactggccggtcgtgaaatccccaacagcggcatctctgccggtgagggttctatggaagctcagatgctcagccaagcgggtgaaggcgagatgcagagcgccgaggcctaa

SEQ ID NO: 30691 - protein, 262 aa, Magnetococcus sp. MC-1
MAKYSVRELLEAGFHFGHQTKRWNPKMKRHIFGARNGVHIINLQKSVVMLRDACNFVRDTVQGGGTVLFVGTKRQAVELVSAEARRTGQFYVNHRWLGGTLTNWRTIQGSIRRLKEIDKMRVDGTFEALTKRETQQLDREGQKIERALGGIKDMERQPNLIIVVDTRKESIAVKEANKLGIPVVALVDSNCDPDPIDYPVPGNDDAIRALTLFISKMGDSVIEGMQLAGREIPNSGISAGEGSMEAQMLSQAGEGEMQSAEA

SEQ ID NO: 30692 - DNA, 876 bp, Mycobacterium smegmatis str. MC2 155
  CDS (1)..(876): transl_table=11
atgccgagcgacaaccgacaaccagaagaggtatggctggccatggccgtcgtcaccatgaagcagctgcttgacagcggcgcccacttcgggcatcagacccgtcgttggaatcccaagatgaagcggttcatcttcaccgaccgcaacggcatctacatcatcgacctgcagcagacgctgacctacatcgacaaggcgtacgaattcgtcaaggaaaccgtcgcccacggtggcacggtcctgttcgtcggcaccaagaagcaggcgcaggagtccatcgccgaagaggccacccgcgtcggcatgccgtacgtgaaccagcgctggctcggcggcatgctcaccaacttctccaccgtgcacaagcgcctgcagcgcctcaaggagctcgaggccatggagcagaccggtggcttcgagggtcgcaccaagaaggaaatcctcatgctcacgcgtgagaagaacaagctcgagcgcagcctcggcggtatccgcgacatgcagaaggtgccctcggccgtgtgggtcgtcgacaccaacaaggagcacatcgccgtcggtgaggcccgcaagctgggcatcccggtcatcgcgatcctcgacaccaactgcgatcccgacgtcgtcgactacccgatcccgggcaacgacgacgcgatccgctcggccgcgctgctgaccaaggtgatcgcctccgcggtcgccgagggtctgcaggcccgcgcgggccagggcagcggcgagaagcccgccgaaggtgccgagccgctcgccgagtgggagcaggagctgctcgccggcgcgaccgccggtgctgccgacgcctccgccgaaggcgctgccgcccccgaatcatccactgacgcttcgtaa

SEQ ID NO: 30693 - protein, 291 aa, Mycobacterium smegmatis str. MC2 155
MPSDNRQPEEVWLAMAVVTMKQLLDSGAHFGHQTRRWNPKMKRFIFTDRNGIYIIDLQQTLTYIDKAYEFVKETVAHGGTVLFVGTKKQAQESIAEEATRVGMPYVNQRWLGGMLTNFSTVHKRLQRLKELEAMEQTGGFEGRTKKEILMLTREKNKLERSLGGIRDMQKVPSAVWVVDTNKEHIAVGEARKLGIPVIAILDTNCDPDVVDYPIPGNDDAIRSAALLTKVIASAVAEGLQARAGQGSGEKPAEGAEPLAEWEQELLAGATAGAADASAEGAAAPESSTDAS

SEQ ID NO: 30694 - DNA, 711 bp, Gossypium barbadense
  CDS (1)..(711): transl_table=11
atggcaagaagatattggaacataaatttggaagagatgttggaagcaggagttcattttggtcatggtactaggaaatggaatcctagaatggcgccatatatctctgcaaaacgtaagggtattcatattacaaatctgactagaaccgctcgttttttatcagaagcttgtgatttagtttttgatgcagcaagtaagggaaaacaattcttaattgttggtaccaaaaataaagccgctgattcggtggcgcgggctgcaataagggctcggtgtcattatgttaataaaaaatggctcggtggtatgttaacaaattggcccactacagaaacgaggcttcataagttcagggacttgagaacagaacaaaagacggggggactcaaccgtcttccgaaaagagatgcagctatgttgaagagacaattatctcgcttgcaaacatatctgggcgggattaaatatatgacgagattgcctgatattgtaatcatcgttgatcagcaagaagaatatacggctctgcgagaatgtatcactttgggaattccaacaatttgtttaatcgatacaaatagcgatcccgatctcgcagatatttcgattccagcaaatgatgacgctatagcttcaattcgattaattcttaacaaattagtagtcgcaatttgtgagggtcgttctagctatatacgaaatccttga

SEQ ID NO: 30695 - protein, 236 aa, Gossypium barbadense
MARRYWNINLEEMLEAGVHFGHGTRKWNPRMAPYISAKRKGIHITNLTRTARFLSEACDLVFDAASKGKQFLIVGTKNKAADSVARAAIRARCHYVNKKWLGGMLTNWPTTETRLHKFRDLRTEQKTGGLNRLPKRDAAMLKRQLSRLQTYLGGIKYMTRLPDIVIIVDQQEEYTALRECITLGIPTICLIDTNSDPDLADISIPANDDAIASIRLILNKLVVAICEGRSSYIRNP

SEQ ID NO: 30696 - DNA, 924 bp, Nocardioides sp. JS614
  CDS (1)..(924): transl_table=11
atggcagtcgtgaccatgcgccagcttctcgagagcggcgtgcacttcgggcaccagacccgtcgctggaacccgaagatgaagcgcttcatcatgaccgagcgcaacggcatctacatcatcgacctgcagcagtcgttggcctacatcgaccggtcctacgccttcgtcaaggagacggtggccaagggcggcacgatcatgttcgtcggcaccaagaagcaggcccaggaggcgatcgccgagcaggcgacccgggtcggcatgccgtacgtcaaccagcgctggctcggcggcatgctcacgaacttctcgacggtgcaccagcggatcaaccgcctcaaggagctcgacgagatcgacttcgacgacgtggccggcagcagccgcaccaagaaggagctgctgcagatgcgccgcgagcgcgacaagctgaacaagtcgctcggcggcatccgcgagatgacgcggaccccctccgccgtctggatcgtcgacaccaacaaggagcacctggcggtcgaggaggcgcgcaagctgcgcatcccgatcatcggcatcctggactccaactgcgaccccgacctggtcgacttcccgatcccgggcaacgacgacgcgatccgcgcggtcggcctgctgacccgcgtggtcgccgacgccgtcgcggagggcctgatcgcccgctcgggcgtcaaggccggcgagggcgccgaggccgtgggcgccgaggagccgttggccgagtgggagcgcgagctgctgggcggcgaggccgagcaggccgcggtcgacgcgaccggcggtgccgccaccgaggagacccctgccgcggagtcgaccggtgcggccagcgaggctgcagcggtcagcgaggcggccgagcctgccaccgagcagccggccgccgacgccgaggcctga

SEQ ID NO: 30697 - protein, 307 aa, Nocardioides sp. JS614
MAVVTMRQLLESGVHFGHQTRRWNPKMKRFIMTERNGIYIIDLQQSLAYIDRSYAFVKETVAKGGTIMFVGTKKQAQEAIAEQATRVGMPYVNQRWLGGMLTNFSTVHQRINRLKELDEIDFDDVAGSSRTKKELLQMRRERDKLNKSLGGIREMTRTPSAVWIVDTNKEHLAVEEARKLRIPIIGILDSNCDPDLVDFPIPGNDDAIRAVGLLTRVVADAVAEGLIARSGVKAGEGAEAVGAEEPLAEWERELLGGEAEQAAVDATGGAATEETPAAESTGAASEAAAVSEAAEPATEQPAADAEA

SEQ ID NO: 30698 - DNA, 756 bp, Azoarcus sp. BH72
  CDS (1)..(756): transl_table=11
atgactgtcacgatgcgtcagatgctcgaagcgggcgtccacttcggccaccagacccgtttctggaatccgcgcatggccccgtacatcttcggccagcgcaacaagatccacatcgtcaacctcgaaaagacgatggtgaagtacaacgaagcgatgaacttcgtgcgcaagctcgccgccaaccgcggcaccatcctgttcgtctccaccaagcgccaggcgcgcgagatcctcgccgaggaagcccgccgtgccggcatgccctacgttgacgagcgctggctgggcggcatgctgaccaacttcaagacggtcaagcagtcgatcaagcgcctgaaggaagtcgaggccatgatcgaggacggctcgatcgagcgcctgtccaagcgtgaagccctgaccgtgacccgcgaactcgaaaagctgcagaagagcatcggcggcatcaaggacatgggcggcctgccggacgcgatcttcatcatcgacgtcggctaccacaagatcgccgtgaccgaagcccagaagctgggcatcccggtcgtgggcgtggtcgataccaaccactcgccggaaggcatcgactacatcatcccgggcaacgacgactcctcgcgcgccatccgcctgtacgcccgtggcgtggccgacgccgtgctggaaggccgcagccaggtgctgcaggaaatcgtcgccgccggcggtgacgaattcgtcgaagtcgaagaaggcagccaggaacagcagggctga

SEQ ID NO: 30699 - protein, 251 aa, Azoarcus sp. BH72
MTVTMRQMLEAGVHFGHQTRFWNPRMAPYIFGQRNKIHIVNLEKTMVKYNEAMNFVRKLAANRGTILFVSTKRQAREILAEEARRAGMPYVDERWLGGMLTNFKTVKQSIKRLKEVEAMIEDGSIERLSKREALTVTRELEKLQKSIGGIKDMGGLPDAIFIIDVGYHKIAVTEAQKLGIPVVGVVDTNHSPEGIDYIIPGNDDSSRAIRLYARGVADAVLEGRSQVLQEIVAAGGDEFVEVEEGSQEQQG

SEQ ID NO: 30700 - DNA, 729 bp, Neisseria meningitidis FAM18
  CDS (1)..(729): transl_table=11
atgtctcaaattactatgcgtcagatgattgaagccggtgtccacttcggccaccaaacccgtttctggaacccgaaaatggctcaatacattttcggtgcgcgcaacaaaatccatatcgtcaacctggaaaaaaccctgccgatgttccaagacgcgcaagaagccgtacgtcgtctggttgccaacaaaggtacagtattgttcgtaggtaccaaacgccaagcccgcgacatcatccgcgaagaagcgacccgcgccggcatgcctttcgtcgatcaccgttggttgggcggtatgctgaccaactacaaaaccgttaagcaatccatcaaacgcctggaagaaaaaaccgcagccttggaaaatgctgccgaaagcggtttcagcaaaaaagaaattctggaaatgcaacgcgatgttgaaaaactggaacgttctttgggcggtatcaaaaacatgaaaggcctgcccgacgcgattttcgttatcgataccggctaccaaaaaggtactctggtcgaggctgaaaaactgggcatccccgttatcgccgtagtcgataccaacaacagccctgacggcgtgaaatacgtcatccccggcaacgacgactccgccaaagccatccgcctgtactgccgcggcatcgctgacgcagttttggaaggcaaaaaccaagcgctgcaagaaaccgtagccgctgcccaagaagccgctgccgagtaa

SEQ ID NO: 30701 - protein, 242 aa, Neisseria meningitidis FAM18
MSQITMRQMIEAGVHFGHQTRFWNPKMAQYIFGARNKIHIVNLEKTLPMFQDAQEAVRRLVANKGTVLFVGTKRQARDIIREEATRAGMPFVDHRWLGGMLTNYKTVKQSIKRLEEKTAALENAAESGFSKKEILEMQRDVEKLERSLGGIKNMKGLPDAIFVIDTGYQKGTLVEAEKLGIPVIAVVDTNNSPDGVKYVIPGNDDSAKAIRLYCRGIADAVLEGKNQALQETVAAAQEAAAE

SEQ ID NO: 30702 - DNA, 753 bp, Acidovorax sp. JS42
  CDS (1)..(753): transl_table=11
atgtccgtcaccatgcgtgaaatgctggaagccggtgtccactttggccaccaaacgcgcttctggaaccccaagatggcccccttcatcttcggccatcgcaacaagattcacatcatcaacctggaaaagtcgctgccgatgttccaggaggcgcagaagttcgccaagcagttggccgccaaccgcggcacgatcctgatggtcggcaccaagcgccaggcccgcgaactggtggccgagcaggcccagcgcgctggcgtgccctatgttgaccagcgctggctgggcggcatgctgaccaacttcaagaccgtcaagacctccatcaagcgcctgaaggacatgaaggcacagcaggaagccggcctggagtccatgagcaagaaggagcagctgatgttctcgcgcgaactggaaaagctcgagaaggacatcgggggcattcaggacatggctgcgctgcccgacgctatcttcgtgatcgacgtgggctaccacaagatcgccgtgtccgaagccaagaagctgggtatcccgctgatcggtgtggtggattccaaccactcgcccgagggtattgactacgtgatcccgggtaacgacgactcggccaaggctgtggctctgtacgcccgcggcatcgccgacgctatccttgaaggccgtgccaacgccgtgacggaagtggccaaggctgtggctgccgaaggctccgacgaattcgtggaagtggacgagaacgccgcctaa

SEQ ID NO: 30703 - protein, 250 aa, Acidovorax sp. JS42
MSVTMREMLEAGVHFGHQTRFWNPKMAPFIFGHRNKIHIINLEKSLPMFQEAQKFAKQLAANRGTILMVGTKRQARELVAEQAQRAGVPYVDQRWLGGMLTNFKTVKTSIKRLKDMKAQQEAGLESMSKKEQLMFSRELEKLEKDIGGIQDMAALPDAIFVIDVGYHKIAVSEAKKLGIPLIGVVDSNHSPEGIDYVIPGNDDSAKAVALYARGIADAILEGRANAVTEVAKAVAAEGSDEFVEVDENAA

SEQ ID NO: 30704 - DNA, 801 bp, Magnetospirillum magnetotacticum MS-1
  CDS (1)..(801): transl_table=11
atggctctgcccacgttcaccatgcgccagctcgtcgaagccggtgtgcatttcggtcacaacacccgccgctggaacccgaagatggcctcgtacctcttcggcatccgcaacggcatccacatcatcgacctgcagcagagcgtgcccatgctgcaccgcgccatgcaggccgtgcgcgacgtgaccgctggcggtggccgcgttctgttcgtcggcaccaagcaccaggcctccgaagtggtagccgaatccgccaagcgttgcggccagtacttcgtgaaccatcgctggctcggcggcatgctgaccaactggaagaccatctccaactccatccgccgcctgcgcgagctggacgagcagctggcttccggcgccctggctggtctgaccaagaaggagcagctggtcctgtcgcgcgagaaggagaagctggaccgcgcgctcggcggcatcaaggatatgggcggcctgcccgatatcctgttcatcatcgacaccaacaaggaagccctggctgttcaggaagccaacaagctgggcattccggtggtggcgatcatcgactccaactgcgatccggctggcatcacctatccgatccccggcaatgacgacgccatccgcgccatccagacctattgcgatctgatgtcgggcgccgttctggacggcatccaggccgagatcacccgtggcggcggcgacgtcggcgcttcggccgaggctccggtcgagcagattccggaagtggtcgccgaggcggccgccgaggaagccgccgctccgcaggcctag

SEQ ID NO: 30705 - protein, 266 aa, Magnetospirillum magnetotacticum MS-1
MALPTFTMRQLVEAGVHFGHNTRRWNPKMASYLFGIRNGIHIIDLQQSVPMLHRAMQAVRDVTAGGGRVLFVGTKHQASEVVAESAKRCGQYFVNHRWLGGMLTNWKTISNSIRRLRELDEQLASGALAGLTKKEQLVLSREKEKLDRALGGIKDMGGLPDILFIIDTNKEALAVQEANKLGIPVVAIIDSNCDPAGITYPIPGNDDAIRAIQTYCDLMSGAVLDGIQAEITRGGGDVGASAEAPVEQIPEVVAEAAAEEAAAPQA

SEQ ID NO: 30706 - DNA, 882 bp, Bifidobacterium longum DJO10A
  CDS (1)..(882): transl_table=11
  misc_feature (701)..(701): n is a, g, c or t
  misc_feature (702)..(702): n is a, g, c or t
  misc_feature (703)..(703): n is a, g, c or t
  misc_feature (704)..(704): n is a, g, c or t
  misc_feature (705)..(705): n is a, g, c or t
  misc_feature (706)..(706): n is a, g, c or t
  misc_feature (707)..(707): n is a, g, c or t
  misc_feature (708)..(708): n is a, g, c or t
  misc_feature (709)..(709): n is a, g, c or t
  misc_feature (710)..(710): n is a, g, c or t
  misc_feature (711)..(711): n is a, g, c or t
  misc_feature (712)..(712): n is a, g, c or t
  misc_feature (713)..(713): n is a, g, c or t
  misc_feature (714)..(714): n is a, g, c or t
  misc_feature (715)..(715): n is a, g, c or t
  misc_feature (716)..(716): n is a, g, c or t
  misc_feature (717)..(717): n is a, g, c or t
  misc_feature (718)..(718): n is a, g, c or t
  misc_feature (719)..(719): n is a, g, c or t
  misc_feature (720)..(720): n is a, g, c or t
  misc_feature (721)..(721): n is a, g, c or t
  misc_feature (722)..(722): n is a, g, c or t
  misc_feature (723)..(723): n is a, g, c or t
  misc_feature (724)..(724): n is a, g, c or t
  misc_feature (725)..(725): n is a, g, c or t
  misc_feature (726)..(726): n is a, g, c or t
  misc_feature (727)..(727): n is a, g, c or t
  misc_feature (728)..(728): n is a, g, c or t
  misc_feature (729)..(729): n is a, g, c or t
  misc_feature (730)..(730): n is a, g, c or t
  misc_feature (731)..(731): n is a, g, c or t
  misc_feature (732)..(732): n is a, g, c or t
  misc_feature (733)..(733): n is a, g, c or t
  misc_feature (734)..(734): n is a, g, c or t
  misc_feature (735)..(735): n is a, g, c or t
  misc_feature (736)..(736): n is a, g, c or t
  misc_feature (737)..(737): n is a, g, c or t
  misc_feature (738)..(738): n is a, g, c or t
  misc_feature (739)..(739): n is a, g, c or t
  misc_feature (740)..(740): n is a, g, c or t
  misc_feature (741)..(741): n is a, g, c or t
  misc_feature (742)..(742): n is a, g, c or t
  misc_feature (743)..(743): n is a, g, c or t
  misc_feature (744)..(744): n is a, g, c or t
  misc_feature (745)..(745): n is a, g, c or t
  misc_feature (746)..(746): n is a, g, c or t
  misc_feature (747)..(747): n is a, g, c or t
  misc_feature (748)..(748): n is a, g, c or t
  misc_feature (749)..(749): n is a, g, c or t
  misc_feature (750)..(750): n is a, g, c or t
atggctcagatcactatgagcgatatgctgaaggctggcctgcacttcggccaccagacccgtcgttggaacccgaagatgaagcagttcatcctcacccagcgcaacggcatccacatcatcaacctgttcaagtcgctcgacatgatcgacaaggcgtacgacttcatcaagaccaccgtggcccacaacggcaccgtgctcttcgtcggcaccaagaagcaggctcaggaagctatcgccaaccaggccacccgcgtgaacatgccctacgtctccgagcgttggctcggcggcatgctgaccaacttccagaccgtctccaagcgcgtcaaccgcctcaaggaacttgaggaaatggacttcaccgacgtgcacggctccggcctgaccaagaaggagctcctcctgctcgagcgcgagaaggacaagctcaacaagcagctgggcggtatccgcaacatgaaccgcaccccgtccgcgatgttcgtcgtcgacatcaccaaggaagccctggctgttgaggaagctcacaagctgggtatcccggttgtcgccatcgtcgacaccaacgccgacccggacaccgttgagtacccgatcccggccaacgatgacgccatccgcggcatcgaactgctgaccagcctgatggctgacgccgtcgccgaaggtctgctggagcgctccggcgccaacannnnnnnnnnnnnnnnnnnnnnnnnnnnnnnnnnnnnnnnnnnnnnnnnngagaaggaactcctgacaacgaggctcctgccgaggcttccgctgaagccgccgctccggctgccgccgagggcgaaaccgccgaggcccccaaggccgagtgatgctctacgatgggaagtgcctgaataa

SEQ ID NO: 30707 - protein, 293 aa, Bifidobacterium longum DJO10A
  misc_feature (234)..(234): The Xaa at location 234 stands for Arg, Asn, Ile, Lys, Met, Ser, or Thr.
  misc_feature (235)..(235): The Xaa at location 235 stands for Stop, Ala, Arg, Asn, Asp, Cys, Gln, Glu, Gly, His, Ile, Leu, Lys, Met, Phe, Pro, Ser, Thr, Trp, Tyr, or Val.
  misc_feature (236)..(236): The Xaa at location 236 stands for Stop, Ala, Arg, Asn, Asp, Cys, Gln, Glu, Gly, His, Ile, Leu, Lys, Met, Phe, Pro, Ser, Thr, Trp, Tyr, or Val.
  misc_feature (237)..(237): The Xaa at location 237 stands for Stop, Ala, Arg, Asn, Asp, Cys, Gln, Glu, Gly, His, Ile, Leu, Lys, Met, Phe, Pro, Ser, Thr, Trp, Tyr, or Val.
  misc_feature (238)..(238): The Xaa at location 238 stands for Stop, Ala, Arg, Asn, Asp, Cys, Gln, Glu, Gly, His, Ile, Leu, Lys, Met, Phe, Pro, Ser, Thr, Trp, Tyr, or Val.
  misc_feature (239)..(239): The Xaa at location 239 stands for Stop, Ala, Arg, Asn, Asp, Cys, Gln, Glu, Gly, His, Ile, Leu, Lys, Met, Phe, Pro, Ser, Thr, Trp, Tyr, or Val.
  misc_feature (240)..(240): The Xaa at location 240 stands for Stop, Ala, Arg, Asn, Asp, Cys, Gln, Glu, Gly, His, Ile, Leu, Lys, Met, Phe, Pro, Ser, Thr, Trp, Tyr, or Val.
  misc_feature (241)..(241): The Xaa at location 241 stands for Stop, Ala, Arg, Asn, Asp, Cys, Gln, Glu, Gly, His, Ile, Leu, Lys, Met, Phe, Pro, Ser, Thr, Trp, Tyr, or Val.
  misc_feature (242)..(242): The Xaa at location 242 stands for Stop, Ala, Arg, Asn, Asp, Cys, Gln, Glu, Gly, His, Ile, Leu, Lys, Met, Phe, Pro, Ser, Thr, Trp, Tyr, or Val.
  misc_feature (243)..(243): The Xaa at location 243 stands for Stop, Ala, Arg, Asn, Asp, Cys, Gln, Glu, Gly, His, Ile, Leu, Lys, Met, Phe, Pro, Ser, Thr, Trp, Tyr, or Val.
  misc_feature (244)..(244): The Xaa at location 244 stands for Stop, Ala, Arg, Asn, Asp, Cys, Gln, Glu, Gly, His, Ile, Leu, Lys, Met, Phe, Pro, Ser, Thr, Trp, Tyr, or Val.
  misc_feature (245)..(245): The Xaa at location 245 stands for Stop, Ala, Arg, Asn, Asp, Cys, Gln, Glu, Gly, His, Ile, Leu, Lys, Met, Phe, Pro, Ser, Thr, Trp, Tyr, or Val.
  misc_feature (246)..(246): The Xaa at location 246 stands for Stop, Ala, Arg, Asn, Asp, Cys, Gln, Glu, Gly, His, Ile, Leu, Lys, Met, Phe, Pro, Ser, Thr, Trp, Tyr, or Val.
  misc_feature (247)..(247): The Xaa at location 247 stands for Stop, Ala, Arg, Asn, Asp, Cys, Gln, Glu, Gly, His, Ile, Leu, Lys, Met, Phe, Pro, Ser, Thr, Trp, Tyr, or Val.
  misc_feature (248)..(248): The Xaa at location 248 stands for Stop, Ala, Arg, Asn, Asp, Cys, Gln, Glu, Gly, His, Ile, Leu, Lys, Met, Phe, Pro, Ser, Thr, Trp, Tyr, or Val.
  misc_feature (249)..(249): The Xaa at location 249 stands for Stop, Ala, Arg, Asn, Asp, Cys, Gln, Glu, Gly, His, Ile, Leu, Lys, Met, Phe, Pro, Ser, Thr, Trp, Tyr, or Val.
  misc_feature (250)..(250): The Xaa at location 250 stands for Stop, Ala, Arg, Asn, Asp, Cys, Gln, Glu, Gly, His, Ile, Leu, Lys, Met, Phe, Pro, Ser, Thr, Trp, Tyr, or Val.
MAQITMSDMLKAGLHFGHQTRRWNPKMKQFILTQRNGIHIINLFKSLDMIDKAYDFIKTTVAHNGTVLFVGTKKQAQEAIANQATRVNMPYVSERWLGGMLTNFQTVSKRVNRLKELEEMDFTDVHGSGLTKKELLLLEREKDKLNKQLGGIRNMNRTPSAMFVVDITKEALAVEEAHKLGIPVVAIVDTNADPDTVEYPIPANDDAIRGIELLTSLMADAVAEGLLERSGANXXXXXXXXXXXXXXXXXEKELLTTRLLPRLPLKPPLRLPPRAKPPRPPRPSDALRWEVPE

SEQ ID NO: 30708 - DNA, 717 bp, Actinobacillus pleuropneumoniae serovar 1 str. 4074
  CDS (1)..(717): transl_table=11
atggcacaagtttctatgcgcgatatgcttaacgcgggcgttcactatggtcaccaaactcgttactggaacccaaaaatgaaaccgttcattttcggtgcgcgtaacggtgttcacgtaatcaacttagaaaaaactttacctttattcaacgaagctttagcggaattaactcgcatttcaagcaacaacggtaaaattttattcgtaggtacaaaacgtgcagcgtctgaagcggttaaagcagcagcagtagattgccaacaattctacgtaaaccaccgttggttaggtggtatgctaactaactggaaaacagttcgtcagtcaatcaaacgtttaaaagatttagaaactcaaactcaagacggtacttttgacaaaatcactaaaaaagaagcgttaatgcgtactcgtgagttagaaaaattagagttaagcttaggcggtatcaaagatatggcaggtcttcctgatgcgattttcgtaatcggtgccgaccacgaacatatcgcaatcaaagaagcaaacaatttaggtattccggtatttgctatcgttgatacaaactctactccggacggcgttaattacatcatcccgggtaacgatgacgcaacacgtgcaatccaactttacttagatgcagcagctgcagcagttaaagaaggtcgcggttcaaacgttgaagctgagttagaagcgacagctgaataa

SEQ ID NO: 30709 - protein, 238 aa, Actinobacillus pleuropneumoniae serovar 1 str. 4074
MAQVSMRDMLNAGVHYGHQTRYWNPKMKPFIFGARNGVHVINLEKTLPLFNEALAELTRISSNNGKILFVGTKRAASEAVKAAAVDCQQFYVNHRWLGGMLTNWKTVRQSIKRLKDLETQTQDGTFDKITKKEALMRTRELEKLELSLGGIKDMAGLPDAIFVIGADHEHIAIKEANNLGIPVFAIVDTNSTPDGVNYIIPGNDDATRAIQLYLDAAAAAVKEGRGSNVEAELEATAE

SEQ ID NO: 30710 - DNA, 702 bp, Bacillus anthracis str. A2012
  CDS (1)..(702): transl_table=11
  misc_feature (233)..(233): w is a or t
atgtcagtaatttctatgaagcaattgcttgaagctggtgttcatttcggacatcaaactcgtcgttggaacccaaaaatgaagcgttacattttcacagagcgtaacggtatctacatcatcgacttacaaaaaactgtgaaaaaagttgaggaagctttcaaagttatgcgtgacatcgctgctgaaggcggagacatcttattcgtaggtactaaaaaacaagcacaagwagctattaaagaagaagcaactcgtgctggtatgtacttcgttaaccaacgttggttaggtggaactttaactaacttccaaacaatccaaaagcgtatcaagcgtcttaaagacatcgaaagaatgcaagaagatggtactttcgaagtactacctaagaaagaagttgttcaacttaaaaaagagttagagcgtcttgagaaattcttaggcggtattaaagatatgaaaggtcttccaagtgcattattcgtagtagaccctcgtaaagagcgtattgcagttgctgaagcacgcaaattacacattccaatcatcggtatcgttgatacaaactgtgatccagacgaaatcgatcacgttatcccagcaaacgatgatgcaattcgtgctgtaaaacttcttacatctaaaatggcagacgcgatccttgaagcaaaacaaggtgaagaaactgttactgcgtaa

SEQ ID NO: 30711 - protein, 233 aa, Bacillus anthracis str. A2012
  misc_feature (78)..(78): The Xaa at location 78 stands for Glu, or Val.
MSVISMKQLLEAGVHFGHQTRRWNPKMKRYIFTERNGIYIIDLQKTVKKVEEAFKVMRDIAAEGGDILFVGTKKQAQXAIKEEATRAGMYFVNQRWLGGTLTNFQTIQKRIKRLKDIERMQEDGTFEVLPKKEVVQLKKELERLEKFLGGIKDMKGLPSALFVVDPRKERIAVAEARKLHIPIIGIVDTNCDPDEIDHVIPANDDAIRAVKLLTSKMADAILEAKQGEETVTA

SEQ ID NO: 30712 - DNA, 735 bp, Exiguobacterium sibiricum 255-15
  CDS (1)..(735): transl_table=11
atggcagtaatctcgatgaaacaattgttagaagctggtgtacacttcggtcaccaaacacgccgttggaacccaaaaatggcaaaatacatcttcacagaacgtaacggaatctacatcattgacctacaaaaaacggttaaaaaagtagacgaagcttacaacttcatccgtgaagtagcgtctgaaggcggaaacgttcttttcgttggtacgaaaaaacaagctcaagacactgtgaaagaagaagcgatccgtgcaggtcaatacttcatcaacgaacgttggttaggtggaacactcacgaacttctctacaatcaaaaaacgtatcaaccgtttaaaacaactcgaaaaaatggaagagaacggtacattcgaagttcttcctaaaaaagaagtcatcattcttaaaaaagaaatgactcgtcttgagaaattcctcggcggtatcaaagatatgccaggcgttccagatgcactcttcatcgttgacccacgcaaagagcgtatcgcgattgcagaagcacacaaactcaacatcccaatcgttgcgatcgttgacacaaactgtgatccggacgaaatcgactacgtcatcccagcaaacgacgatgcgatccgtgcagtcaaattgcttactggtaaaatggctgacgcaatcctcgaagttaaacaaggcgaagataacgtagcacctgaaactactgaagaagtagtagcagacgctgagtaa

SEQ ID NO: 30713 - protein, 244 aa, Exiguobacterium sibiricum 255-15
MAVISMKQLLEAGVHFGHQTRRWNPKMAKYIFTERNGIYIIDLQKTVKKVDEAYNFIREVASEGGNVLFVGTKKQAQDTVKEEAIRAGQYFINERWLGGTLTNFSTIKKRINRLKQLEKMEENGTFEVLPKKEVIILKKEMTRLEKFLGGIKDMPGVPDALFIVDPRKERIAIAEAHKLNIPIVAIVDTNCDPDEIDYVIPANDDAIRAVKLLTGKMADAILEVKQGEDNVAPETTEEVVADAE

SEQ ID NO: 30714 - DNA, 762 bp, Prosthecochloris aestuarii DSM 271
  CDS (1)..(762): transl_table=11
atgcagacacagacaatgtcacgattcagccttgaagatatgcttcgggccggtgtacactttggtcatctcgcacgccgctggtgcccgaagatgaagccgttcatctttatggagaagaacggtgttcacatcatcgatctcaagaaaaccctttacatggcagaagacgcgatgaaagccatcgacgccatcgccctgacaggcaaagagatcatgtttgtcggtaccaaaaaacaggcaaaaaatattatctcggcagaagctgagcgcgcaggcatgccgtttgtctctgagcgctggctgggcggtatgctcaccaacttctccacaatccgtcagagcatccgcaggatgaacgctatcgacaggatggaaaccgacggaacgtttgacatgatcaccaagaaagagcgtttgatgctcatgcgcgaaaaagacaagctcttcagaattcttggcggtatctccaatatgacccgtcttccggctgccctttttatcgtcgatatcaagaaagagcacatcgcgataaaagaagcccgttcgcttggtattccgatttttgctctggtcgataccaattgcgatccggatgaggtcgattacgttattcctgccaacgacgatgctatccgttcgatcgaacttatggtcaaagccgttgccgattccattctcaacgctcgtcagcaggtgatcgaggcagaggctatggaagaagccgaagaaaaggcagtgaacgaagccgcagcagagtaa

SEQ ID NO: 30715 - protein, 253 aa, Prosthecochloris aestuarii DSM 271
MQTQTMSRFSLEDMLRAGVHFGHLARRWCPKMKPFIFMEKNGVHIIDLKKTLYMAEDAMKAIDAIALTGKEIMFVGTKKQAKNIISAEAERAGMPFVSERWLGGMLTNFSTIRQSIRRMNAIDRMETDGTFDMITKKERLMLMREKDKLFRILGGISNMTRLPAALFIVDIKKEHIAIKEARSLGIPIFALVDTNCDPDEVDYVIPANDDAIRSIELMVKAVADSILNARQQVIEAEAMEEAEEKAVNEAAAE

SEQ ID NO: 30716 - DNA, 1104 bp, Kineococcus radiotolerans SRS30216
  CDS (1)..(1104): transl_table=11
gtgacatcgcgtccccgctccccgcgtcagcgcggggggagcaccctctcggtccacccggtccccgggtggtcgggtgcgtcccggggaccaggcgcggcggaccgaccggtccgcggcggagcaaccgatcggccccgcgcggggccggcacgaggaggaccacccatggccgtcgtgacgatgcgccagctgctcgagtccggtgtgcacttcgggcaccagacccgccgctggaaccccaagatgaagcgcttcctcttcaccgagcgcaacggcatctacatcatcgacctgcagcagtcgctgtcgttcatcgaccgcgcctacgacttcgtgaaggagaccgtcgcccacggcggttccatcatgttcatcggcacgaagaagcaggcccaggagtccatcgccgagcaggcccgccgcgtgggcatgcccttcgtgaaccagcgctggctcggcgggatgctgaccaacttccagaccgtcaacaagcgcatcgcccgcatgcgcgagctcgagcaggtcgacttcgacgacgtggccggctccggtctcacgaagaaggaactgctcgtgctgcgtcgcgagtacgacaagctgaccaagaccctcggcggcatccgcgagatgacgaaggtcccctccgcggtgtggatcgtcgacaccaacaaggagcacctcgccgtcgacgaggccaagaagctgaacatccccgtcgtcgcgatcctcgactccaactgcgacccggacgacgtggactaccgcatccccggcaacgacgacgcgatccgctccgtcacgctgctgacccgcgtcatcgccgacgccgtggccgagggtctgcaggtccgccacggcggcaagtccgacgcggccgagccgctcgcggcctgggagcaggacctgctcgccggcgacgagggcgtgcagtccggcggctccgagtccgtggcgaccgtcgagggctccaccgcccccgaggccgcgcaggccgaggccgccgagggtcagcccgccgaggcggctgcggaggccggcgacaccgccgaggcccccgtcgccggcgacgaggctcccgccgaggccgctgcccaggtctga

SEQ ID NO: 30717 - protein, 367 aa, Kineococcus radiotolerans SRS30216
MTSRPRSPRQRGGSTLSVHPVPGWSGASRGPGAADRPVRGGATDRPRAGPARGGPPMAVVTMRQLLESGVHFGHQTRRWNPKMKRFLFTERNGIYIIDLQQSLSFIDRAYDFVKETVAHGGSIMFIGTKKQAQESIAEQARRVGMPFVNQRWLGGMLTNFQTVNKRIARMRELEQVDFDDVAGSGLTKKELLVLRREYDKLTKTLGGIREMTKVPSAVWIVDTNKEHLAVDEAKKLNIPVVAILDSNCDPDDVDYRIPGNDDAIRSVTLLTRVIADAVAEGLQVRHGGKSDAAEPLAAWEQDLLAGDEGVQSGGSESVATVEGSTAPEAAQAEAAEGQPAEAAAEAGDTAEAPVAGDEAPAEAAAQV

SEQ ID NO: 30718 - DNA, 801 bp, Xylella fastidiosa Ann-1
  CDS (1)..(801): transl_table=11
atgcctcaagtgacgatgcgtcagatgttggaagctggggtccattttggccaccagacccgttaccgtcatcccaagatgtcacctaacatctttggtgcccgcggtaaaattcacatcatcaatctcgaaaaaaccgttcctctgttcaacgatgcgatgaacttcctttccgcagttgcacagaagcgcggaagcgttctgtttgtggggaccaagcgcagtgcgcgggatgcgatcaaggaagaggccgaacgttgtggtatgccttacatgatccagcgttggctcggtggcacgttgactaacttccgtacggtgaagcaatcggttgcccgtctgaaggagctcgagctagccgagacagacggcactttcagcaagctggtgaagcacgaagtgctgagattgcgccgtgagtccggtaaattgcaggcttcgctgggtggtattaaggatatgaaccgtattcctgatgcaatcttcgtgatcgatattggtcatgaggatattgcgatcaaggaggctaagaagctcggcattccagttgtggcagtggtggataccaattacgatccttcacttgtggattacccgattcctggcaatgacgatgctatccgtgccgtacagctctatgcgcgtgccgctgccgatgctgttttggaaggtaaggcggcgatgccaaatgctgttgctgtgcgcgaggaagagtttgcttctgccccagatgcgggcaagaagggccgtcaagctcagcccaagaagggtaaaagggctagcgacgctgcggctgagtaa

SEQ ID NO: 30719 - protein, 266 aa, Xylella fastidiosa Ann-1
MPQVTMRQMLEAGVHFGHQTRYRHPKMSPNIFGARGKIHIINLEKTVPLFNDAMNFLSAVAQKRGSVLFVGTKRSARDAIKEEAERCGMPYMIQRWLGGTLTNFRTVKQSVARLKELELAETDGTFSKLVKHEVLRLRRESGKLQASLGGIKDMNRIPDAIFVIDIGHEDIAIKEAKKLGIPVVAVVDTNYDPSLVDYPIPGNDDAIRAVQLYARAAADAVLEGKAAMPNAVAVREEEFASAPDAGKKGRQAQPKKGKRASDAAAE

SEQ ID NO: 30720 - DNA, 777 bp, Streptococcus suis 89/1591
  CDS (1)..(777): transl_table=11
atggcagtaatttcaatgaaacaacttcttgaggctggtgtacacttcggtcaccaaactcgtcgctggaatcctaagatggctaagtacatcttcacagagcgtaacggtatccacgttatcgacttgcaacaaactgtaaaattggctgaccaagcttacgaattcatccgtgacgctgcagcaaacgacgcagttatcttgttcgtaggtacaaaaaaacaagctgctgaagctgttaaagacgaagctatccgcgctggtcaatacttcatcaaccaccgttggttgggtggaactcttacaaactggggtacaatccaaaaacgtattgctcgtttgaaagaaatcaaccgtatggaagaagatggaactttggacgtgcttcctaagaaagaagtagcattgttgaacaaacaacgtgctcgtcttgaaaaattcttgggcggtatcgctgacatgccacgcattccagatgtaatgttcgttgttgacccacacaaagagcaaatcgctgttaaagaagctaaaaaattgggtatcccagttgtagcgatggttgacacaaacacagatccagatgatattgatgttatcatcccagctaatgacgacgctatccgcgctgttaaattgatcacagctaaaatggctgacgctatcatcgaaggcaaccaaggtgaagacagcgtagcagcagttgaagctgaattggcagctgagccagcatctacagaatcaatcgaagaattggttgaagttgtagaaggaaaataa

SEQ ID NO: 30721 - protein, 258 aa, Streptococcus suis 89/1591
MAVISMKQLLEAGVHFGHQTRRWNPKMAKYIFTERNGIHVIDLQQTVKLADQAYEFIRDAAANDAVILFVGTKKQAAEAVKDEAIRAGQYFINHRWLGGTLTNWGTIQKRIARLKEINRMEEDGTLDVLPKKEVALLNKQRARLEKFLGGIADMPRIPDVMFVVDPHKEQIAVKEAKKLGIPVVAMVDTNTDPDDIDVIIPANDDAIRAVKLITAKMADAIIEGNQGEDSVAAVEAELAAEPASTESIEELVEVVEGK

SEQ ID NO: 30722 - DNA, 870 bp, Sulfitobacter sp. EE-36
  CDS (1)..(870): transl_table=11
atggctcttcctgagttctccatgcgccaactgcttgaagcaggcgtacactttggtcaccaaacacagcgctggaacccccgcatgggtccgttcatctacggcgcgcgtaacggcatccacatcatggacctgacacagactgttccaatgctggaccaggcgctgcaagtcatccgtgacaccgtcgccaaaggcggcagcattcttttcgttggcaccaagcgtcaggcggcacagccgatcgcagaagccgcagagaaatgcgcacagtactacatgaaccaccgttggttgggcggcacgctgacaaactggcagaccgtttccaaatccatccagcgcctgaagtccatcgacgaacagtccgagcgtggcttctccggtctgaccaagaaagagcgtcttggcatggaacgtgaccaagcgaagctggaagcatcgctgggtggtatccgtgaaatgggcggtcgccctgacctgatcttcgtcatcgacgtgaaaaaagaagcactggccgtggccgaagcgaacaaactgggcattccggttatcgctgttgtcgacaccaactgctcccccgacgggatcgactacatcatcccgggcaacgatgacgccgcccgcgcgatccacatgtattgcgatctggccgcacgtgcagcacttgacggtatgtccgcgcagctgggtgccgcaggtgttgatatcggtgcgatggaagaagcgcccgaagaagaagccctgatcgacggtggtgtcgaagttggcaacgcttcggaagaaaccgtttcgaacgacgcaatggcaaaagacgcacctctggatatcgaatccaagaaggaaacgctggccgacgccaagtcgtaa

SEQ ID NO: 30723 - protein, 289 aa, Sulfitobacter sp. EE-36
MALPEFSMRQLLEAGVHFGHQTQRWNPRMGPFIYGARNGIHIMDLTQTVPMLDQALQVIRDTVAKGGSILFVGTKRQAAQPIAEAAEKCAQYYMNHRWLGGTLTNWQTVSKSIQRLKSIDEQSERGFSGLTKKERLGMERDQAKLEASLGGIREMGGRPDLIFVIDVKKEALAVAEANKLGIPVIAVVDTNCSPDGIDYIIPGNDDAARAIHMYCDLAARAALDGMSAQLGAAGVDIGAMEEAPEEEALIDGGVEVGNASEETVSNDAMAKDAPLDIESKKETLADAKS

SEQ ID NO: 30724 - DNA, 768 bp, Oceanicola batsensis HTCC2597
  CDS (1)..(768): transl_table=11
atggctcttcccgagttctccatgcgccagctgcttgaagccggcgttcacttcggccaccagacgcagcgttggaacccccgcatgggcgagttcatctatggcgcgcgcaacggcatccacatcgtcgacctgacgcagaccgttcccatgctggaccaggcgctgaacgtcatccgcgaaaccgtggccaagaacggccgggtgctctttgtcggcaccaagcgccaggcgtcggccccgatcgccgaggcggccgagaaatgcgcccagtactacatgaaccaccgctggctcggcggcacgctgaccaactggaagaccgtctcgcagtcgatcaaccgcctgaacgagatcgacgagaagctttccgccggtgccgagggtctcaccaagaaagaacgcctgggcatggagcgcgatcaggagaaactgaccgcatcgctcggcgggatccgcgagatgggcggcgttccggacctgctcttcgtgatcgacgtcaagaaagagcagctggccgtggccgaagccaacaagctgggcatcccggtggtcgcggtcgtcgacaccaactgctcgcccgatggcatcgactatatcatcccgggcaatgacgacgcggcccgcgcgatctcgctctactgcgacctggcttcccgtgccgcgcttgacggcatgaccgcacagctcggcgccgccggcgtcgacgtgggcgagatggaagaggcgccggtcgaagaggccgtcgaggaaagcgccgaggcgtaa

SEQ ID NO: 30725 - protein, 255 aa, Oceanicola batsensis HTCC2597
MALPEFSMRQLLEAGVHFGHQTQRWNPRMGEFIYGARNGIHIVDLTQTVPMLDQALNVIRETVAKNGRVLFVGTKRQASAPIAEAAEKCAQYYMNHRWLGGTLTNWKTVSQSINRLNEIDEKLSAGAEGLTKKERLGMERDQEKLTASLGGIREMGGVPDLLFVIDVKKEQLAVAEANKLGIPVVAVVDTNCSPDGIDYIIPGNDDAARAISLYCDLASRAALDGMTAQLGAAGVDVGEMEEAPVEEAVEESAEA

SEQ ID NO: 30726 - DNA, 771 bp, Erythrobacter sp. NAP1
  CDS (1)..(771): transl_table=11
atggcggccactaccgtcaccatgcagcaattgattgaggccggcgcacacttcggccaccagacccaccgctggaacccgcggatgaagccgtacatcttcggcaaccgcaacggtgttcacatcatcgacctgtcgcagaccgttccgcttttcgcgcgcgctctcgacttcgttgagcagaccgttcgcgcaggcggcaaggttctgtttgtcggcaccaagcgtcaggctcaggagccgatcgctgaagccgcacgccagtcgggccagcacttcgtgaaccaccgttggctgggcgggatgctcaccaactggaagaccatcagcggttcgatcaagcggctcaagacccttgaagagcagctttcgggcgacaccagcggcttcaccaagaaggaagtcctccagcttacgcgtgagcgcgacaagctcgagctttcgctcggcggtatccgcgacatgggcggcattcctgacgtgatgttcgtcatcgacgccaacaaggaagacctcgccatcaaggaagcagccgtgctcggcattccggtgatcgcagtgctcgacacgaacgtcgacccaaccggcatcgcattcccggttccgggcaacgacgatgcaagccgcgccgtgcgtctttactgccaggctatcagcgacgcggcgaatgccggtcgtggccaggctgtcgagcagtcgggcgaagatttcggtgcatccgaaactccgcctgccgaaccgaccgctgaagaagctccggcagaagcctga

SEQ ID NO: 30727 - protein, 256 aa, Erythrobacter sp. NAP1
MAATTVTMQQLIEAGAHFGHQTHRWNPRMKPYIFGNRNGVHIIDLSQTVPLFARALDFVEQTVRAGGKVLFVGTKRQAQEPIAEAARQSGQHFVNHRWLGGMLTNWKTISGSIKRLKTLEEQLSGDTSGFTKKEVLQLTRERDKLELSLGGIRDMGGIPDVMFVIDANKEDLAIKEAAVLGIPVIAVLDTNVDPTGIAFPVPGNDDASRAVRLYCQAISDAANAGRGQAVEQSGEDFGASETPPAEPTAEEAPAEA

SEQ ID NO: 30728 - DNA, 729 bp, Pseudoalteromonas tunicata D2
  CDS (1)..(729): transl_table=11
atggcaaacgtttcaatgcgcgacatgcttcaagctggtgttcacttcggtcaccaagcacgttactggaatccaaaaatgaagcctttcattttcggcgctcgtaaccgtgtacacatcatcaaccttgagcacacagttcctatgttcaacgaagcactttctttcttaagaaatgttgcatcaaacaaaggtaaaatccttttcgtaggtactaagcgcgcagctagcgaagcagttaaagaagccgcacagcgttctgaccagtattatgtaaatcaccgttggttaggtggtatgcttactaactggaaaacagttcgtcagtcaatcaagcgtttaaaagagcttgaaattcaaagtcaagacggtactttcgaaaagctaaccaaaaaagaagctttaatgctttctcgtgaaatggacaagcttgagaaaagccttggtggtatcaaagatatgggcggtcttccagacgcacttttcgttatcgatgctgaccatgagcacatcgctatccgtgaagcaaacaatctaggtatcccagttgtatcaatcgttgatacaaactcaaacccagacggtgttgatttcatcgtaccaggtaatgacgatgcgatccgtgcagttcagttatacacaggtgctgttgctcaaaacatcatcgaaggtcgcgaaagcaacctagttgttcaagctgaaaaagacgatttcgtagaagctgaataa

SEQ ID NO: 30729 - protein, 242 aa, Pseudoalteromonas tunicata D2
MANVSMRDMLQAGVHFGHQARYWNPKMKPFIFGARNRVHIINLEHTVPMFNEALSFLRNVASNKGKILFVGTKRAASEAVKEAAQRSDQYYVNHRWLGGMLTNWKTVRQSIKRLKELEIQSQDGTFEKLTKKEALMLSREMDKLEKSLGGIKDMGGLPDALFVIDADHEHIAIREANNLGIPVVSIVDTNSNPDGVDFIVPGNDDAIRAVQLYTGAVAQNIIEGRESNLVVQAEKDDFVEAE

SEQ ID NO: 30730 - DNA, 729 bp, Photobacterium sp. SKA34
  CDS (1)..(729): transl_table=11
atggcaactgtatcaatgcgcgacatgcttcaggctggtgtacactttggtcaccaaactcgttactggaatccaaaaatgaagccattcattttcggtgctcgtaaccgtgtacatatcatcaacctagaaaaaactgtaccaatgttcaatgcagcactagctgaaattgaaaaaattgcagctcgtaagggtaaagttcttttcgttggtactaagcgcgcagctagcgaatcaatcaaagaagcagcaatcagctgtgaccagtactacgtaaacaaccgttggttgggtggtatgttgactaactggaaaactgttcgtcaatcaatcaagcgtcttaaagatcttgaagctcaatctactgatggtactttcgagaagctaaccaagaaagaagcgctaatgcgtactcgtgaaatggaaaagcttgagaaatcactaggtggtattaagaacatgggcggcctaccagacgcaatgttcgtaatcggcgctgactgtgagcacatcgcaatcaaagaagctaataacctaggtatcccagtatttgctgttgttgatactaactctgatccagacggcgttgatttcgttatcccaggtaacgatgacgcaatccgtgcgatccagctttacactggtgctgtagctcaaactgttaaagaagctcgtaaccaagatatcgctgttcaagctgaagaagacggtttcgtagctgaagcttaa

SEQ ID NO: 30731 - protein, 242 aa, Photobacterium sp. SKA34
MATVSMRDMLQAGVHFGHQTRYWNPKMKPFIFGARNRVHIINLEKTVPMFNAALAEIEKIAARKGKVLFVGTKRAASESIKEAAISCDQYYVNNRWLGGMLTNWKTVRQSIKRLKDLEAQSTDGTFEKLTKKEALMRTREMEKLEKSLGGIKNMGGLPDAMFVIGADCEHIAIKEANNLGIPVFAVVDTNSDPDGVDFVIPGNDDAIRAIQLYTGAVAQTVKEARNQDIAVQAEEDGFVAEA

SEQ ID NO: 30732 - DNA, 741 bp, Oceanospirillum sp. MED92
  CDS (1)..(741): transl_table=11
atggctaaaattactatgcgtgacctgcttaaagcaggcgttcacttcggtcaccagactcgttactggaacccaaaaatgtccaagttcatttttggtgctcgtaacaagatccatatcatcaaccttgagcacacgctgccagcactaaacggtgcgctggataacatccagaacatggctgcgaacaagaacaaggttctgtttgttggtactaaacgtgcagctagcaaaatcgttaaagaagaagctagccgtgcgggcatgccttacgtaaaccatcgctggttgggtggtatgctgactaactacaaaactattcgtcagtctatccgtcgtctgcgtgatctggaatcacagagccaggacggtactttcgaaaagctgactaagaaagaagctctgatgcgtcagcgtgaaatggagaagctggaacgttctatcggcggtatcaaagagatgggtggtctgcctgatgctctgttcgttatcgatgtagatcacgagcgtatcgctgtaaacgaagcgaacaagctgggtatcccagtaatcggtgttgttgatacaaacagcaaccctgatggtgttgatgttgttattccaggtaacgacgatgcgctacgcgctatccagatttacgttaagtctgctgcagatgcttgcctagaaggcactgaagcaactgctggcgacaaaaacgaattcgttgaagttgaagagaatcaggctgcggctgagtaa

SEQ ID NO: 30733 - protein, 246 aa, Oceanospirillum sp. MED92
MAKITMRDLLKAGVHFGHQTRYWNPKMSKFIFGARNKIHIINLEHTLPALNGALDNIQNMAANKNKVLFVGTKRAASKIVKEEASRAGMPYVNHRWLGGMLTNYKTIRQSIRRLRDLESQSQDGTFEKLTKKEALMRQREMEKLERSIGGIKEMGGLPDALFVIDVDHERIAVNEANKLGIPVIGVVDTNSNPDGVDVVIPGNDDALRAIQIYVKSAADACLEGTEATAGDKNEFVEVEENQAAAE

SEQ ID NO: 30734 - DNA, 813 bp, delta proteobacterium MLMS-1
  CDS (1)..(813): transl_table=11
atgacacaagtggaaacaccttcgatcagcatgcgggaaatgctcgaggccgggctgcatttcggccatcagacccggcgctggaaccccaagatgaagccctatattttcggggcccgcaacggcatctacatcatcaacctcgacaagaccctgcccctttttcaacgggccaccgaatatgttgcccggaaggcggccaagggcggcagcatcctttttgtcggcaccaagcgccaggcccaggatatcgtccgggaagaggcggaacgctgcggtatgtatttcgtcaaccaccgttggctgggcggcatgctgaccaaccaccagaccatcaaaaaaagcgttgatcggctcaagagctacaccagtatgcaggaagacggcagcatccaccgctacaagaaaaaagagatcatgatgattcagaaggagactctgaagctggagcgcaacctgggcgggatcaaagagatgaagtcgttgcccgccgccatcttcgtcgtcgaccccaaacgggaggacatcgcggtaaccgaggccaaccggctcggggttccggtggtggccatcgccgacaccaactgtgaccccaccggcattgattacctgatcccgggtaacgacgacgccatcaagtccatccgcctggtctgctccaagctggctgatgccatcctggccggcaaggaaagccacgccatggcccaacaggccgccgccgacaaggccgcggaagtggaagtaaccgctgccgcagacgaaaccgggcaaccggagccagccggggaggccgttgcgaccacgacttag

SEQ ID NO: 30735 - protein, 270 aa, delta proteobacterium MLMS-1
MTQVETPSISMREMLEAGLHFGHQTRRWNPKMKPYIFGARNGIYIINLDKTLPLFQRATEYVARKAAKGGSILFVGTKRQAQDIVREEAERCGMYFVNHRWLGGMLTNHQTIKKSVDRLKSYTSMQEDGSIHRYKKKEIMMIQKETLKLERNLGGIKEMKSLPAAIFVVDPKREDIAVTEANRLGVPVVAIADTNCDPTGIDYLIPGNDDAIKSIRLVCSKLADAILAGKESHAMAQQAAADKAAEVEVTAAADETGQPEPAGEAVATTT

SEQ ID NO: 30736 - DNA, 741 bp, Oceanobacter sp. RED65
  CDS (1)..(741): transl_table=11
atggcacaagtatccatgcgcgacctgctaaaagcaggcgtacacttcggtcaccaaactcgttattggaacccgaaaatgtctcagtacatcttcggtgctcgtaacaagattcatatcatcaaccttgagcacactgttcctgcattcaacgaagcgttgaacgtagtaaaaggtttggctgctaaaaacaacaaaatcctttttgttggtactaagcgtgctgcatctaaagtaatgcaagaccaagcgtctcgtgcaggtcagccttttgttgctcaccgttggttgggtggtatgttgactaactacaaaactatccgtcaatcaatcaagcgtctacgtgacctagaagcacagcagaaagacggtacttttgagcagcttactaagaaagaagcgctaatgcgtacccgtgagatggacaagctagagcgttctattggtggtatcaaagatatgggtggtcttccagacgctctattcgtaatcgacgttgatcacgagcgcattgctattcaagaagcgaacaagctaggtattcctgtaatcggtatcgttgatactaacagcaacccagatggcgttgatcacgttatcccaggtaacgacgacgcgattcgtgcaattgaaatcttcaccactgctattgctgatgcttgcattgaaggcaaaactgaagctggtgcagctcctgcacctgctcaggcagaagaaaagcaagaagaagctgctgagtaa

SEQ ID NO: 30737 - protein, 246 aa, Oceanobacter sp. RED65
MAQVSMRDLLKAGVHFGHQTRYWNPKMSQYIFGARNKIHIINLEHTVPAFNEALNVVKGLAAKNNKILFVGTKRAASKVMQDQASRAGQPFVAHRWLGGMLTNYKTIRQSIKRLRDLEAQQKDGTFEQLTKKEALMRTREMDKLERSIGGIKDMGGLPDALFVIDVDHERIAIQEANKLGIPVIGIVDTNSNPDGVDHVIPGNDDAIRAIEIFTTAIADACIEGKTEAGAAPAPAQAEEKQEEAAE

SEQ ID NO: 30738 - DNA, 729 bp, Vibrio sp. Ex25
  CDS (1)..(729): transl_table=11
atggcaactgtatcaatgcgcgatatgctaaaagctggtgttcacttcggtcaccagactcgttactggaacccaaaaatgaagccattcatctttggcgctcgtaacaaagttcatatcatcaacctagaaaaaactgtaccaatgttcaacgacgctctagctgaactagctaaagttggcgagaagaaaggtaaagttctattcgtaggtactaagcgcgctgcatctgaagctgttaaagaagctgcaatcgcaagcaaccagttttacgtaaacaaccgctggttaggcggtatgcttacaaactacaaaacagttcgtcagtctatcaagcgtctaaaagatctagagactcaatctcaagacggtacttttgacaaactaactaagaaagaagctctaatgcgtactcgcgaaatggagaagctagagaaatctcttggtggtatcaaagacatgggcggcctaccagacgctctattcgtaatcgacgctgatcacgaacacattgcaattaaagaagctaacaacctaggtattccagtatacgctgtggtagatactaactctaacccagacggcgttgactacgtaatcccaggtaacgacgacgcgatccgcgctgtacagctatacctgaacgctgctgcttcagcagtatctgaaggtcgtaacaaagacgtagctgcagttgctgaaaaagacggtttcgtagaagctgaataa

SEQ ID NO: 30739 - protein, 242 aa, Vibrio sp. Ex25
MATVSMRDMLKAGVHFGHQTRYWNPKMKPFIFGARNKVHIINLEKTVPMFNDALAELAKVGEKKGKVLFVGTKRAASEAVKEAAIASNQFYVNNRWLGGMLTNYKTVRQSIKRLKDLETQSQDGTFDKLTKKEALMRTREMEKLEKSLGGIKDMGGLPDALFVIDADHEHIAIKEANNLGIPVYAVVDTNSNPDGVDYVIPGNDDAIRAVQLYLNAAASAVSEGRNKDVAAVAEKDGFVEAE

SEQ ID NO: 30740 - DNA, 729 bp, Alteromonadales bacterium TW-7
  CDS (1)..(729): transl_table=11
atggcaaacgtttcaatgcgcgacatgcttcaagctggtgttcactttggtcaccaagcacgttactggaaccctaagatgaagcctttcatcttcggcactcgtaaccgtgtacatatcatcaaccttgagcaaactgtaccaatgttcaacaacgcacttaagtttttaagtggcgctgctgcaaacaaaggtaaagttcttttcgttggtactaagcgcgcagcaagcgacgcagttaaagaagctgctatcgcaagcgatcagttttacgttaaccaccgctggttaggtggcatgttgactaactggaaaacagtacgtcaatcaatcaagcgtcttaaagaccttgaaatccaaagccaagacggtactttcgagaaattaactaagaaagaaacgttaatgcttaaccgcgaaatggaaaagcttgaaaaaagccttggtggtatcaaaaacatgggcggtcttccagacgcgatctttgttatcgatgctgaccacgagcacattgctatccgtgaagctaacaacctaggtattcctgttgttgcaatcgtagatactaactctaatccagacggcgttgatttcatcgttcctggtaacgatgatgctatccgtgctgtaaccctttacactagcgctgttgcagctgctatcactgaaggtcgcgagaataacatcgttgctcaagctgagaatgacgatttcgttgaagctgagtaa

SEQ ID NO: 30741 - protein, 242 aa, Alteromonadales bacterium TW-7
MANVSMRDMLQAGVHFGHQARYWNPKMKPFIFGTRNRVHIINLEQTVPMFNNALKFLSGAAANKGKVLFVGTKRAASDAVKEAAIASDQFYVNHRWLGGMLTNWKTVRQSIKRLKDLEIQSQDGTFEKLTKKETLMLNREMEKLEKSLGGIKNMGGLPDAIFVIDADHEHIAIREANNLGIPVVAIVDTNSNPDGVDFIVPGNDDAIRAVTLYTSAVAAAITEGRENNIVAQAENDDFVEAE

SEQ ID NO: 30742 - DNA, 774 bp, marine gamma proteobacterium HTCC2143
  CDS (1)..(774): transl_table=11
atgcgcgacatgttgcaggctggtgttcacttcggccaccaaactcgttactggaacccaaaaatgggccagtacatctttggtgctcgcaacaagatccatattatcaacctggagcacacagttccggcgttcaatgaagcccttgcagtgatccaaaaactgtctgtcggtaaaaacaagatattgtttgtcggcactaagcgagcggctagtaaaatcatgcgtgaagaagcagatcgctccagtcagccttatgttagtcatcggtggctaggtgggatgttgaccaactacaagacaattcgtgggtccattaagcgtttgcgtgatctggaagcccagcaggccgacggtacgtttgacaaactgactaagaaagaagcgctaatgcgcacacgtgccatggagaagctagagcgctcgattggcggtattaaggatatgggtggtttgcctgatgctttgttcgtgattgatgttgaccaagagcggatagctataaaagaagcaaatagtttgggtattcccgttatcggtatcgtcgatactaacagtgatcctgatggtgttgattacgtcatcccaggtaatgacgatgcaatacgtgcgattaaactctactccgcagcggtagctgatgctgttctcgctggaaaagcagctgatggcagcgtgcctaaagacgactttgtagaagttgaagctgaggtggctgttgaggctgaagctgtagctgaagctcctgaagcgcaggctccagcagctgagtaa

SEQ ID NO: 30743 - protein, 257 aa, marine gamma proteobacterium HTCC2143
MRDMLQAGVHFGHQTRYWNPKMGQYIFGARNKIHIINLEHTVPAFNEALAVIQKLSVGKNKILFVGTKRAASKIMREEADRSSQPYVSHRWLGGMLTNYKTIRGSIKRLRDLEAQQADGTFDKLTKKEALMRTRAMEKLERSIGGIKDMGGLPDALFVIDVDQERIAIKEANSLGIPVIGIVDTNSDPDGVDYVIPGNDDAIRAIKLYSAAVADAVLAGKAADGSVPKDDFVEVEAEVAVEAEAVAEAPEAQAPAAE

SEQ ID NO: 30744 - DNA, 777 bp, marine gamma proteobacterium HTCC2080
  CDS (1)..(777): transl_table=11
atggctcaagtaagcatgcgcgatctgctccaagcaggcgcccacttcgggcaccagacccgattctggaatcccaaaatggatcaatacatttttggggcacgaaataaaatacacattattaatctcgagcacacagtgcccgcgtttaatgatgcgttgaagcaagttcagcgcctagccagcaacaaaagcaacattatgttcgtgggcaccaagcgggcagcaggaaaagttatcgaagagcaagcagcacgctgtggtatgcccttcgtaagccatcgctggttaggtggcatgctcaccaactacaagactgtgcgttcttcgatcaagcgtttgcgcgagcttgaggagcaggaggcagacggtacttttgctaagctaaccaagaaagaggcgttaatgcgcacgcgctccaaagagaagttggatcgctcggtgggtggcatcaaggatatgactggcttgcctgacgttctattcgtcattgacgtggaccacgagcgcatcgctatcaccgaagcaaataaattaggcatccccgtgattggcattgttgataccaacagcaatcccgatggtatcgactacgtgattccaggcaacgacgatgcaattcgggcgatcaggctgtacgtgaaggcagtcgctgacgcggtcctagaaggtaaggcagagcgaggcgaggtgcctgctgttgctgaggaccttgttgaggtggaagaggcgccaacagatgcgaccgatgaggccgaatccgaagccgaagcctaa

SEQ ID NO: 30745 - protein, 258 aa, marine gamma proteobacterium HTCC2080
MAQVSMRDLLQAGAHFGHQTRFWNPKMDQYIFGARNKIHIINLEHTVPAFNDALKQVQRLASNKSNIMFVGTKRAAGKVIEEQAARCGMPFVSHRWLGGMLTNYKTVRSSIKRLRELEEQEADGTFAKLTKKEALMRTRSKEKLDRSVGGIKDMTGLPDVLFVIDVDHERIAITEANKLGIPVIGIVDTNSNPDGIDYVIPGNDDAIRAIRLYVKAVADAVLEGKAERGEVPAVAEDLVEVEEAPTDATDEAESEAEA

SEQ ID NO: 30746 - DNA, 915 bp, Candidatus Desulfococcus oleovorans Hxd3
  CDS (1)..(915): transl_table=11
atgagttacatcacaatgaaggagctgctggagtcaggcgtccatttcggtcatcagacccggcggtggaaccccaagatgaagccctatattttcggggcgcgaaacggcatctacatcattgatctgcagaagaccgtgcgcatgttcaaggatgcctatgactttatcggccatgtcgcggaaaagggcggttccgtgctttttgtcggcaccaagaagcaggcccgtgaatcgatttacgaagaggccaaccgggccgagatgttttatgtgcacaaccggtggctgggcggcatgctgaccaattttcagaccatcaagaaaagcatcgaccagctgcactacttgaatgagctggtcaacgacggctccatcgagcgttatcccaaaaaagagcaggccggactgatgcggcagcgggagaaactggacagcgtgctgggcgggattcagagcatgacccggctgccggcggccctgtttgtcattgatgtccgtaaagaggctattgccgtgggcgaggcccggcggctgggtattccggtggtggcggtggtggacacgaactgcgacccggacaacatcgactatgtgattcccggcaacgacgacgccattcgggctattcgcctgatgtcttcccgcgtcgcggatgcctgcatcgacggcagaaagcggtttgaagagaagaagcaggcatttgaagacaaggccgaagccgagaccgaggaaaagccccggccagcaccggctgcagcggcggctgccgaggaccaaaagcccgtggaacgggaggtgatctccgacggcaccgacggccccattgtggaacggattcgaaagacgttcacctcggcggcggactatcaggagccggaagaagacgccgatgaagaaaacagcgaggcataa

SEQ ID NO: 30747 - protein, 304 aa, Candidatus Desulfococcus oleovorans Hxd3
MSYITMKELLESGVHFGHQTRRWNPKMKPYIFGARNGIYIIDLQKTVRMFKDAYDFIGHVAEKGGSVLFVGTKKQARESIYEEANRAEMFYVHNRWLGGMLTNFQTIKKSIDQLHYLNELVNDGSIERYPKKEQAGLMRQREKLDSVLGGIQSMTRLPAALFVIDVRKEAIAVGEARRLGIPVVAVVDTNCDPDNIDYVIPGNDDAIRAIRLMSSRVADACIDGRKRFEEKKQAFEDKAEAETEEKPRPAPAAAAAAEDQKPVEREVISDGTDGPIVERIRKTFTSAADYQEPEEDADEENSEA

SEQ ID NO: 30748 - DNA, 738 bp, Pseudomonas putida GB-1
  CDS (1)..(738): transl_table=11
atgtcccaagtcaatatgcgcgatatgctgaaggccggtgtgcacttcggccaccagacccgttactggaacccgaaaatgggcaagtacattttcggcgcgcgtaacaagatccacatcatcaacctggaaaaaaccctgccaatgttcaacgacgctctggcgttcgtagagcgtctggctcagggcaagaacaagatcatgttcgtcggcaccaagcgttccgccggcaagatcgtcgccgagcaagctgctcgcgctggttcgccatacgttgatcaccgctggttgggcggcatgctgaccaactacaaaaccatccgcgcttcgatcaagcgtctgcgcgacctggaaacccaggccgaagacggcacctttgccaagctgaccaagaaagaagccctgatgcgttcgcgcgatctggaaaagctggaccgcagcctgggtggtatcaaggacatgggcggtctgcctgatgccctgttcgtgatcgacgttgatcacgagcgcattgctatcaccgaagcaaacaagctgggcatcccggttatcggcgttgtcgataccaacagcagcccggaaggtgttgactacatcatcccaggcaacgacgacgccatccgcgccatcgagctgtacatgacttcgatggctgacgccatcatccgcggccgcaacaacgttgctggcggcaccgaagtctatgttgaagaagcggctgcacctgctgctgagtaa

SEQ ID NO: 30749 - protein, 245 aa, Pseudomonas putida GB-1
MSQVNMRDMLKAGVHFGHQTRYWNPKMGKYIFGARNKIHIINLEKTLPMFNDALAFVERLAQGKNKIMFVGTKRSAGKIVAEQAARAGSPYVDHRWLGGMLTNYKTIRASIKRLRDLETQAEDGTFAKLTKKEALMRSRDLEKLDRSLGGIKDMGGLPDALFVIDVDHERIAITEANKLGIPVIGVVDTNSSPEGVDYIIPGNDDAIRAIELYMTSMADAIIRGRNNVAGGTEVYVEEAAAPAAE

SEQ ID NO: 30750 - DNA, 744 bp, Marinobacter sp. ELB17
  CDS (1)..(744): transl_table=11
atggctcaagtacatatgcgtgacctgcttaaagcaggtgctcactttggacaccagactcgctactggaatccaaaaatgtcgaagtacatcttcggcgcccgtaacaagattcacatcatcaacctggaacagaccgttccggctatgaacgatgctcttaaattcgttgcgcggctgaccgagaacaagaacaagattttgttcgtaggcaccaagcgcgccgctgcgaagatcattaaagaggaagcagagcgttcaggtcaaccttttgtgaaccaccgctggttgggcggcatgctgaccaactacaaaaccattcgtcagtcgattcaccgctaccgtgaactgcaagcgcagagcaaagacggtacttttgacaagctgaccaagaaagaagcgcttgagcgctcccgcgaaatggacaagcttgagcgttccattggtggtatcaaggatatgggcggcctgcctgatgccttgttcgtgatagacgttgaccatgagcgtatcgctatcaaagaagccaacaagttgggtattcctgttattggtgttgttgacaccaacagcaaccctgacggtgttgattacgtaatcccgggtaacgatgacgccatccgggctatccagatttacgtgaaagcggttgctgacacctgcctggaatcggtcaacgttggcgcagacgagtttgttgaagttagcgaagaagctccaagcgcagcgcctgctgcagaataa

SEQ ID NO: 30751 - protein, 247 aa, Marinobacter sp. ELB17
MAQVHMRDLLKAGAHFGHQTRYWNPKMSKYIFGARNKIHIINLEQTVPAMNDALKFVARLTENKNKILFVGTKRAAAKIIKEEAERSGQPFVNHRWLGGMLTNYKTIRQSIHRYRELQAQSKDGTFDKLTKKEALERSREMDKLERSIGGIKDMGGLPDALFVIDVDHERIAIKEANKLGIPVIGVVDTNSNPDGVDYVIPGNDDAIRAIQIYVKAVADTCLESVNVGADEFVEVSEEAPSAAPAAE

SEQ ID NO: 30752 - DNA, 711 bp, Bacillus sp. SG-1
  CDS (1)..(711): transl_table=11
atgtcagtaatttctatgaaacaattgcttgaagctggtgtacatttcggtcaccagactcgccgttggaacccgaaaatgaagaagtatatcttcacagagcgtaacggcatctacatcattgaccttcaaaaaacagttaagaaggttgaagaagcttacaacttcgttaaggaactagctggaaacggcggaaaagttcttttcgttggtactaaaaagcaagcacaggagtctgttaaagaagaagcagaacgtgcaggcatgtacttcatcaaccaacgttggttgggtggtacactaactaacttcgaaacaatccaaaagcgtatctcccgtcttaagttaatcgaaaagatggaagaagatggaacttttgaagttcttccgaaaaaagaagtagtacaattgaaaaaagagcatgagcgtttagttaaattccttggtggaattaaagatatgcaagaacttcctgatgcacttttcatcatcgaccctcgtaaagagcgtatcgctgtagcggaagcacgcaaattgaacatccctatcgttggtatcgttgatactaactgtgatccggatgaaatcgatgtagtaattcctgcaaacgatgatgcaatccgtgctgttaaactacttacttcaaaaatggcagatgctatccttgaagctaagcaaggcgaagaagctgctgtaactgcagctgagtaa

SEQ ID NO: 30753 - protein, 236 aa, Bacillus sp. SG-1
MSVISMKQLLEAGVHFGHQTRRWNPKMKKYIFTERNGIYIIDLQKTVKKVEEAYNFVKELAGNGGKVLFVGTKKQAQESVKEEAERAGMYFINQRWLGGTLTNFETIQKRISRLKLIEKMEEDGTFEVLPKKEVVQLKKEHERLVKFLGGIKDMQELPDALFIIDPRKERIAVAEARKLNIPIVGIVDTNCDPDEIDVVIPANDDAIRAVKLLTSKMADAILEAKQGEEAAVTAAE

SEQ ID NO: 30754 - DNA, 756 bp, Erythrobacter sp. SD-21
  CDS (1)..(756): transl_table=11
atgaccatggcggctcctaccgtcaccatgcagcaactgatcgaggccggcgcacatttcggccaccagacccaccgttggaacccgcgaatgaagccgtacatcttcggcgcgcgcaacggcatccacatcattgacctgtcgcagtccgtgccgctcttcgcgcgcgctctcgacttcatcagccagaccgcacgctcgggcggcaaggtgctgttcgtcggcaccaagcgccaggcgcaggacccgatccgcgaagctgcgctcgctgcgggccagcacttcgtcaaccaccgctggctgggcggcatgctcaccaactggaagacgatctcgggctctatcaaggaactcaagacgctggaagaaacgctctcgggtgacaccagcggcctgaccaagaaggaagtcctcaacctcacgcgaaagcgcgacaagcttgagctttcgctcggcggtatccgtaacatgggcggcattccggacgtgatgttcgtgatcgacgccaacaaggaagaccttgccatcaaggaagccaacgtgcttggcattcccgtggtcgccgtgctcgacaccaatgtcgatccgaacggcatcgccttcccgatcccgggcaacgacgacgctgcccgcgccatcaagctctactgcgacgccgttggcgaagcggcccgttcgggcaagggcgaaggcgtgaccgattcgggtgccgacgtgggcgcgatggcaaatccgccggaagaagctgcggcctga

SEQ ID NO: 30755 - protein, 251 aa, Erythrobacter sp. SD-21
MTMAAPTVTMQQLIEAGAHFGHQTHRWNPRMKPYIFGARNGIHIIDLSQSVPLFARALDFISQTARSGGKVLFVGTKRQAQDPIREAALAAGQHFVNHRWLGGMLTNWKTISGSIKELKTLEETLSGDTSGLTKKEVLNLTRKRDKLELSLGGIRNMGGIPDVMFVIDANKEDLAIKEANVLGIPVVAVLDTNVDPNGIAFPIPGNDDAARAIKLYCDAVGEAARSGKGEGVTDSGADVGAMANPPEEAAA

SEQ ID NO: 30756 - DNA, 729 bp, Moritella sp. PE36
  CDS (1)..(729): transl_table=11
atgtctacagtatcaatgcgcgatatgctacaagccggtgttcatttcggtcaccaaactcgttactggaaccctaagatgaagcaatacatcttcggcgctcgtagtaaagtacatatcatcaacctagagcaaactgttcctctattcaacgacgctcttgcttttatcaagaacgttgctgacaaaaaaggtaaagttcttttcgttggtactaaaaaagctgctggtgaaacaatcaaagaagctgcactttcatgtgaccagttctacgttgatcaccgctggttaggcggaatgttgactaactggaaaacagttcgtcaatcaatcaaacgtcttactactctagaagcacaagcacaagacggtacattcgagcaacttactaagaaagaagctctaatgaacactcgtgaaatgatcaaactagagaaaagccttggtggtattaaaactatgggcggtttacctgatgttcttttcgtaatcgatgctgaccatgagcacatcgctattaaagaagctaacaacctaggtatcccagtagtagctatcgttgatactaactcaaacccagacaacattgatttcgttgtacctggtaacgatgatgcgatccgtgctatcaaactttacgctggtgcagtagctgcatgcgtaaatgaaggccgtaatcaagacatcgctgcacaagctgaaagcgacttcatcgaagaagctaaataa

SEQ ID NO: 30757 - protein, 242 aa, Moritella sp. PE36
MSTVSMRDMLQAGVHFGHQTRYWNPKMKQYIFGARSKVHIINLEQTVPLFNDALAFIKNVADKKGKVLFVGTKKAAGETIKEAALSCDQFYVDHRWLGGMLTNWKTVRQSIKRLTTLEAQAQDGTFEQLTKKEALMNTREMIKLEKSLGGIKTMGGLPDVLFVIDADHEHIAIKEANNLGIPVVAIVDTNSNPDNIDFVVPGNDDAIRAIKLYAGAVAACVNEGRNQDIAAQAESDFIEEAK

SEQ ID NO: 30758 - DNA, 741 bp, Herbaspirillum seropedicae
  CDS (1)..(741): transl_table=11
atgtccgttaccatgcgcgaaatgctggaagccggtgtccacttcggtcaccaaacccgcttctggaaccccaagatggcccccttcattttcggtcatcgcaacaagattcacatcgtcaacctggaaaagaccctgggcatgtaccaggaggcgcagaagtacgtgcgtcaactgtcggccaaccgcggcaccatcctgttcgtcggcaccaagcgtcaagcccgcgaaatcctggctgctgaagcacagcgcgctggcgttccctacgttgaccagcgctggctgggcggcatgctgaccaacttcaagaccatcaagacctcgatcaagcgcctgaaggacatggaagctgctgtcgaagacggttcggtcgagaagctgtccaagaaggaagccctgctgttcagccgtgagcaggaaaagctgcaaaaggccatcggcggcatcaaggacatgggcggcattcctgacgccatcttcgtcatcgacgtcggctaccacaagggcgccatcaccgaagccgccaagctgggcatcccggtcatcggcgtggtcgataccaaccactcgcccgaaggcgtcacctacgtgatcccgggtaacgacgactccgccaaggcgatcgctctgtacgctcgcggcatggctgacgcagtcctggaaggtcgcgccaacgccgtcaacgacgtggttgaagcagtcaagggcgacgaattcgtcgaggtcgagcaggcttga

SEQ ID NO: 30759 - protein, 246 aa, Herbaspirillum seropedicae
MSVTMREMLEAGVHFGHQTRFWNPKMAPFIFGHRNKIHIVNLEKTLGMYQEAQKYVRQLSANRGTILFVGTKRQAREILAAEAQRAGVPYVDQRWLGGMLTNFKTIKTSIKRLKDMEAAVEDGSVEKLSKKEALLFSREQEKLQKAIGGIKDMGGIPDAIFVIDVGYHKGAITEAAKLGIPVIGVVDTNHSPEGVTYVIPGNDDSAKAIALYARGMADAVLEGRANAVNDVVEAVKGDEFVEVEQA

SEQ ID NO: 30760 - DNA, 795 bp, Magnetospirillum gryphiswaldense
  CDS (1)..(795): transl_table=11
atgtccatgccgaccttctccatgcgtcagctcgtcgaagctggtgtgcacttcggtcacaatacccgccgctggaaccccaagatggcgccgttcctgttcggtatccgcaacggcattcacatcatcgacctgcagcaatcggtgccgatgctgcatgccgccatgaccgccgtgcgcaacgtcgttgccggcggtggccgcgttctgttcgtgggcaccaagcgcgccgcttccgacaccgtcgccgaagccgccaagaagtgtggccagtactatgtcaaccaccgctggctgggtggcatgctgaccaactggaagaccatctcgcactcgatcaagcgcctgcgcgaactggacgagatgctggcttccggcaccctggccggcctgaccaagaaggaacagctggtcctggcccgtgaaaaggaaaagctggaccgcgcgctgggcggcatcaaggacatgggtggcctgccggacatcctgttcatcatcgacaccaacaaggaagccctggccgttcaggaagccaacaagctgggcattccggtcgtcgccatcctcgattccaactcggacccgtcgggcgtgcagttcccggttcccggcaacgacgacgccatccgcgccatccagacctattgcgatctgatggtcggcgccgttctcgacggcatccaggccgagatcggtcgctcgggcggcgatatcggcgcccaggctgaagctccggtggaagtgatccccgccgaagctgaagttgtggccgtggaagccccttcggccgaataa

SEQ ID NO: 30761 - protein, 264 aa, Magnetospirillum gryphiswaldense
MSMPTFSMRQLVEAGVHFGHNTRRWNPKMAPFLFGIRNGIHIIDLQQSVPMLHAAMTAVRNVVAGGGRVLFVGTKRAASDTVAEAAKKCGQYYVNHRWLGGMLTNWKTISHSIKRLRELDEMLASGTLAGLTKKEQLVLAREKEKLDRALGGIKDMGGLPDILFIIDTNKEALAVQEANKLGIPVVAILDSNSDPSGVQFPVPGNDDAIRAIQTYCDLMVGAVLDGIQAEIGRSGGDIGAQAEAPVEVIPAEAEVVAVEAPSAE

SEQ ID NO: 30762 - DNA, 1275 bp, Aspergillus oryzae
  CDS (1)..(1275)
atgattgcccggcaactgtgtatgcggcagagccgccagcttcatgccttcaaccgccaggctcggactctgaactcgctgaaccgattctactcaaccgaaccaccagtcgacaccacactccagacccgtatcaaggagcgttctgctgagatcgagtcccgctatcaaaatgatgctgttcccgagagaatctcaaggaggcgcgctgagcagttggcctggaaggcacgaggcgagcgaaaattcaaattccaagaccttggcagcagcgtgacagacgcgtacaaaccagaggatatcatccggaaccctcctaagccttccgacgttacccttgaactgctcctcgcttctcagacacacctcggacactcgacgtcccgctggaacccccagaactcgcgctacattttcggtattcgagacggtatccacgtcatctccctggacgtgaccgcggcgtacctgcgtcgtgcggccaaagtggtagaggaagttgcagcccgcggtggattgatcctcttcgttggtacacggaagggtcaaaagagatacgtggtccgcgccgcagaactggccaagggctaccacattttcgagcgatggatccccggcagtctgaccaatggacagcagatcctgggccactgcgagaccaaggtcgtgaatgctatggatgaagaaatccccaagtacagggaagccctggctgaccgctcggtcctcaaacctgacctggtggtctgtctgaaccctctcgagaacgtcgtcttgctccacgagtgtggtcttaacaacgtccctaccatcggtgtcattgacacggatgctgatcctacccgcgtcacataccctatcccctcaaacgacgacagcatgcgtgccatcggtgttatcgccggtgtcctgggacgggcaggagaagccggtcaacaaaggagattggagaatgcaaagaacggagtcctaacctacccacccatcactcctgaacaccttctctcccccgagcgtctcgccgagctcgcccaaatcgaagcaggaaacgtcgccgccaacgccgaggctgccgaaattgccaacaagctcgacgaagccgttcagtccatcgaaactgaacaggcctcgaccccccaggaaacctcgcagtctaccgaatcccaacccgagccccagacccaggttccagaaaccgaaaagcccgccgaacctcaaccagaacagcctcaaacgcaggcccaggccccggaaacccccgttaaagaccagtaa

SEQ ID NO: 30763 - protein, 424 aa, Aspergillus oryzae
MIARQLCMRQSRQLHAFNRQARTLNSLNRFYSTEPPVDTTLQTRIKERSAEIESRYQNDAVPERISRRRAEQLAWKARGERKFKFQDLGSSVTDAYKPEDIIRNPPKPSDVTLELLLASQTHLGHSTSRWNPQNSRYIFGIRDGIHVISLDVTAAYLRRAAKVVEEVAARGGLILFVGTRKGQKRYVVRAAELAKGYHIFERWIPGSLTNGQQILGHCETKVVNAMDEEIPKYREALADRSVLKPDLVVCLNPLENVVLLHECGLNNVPTIGVIDTDADPTRVTYPIPSNDDSMRAIGVIAGVLGRAGEAGQQRRLENAKNGVLTYPPITPEHLLSPERLAELAQIEAGNVAANAEAAEIANKLDEAVQSIETEQASTPQETSQSTESQPEPQTQVPETEKPAEPQPEQPQTQAQAPETPVKDQ

SEQ ID NO: 30764 - DNA, 711 bp, Silene latifolia
  CDS (1)..(711): transl_table=11
atgacaagaagatattggaacatcaatttggaagagatgatggaggcgggagttcattttgggcatggtactcgaaaatggaatccccgaatgtcaccttatatctctgcaaaatgtaagggtattcatattataaatcttaccagaactgctcgttttttatcagaggcttgtgatttagtttttgatgcagcaagtaggggaaaaaaatttttaattgttgggacaaaaaataaagcagctgattcagtagcatgggctgcaataagggctcgatgtcattatgttaataaaaagtggcttgggggtatgttaacgaattggtccactacagaaacaagacttcataaattcagggacttacgaatggaacaaaaggcggggcgactcgctcgtcttccgaagagagatgccgcggtggtaaagagacaattatctcacttgcaaacatatctgggcgggattaaatatatgacagaattacctgatattgtaatcattgttgatcaacaaaaagaatatacagctcttcgagaatgtattactttgggaattccaacgatttgtttaatcgatacaaactgtgacccggatctcgccgatatttcgattccggcaaacgatgatgctatatcttcaatccaattaattcttaccaagttagtatttgcaatttgtgaaggtcgttctagctatgtaagaaatacttga

SEQ ID NO: 30765 - protein, 236 aa, Silene latifolia
MTRRYWNINLEEMMEAGVHFGHGTRKWNPRMSPYISAKCKGIHIINLTRTARFLSEACDLVFDAASRGKKFLIVGTKNKAADSVAWAAIRARCHYVNKKWLGGMLTNWSTTETRLHKFRDLRMEQKAGRLARLPKRDAAVVKRQLSHLQTYLGGIKYMTELPDIVIIVDQQKEYTALRECITLGIPTICLIDTNCDPDLADISIPANDDAISSIQLILTKLVFAICEGRSSYVRNT

SEQ ID NO: 30766 - DNA, 1128 bp, Xanthomonas oryzae pv
  CDS (1)..(1128): transl_table=11
gtgaacgctcaggcgagctggaccttgcaattcccaattccggccaattgcaccacgccgccaggccctctatactccgcgcgctgttttgcgtcttcacgcattgcgtcgttcacgtcggacgtcaccgacgaattcacacctgctgccgccatccgcgccggggtgccctcacacagggttcgtcgcggaggcaacagggaagcccaaccccggaatctttgcgtgtgtctgtgcgcgtctctcgcaagcccacgcgtccatgtgcggacttttcaaaagtccagtccgcgcacggcgattccgctctcaggagttcctgcaatgccccaagtcaccatgcgtcagatgctggaagccggcgtccacttcggtcaccagtgccgttactggcaccccaacatggcgcagtacatcttcggcgcacgcggcaagattcacatcatcaacctcgaaaagacggttccgcttttcaacgatgcgatgaactatctgtcctcgatcgcgcagaagcgcggcaccatcctgttcctgggcaccaagcgcagcgcgcgtgcgtccatcaaggaagaggccgagcgttgcggcatgccgttcatgacccagcgctggctgggcggcacgctgaccaacttccgcaccgtcaagcagtcggttgcccgtctgaaggaactggaagcggccgagaccgatggcaccttcgacaagctggtcaagcacgaagtgctgagcctgcgtcgcgagcgcgagaagctggacgcctcgctggggggcatcaaggaaatgaaccgtctgcccgacgcgatcttcgtgatcgacatcggccatgaagacatcgccatcaaggaagccaagaagctcggcatcccggtgatcgccgtggtcgacaccaactacaaccccaacctggtcgactacgccatcccgggtaacgacgacgccatccgcgccgtgcagctgtacgcacgtgccgctgccgatgccgtgctggaaggcaaggctgctgcgccgaactcggcgtcagtgcgtgaagaagagttctcggctgagtccgccgacgaaggcaagggccgtcgcgctccggccaagaagggcgagaaaaaggccgacgctccggctgccgagtaa

SEQ ID NO: 30767 - protein, 375 aa, Xanthomonas oryzae pv
MNAQASWTLQFPIPANCTTPPGPLYSARCFASSRIASFTSDVTDEFTPAAAIRAGVPSHRVRRGGNREAQPRNLCVCLCASLASPRVHVRTFQKSSPRTAIPLSGVPAMPQVTMRQMLEAGVHFGHQCRYWHPNMAQYIFGARGKIHIINLEKTVPLFNDAMNYLSSIAQKRGTILFLGTKRSARASIKEEAERCGMPFMTQRWLGGTLTNFRTVKQSVARLKELEAAETDGTFDKLVKHEVLSLRREREKLDASLGGIKEMNRLPDAIFVIDIGHEDIAIKEAKKLGIPVIAVVDTNYNPNLVDYAIPGNDDAIRAVQLYARAAADAVLEGKAAAPNSASVREEEFSAESADEGKGRRAPAKKGEKKADAPAAE

SEQ ID NO: 30768 - DNA, 711 bp, Oryza sativa subsp
  CDS (1)..(711)
atgacaagaagatattggaacatcaatttgaaagagatgatagaagcgggagttcattttggtcatggtattaagaaatggaatcctaaaatggccccttacatctcggcaaagcgtaaaggtactcatattacaaatctcgctagaaccacccgttttttatcagaagcttgtgatttagtttttgatgcagcaagtcagggaaaaagcttcttaattgttggtaccaaaaaaagagcagcggatttagtagcatcagctgcaataagggctcgttgtcattatgttaataaaaagtggttcagtggtatgttaacgaattggtcgattactaaaactagactttctcaatttagagacttaagaacagaagaaaagatggaaaaattccaccatctcccaaaaagagatgtggcaatcttgaagagaaaattatctaccttgcaaagatatctcggcgggatcaaatatatgacgaggttgcctgacattgtgatcgtcctcgatcagcaaaaagagtatatagctcttcgggaatgtgccattttggggattcctactatttctttagccgatacaaattgtgacccagatctcgcgaatatatcgattccagccaacgatgacactatgacttcaattcgattgattcttaacaaattagtatttgcaatttgtgagggccgttctctctatataagaaatcattga

SEQ ID NO: 30769 - protein, 236 aa, Oryza sativa subsp
MTRRYWNINLKEMIEAGVHFGHGIKKWNPKMAPYISAKRKGTHITNLARTTRFLSEACDLVFDAASQGKSFLIVGTKKRAADLVASAAIRARCHYVNKKWFSGMLTNWSITKTRLSQFRDLRTEEKMEKFHHLPKRDVAILKRKLSTLQRYLGGIKYMTRLPDIVIVLDQQKEYIALRECAILGIPTISLADTNCDPDLANISIPANDDTMTSIRLILNKLVFAICEGRSLYIRNH

SEQ ID NO: 30770 - DNA, 711 bp, Acorus gramineus
  CDS (1)..(711): transl_table=11
atgacaaaaagatattggaacatcgatttggaagagatgatggaagcaggagtgcattttggtcacggtactaggaaattgaatcctagaatggcaccttacatttctgcaaagcgtaaaggtattcatattacaaatcttactagaactgctcgttttttatcagaagcctgtgatttactttttgatgcagcaagtgggggaaaacacttcttaatcgttggtaccaaaaagaaagcagctgattcagtagcatcggctgcaataagggctcggtgtcattatgttaataaaaaatggcttggtggtatgtcaacgaattggtccactacagaaacgagacttcaaaattttagggacttaagagcagaacaaaaggctgggaaaatcgaccgtctcccgaaaagggatgcagcaatgttgaagagacaattatctaccttgcaaacatatctgggtgggatcaaatatatgacgggtttacctgatattgtaatcatcgttgatcagcaagaagactatacggctcttcgagaatgtgtcattttaggaattccgactatttgtttaatcgatacaaattctgacccggatctcgcagacatttcgattcccgccaacgatgacgctatagcttcaatccgattgattcttaacaaattagtattcgcaatttgcgagggtcgttctagctatataagaaatcgttaa

SEQ ID NO: 30771 - protein, 236 aa, Acorus gramineus
MTKRYWNIDLEEMMEAGVHFGHGTRKLNPRMAPYISAKRKGIHITNLTRTARFLSEACDLLFDAASGGKHFLIVGTKKKAADSVASAAIRARCHYVNKKWLGGMSTNWSTTETRLQNFRDLRAEQKAGKIDRLPKRDAAMLKRQLSTLQTYLGGIKYMTGLPDIVIIVDQQEDYTALRECVILGIPTICLIDTNSDPDLADISIPANDDAIASIRLILNKLVFAICEGRSSYIRNR

SEQ ID NO: 30772 - DNA, 828 bp, Amborella trichopoda
  CDS (1)..(828): transl_table=11
atggcttggaccatgtatcaacggtccatccccggtataaggttccgtaggaacaattctatatttcagatttcagggtacctcattcctgaaaaaaaagaggaagtgtgggtagaaatggcaagaagatattgggacatcaatttggaagagatgatgggagcaggggttcattttggtcatggtactaggaaatggaatcctagaatggcaccttatatctctggaaagcgtaaaggcattcacattacaaatcttactagaacggctcgtcctttatcagaagcctgcgatttagtttttgatgcagcaagtagaggaaagcacttcttaatagtaggtacgaaagataaagcagccgattcagtagcatcagctgcaatacgggctcggtgtcattatgtcaataaaaaatggcttggtggtatgtcaacgaattggtccactacagaaacaagacttcataagttcagggacttgagagcagaacaaaagatgggtcgatttaagcgtctcccgaaaagagatgcggcaatgttgaagagacaattatctcacttgcaaacatatctgggcgggatcaaatatatgacggggttacccgatattgtaatcatcgtggatcaccaagaagaatatacggctattagagaatgcctcactttgggtattccgacgatttgtttaatcgatacaaattgtgatccggatctcgcagatattccgattccagccaacgatgacgctatagcttcaatccaattgattcttaacaaattagtattggcaattcgtgagggtcattatagctatctaggaagtcattga

SEQ ID NO: 30773 - protein, 275 aa, Amborella trichopoda
MAWTMYQRSIPGIRFRRNNSIFQISGYLIPEKKEEVWVEMARRYWDINLEEMMGAGVHFGHGTRKWNPRMAPYISGKRKGIHITNLTRTARPLSEACDLVFDAASRGKHFLIVGTKDKAADSVASAAIRARCHYVNKKWLGGMSTNWSTTETRLHKFRDLRAEQKMGRFKRLPKRDAAMLKRQLSHLQTYLGGIKYMTGLPDIVIIVDHQEEYTAIRECLTLGIPTICLIDTNCDPDLADIPIPANDDAIASIQLILNKLVLAIREGHYSYLGSH

SEQ ID NO: 30774 - DNA, 738 bp, Cistanche salsa
  CDS (1)..(738): transl_table=11
atgaccataagatattggaacatcaacttggaagaaatgctggaggcaggagttcattttgggcatggtactaggaaatggaatcctaaaatggcaccttatatctctgcaaagcgtaaaggtattcatattataaatcttacgagaactgctcgttttttatccgaagcctgcgatttggtttttgatgcagcaagtaggggaaaacaattcttgattgttggtacaaaaaataaagcagctgattcagtagcatgggctgcaataaaggcccggtgtcattttgttaataaaaaatggcttggcgggatgttaacgaattggtccactacagaaatgagacttcataaattcagggacttgagaatggaacaaaaaatgggaagattcaaccgccttccgaaaagagatgcagctgtggtgaaaaggcaattatctcgcttgcaaacatatttgggcgggattaaatatatgacagggttacccgatattgtaatcattgttgatcagcatgaagaatatacggctctacgagagtgtattaccctgggaattccaacaatttgtttaatcgatacaaattgtgatcccgatcttgcagatattttgattccggcgaatgatgatgctatatcttcaattcgtttaattcttaacaaattagtattcgcaatttgtgagggtcgttctagctatagttctagctatataagaaatcctggattaataataagataa

SEQ ID NO: 30775 - protein, 245 aa, Cistanche salsa
MTIRYWNINLEEMLEAGVHFGHGTRKWNPKMAPYISAKRKGIHIINLTRTARFLSEACDLVFDAASRGKQFLIVGTKNKAADSVAWAAIKARCHFVNKKWLGGMLTNWSTTEMRLHKFRDLRMEQKMGRFNRLPKRDAAVVKRQLSRLQTYLGGIKYMTGLPDIVIIVDQHEEYTALRECITLGIPTICLIDTNCDPDLADILIPANDDAISSIRLILNKLVFAICEGRSSYSSSYIRNPGLIIR

SEQ ID NO: 30776 - DNA, 738 bp, Cistanche deserticola
  CDS (1)..(738): transl_table=11
atgaccataagatattggaacatcgacttggaagaaatgctggaggcaggagttcattttgggcatggtactaggaaatggaatcctaaaatggcaccttatatctctgcaaagcgtaaaggtattcatattacaaatcttacgagaactgctcgttttttatccgaagcctgcaatttggtttttgatgcagcaagtaggggaaaacaattcttgattgttggtacaaaaaataaagcagctgattcagtagcatgggctgcaataaaggcccggtgtcattttgttaataaaaaatggcttggcgggatgttaacgaattggtccactacagaaatgagacttcataaattcagggacttgagaatggaacaaaaaatgggaagattcaaccgccttccgaaaagagatgcagctgtggtgaaaaggcaattatctcgcctgcaaacatattttggcgggattaaatatatgacagggttacccgatattgtaatcattgttgatcagcatgaagaatatacggctctacgagagtgtattaccctgggaattccaacaatttgtttaatcgatacaaattgtgatcccgatcttgcagatatttcgattccggcgaatgatgatgctatatcttcaattcgtttaattcttaacaaattagtattcgcaatttgtgagggtcgttctagctatagttctagctatataagaaatcctggattaataataagataa

SEQ ID NO: 30777 - protein, 245 aa, Cistanche deserticola
MTIRYWNIDLEEMLEAGVHFGHGTRKWNPKMAPYISAKRKGIHITNLTRTARFLSEACNLVFDAASRGKQFLIVGTKNKAADSVAWAAIKARCHFVNKKWLGGMLTNWSTTEMRLHKFRDLRMEQKMGRFNRLPKRDAAVVKRQLSRLQTYFGGIKYMTGLPDIVIIVDQHEEYTALRECITLGIPTICLIDTNCDPDLADISIPANDDAISSIRLILNKLVFAICEGRSSYSSSYIRNPGLIIR

SEQ ID NO: 30778 - DNA, 738 bp, Cistanche salsa
  CDS (1)..(738): transl_table=11
atgaccataagatattggaacatcaacttggaagaaatgctggaggcaggagttcattttgggcatggtactaggaaatggaatcctaaaatggcaccttatatctctgcaaagcgtaaaggtattcatattataaatcttacgagaactgctcgttttttatccgaagcctgcgatttggtttttgatgcagcaagtaggggaaaacaattcttgattgttggtacaaaaaataaagcagctgattcagtagcatgggctgcaataaaggcccggtgtcattttgttaataaaaaatggcttggcgggatgttaacgaattggtccactacagaaatgagacttcataaattcagggacttgagaatggaacaaaaaatgggaagattcaaccgccttccgaaaagagatgcagctgtggtgaaaaggcaattatctcgcttgcaaacatatttgggcgggattaaatatatgacagggttacccgatattgtaatcattgttgatcagcatgaagaatatacggctctacgagagtgtattaccctgggaattccaacaatttgtttaatcgatacaaattgtgatcccgatcttgcagatatttcgattccggcgaatgatgatgctatatcttcaattcgtttaattcttaacaaattagtattcgcaatttgtgagggtcgttctagctatagttctagctatataagaaatcctggattaataataagataa

SEQ ID NO: 30779 - protein, 245 aa, Cistanche salsa
MTIRYWNINLEEMLEAGVHFGHGTRKWNPKMAPYISAKRKGIHIINLTRTARFLSEACDLVFDAASRGKQFLIVGTKNKAADSVAWAAIKARCHFVNKKWLGGMLTNWSTTEMRLHKFRDLRMEQKMGRFNRLPKRDAAVVKRQLSRLQTYLGGIKYMTGLPDIVIIVDQHEEYTALRECITLGIPTICLIDTNCDPDLADISIPANDDAISSIRLILNKLVFAICEGRSSYSSSYIRNPGLIIR

SEQ ID NO: 30780 - DNA, 738 bp, Cistanche deserticola
  CDS (1)..(738): transl_table=11
atgaccataagatattggaacatcaacttggaagaaatgctggaggcaggagttcattttgggcatggtactaggaaatggaatcctaaaatggcactttatatctctgcaaagcgtaaaggtattcatattataaatcttacgagaactgctcgttttttatccgaagcctgcgatttggtttttgatgcagcaagtaggggaaaacaattcttgattgttggtacaaaaaataaagcagctgattcagtagcatgggctgcaataaaggcccggtgtcattttgttaataaaaaatggcttggcgggatgttaacgaattggtccactacagaaatgagacttcataaattcagggacttgagaatggaacaaaaaatgggaagattcaaccgccttccgaaaagagatgcagctgtggtgaaaaggcaattatctcgcttgcaaacatatttgggcgggattaaatatatgacagggttacccgatattgtaatcattgttgatcagcatgaagaatatacggctctacgagagtgtattaccctgggaattccaacaatttgtttaatcgatacaaattgtgatcccgatcttgcagatatttcgattccggcgaatgatgatgctatatcttcaattcgtttaattcttaacaaattagtattcgcaatttgtgagggtcgttctagctatagttctagctatataagaaatcctggattaataataagataa

SEQ ID NO: 30781 - protein, 245 aa, Cistanche deserticola
MTIRYWNINLEEMLEAGVHFGHGTRKWNPKMALYISAKRKGIHIINLTRTARFLSEACDLVFDAASRGKQFLIVGTKNKAADSVAWAAIKARCHFVNKKWLGGMLTNWSTTEMRLHKFRDLRMEQKMGRFNRLPKRDAAVVKRQLSRLQTYLGGIKYMTGLPDIVIIVDQHEEYTALRECITLGIPTICLIDTNCDPDLADISIPANDDAISSIRLILNKLVFAICEGRSSYSSSYIRNPGLIIR

SEQ ID NO: 30782 - DNA, 711 bp, Chenopodium rubrum
  CDS (1)..(711)
atgacaagaagatattggaacatcaatttggaagagatgatggaagcgggagttcattttggtcacggtactaggaaatggaatcctagaatgtcgccttatatctctgcaaaatgtaaaggtattcatattataaatcttactagaactgctcgttttttatcggaggcttgcgatttagtttttgacgcatcaagtagaggaaaacaatttttaattgttgggacaaaaaataaagcagctgattcagtagcacgggctgcaataagggctcgctgtcattatgttaataaaaagtggcttgggggtatgttaacgaattggtccacgacagaaacgagactttataaatacagggacttgagaatggaacaaacggcagggagactcgctcgtctcccaaagagagatgcagcggtggtgaagagacagttatctcacttgcaaacatatctgggtgggatcaaatatatgacagggttaccagatattgtaatcatcgttgatcaacacgaagaatatacggcccttcgagaatgtattactttgggaattccaacgatttgtttaatcgatacaaattgtgacccggatcttgcagatatttcgattcccgcaaacgatgacgctatagcttcaattcgattaattcttaccaaattagtatttgcaatttgtgaaggccgctctagctatacaagaaatccctga

SEQ ID NO: 30783 - protein, 236 aa, Chenopodium rubrum
MTRRYWNINLEEMMEAGVHFGHGTRKWNPRMSPYISAKCKGIHIINLTRTARFLSEACDLVFDASSRGKQFLIVGTKNKAADSVARAAIRARCHYVNKKWLGGMLTNWSTTETRLYKYRDLRMEQTAGRLARLPKRDAAVVKRQLSHLQTYLGGIKYMTGLPDIVIIVDQHEEYTALRECITLGIPTICLIDTNCDPDLADISIPANDDAIASIRLILTKLVFAICEGRSSYTRNP

SEQ ID NO: 30784 - DNA, 711 bp, Oryza sativa subsp
  CDS (1)..(711)
atgacaagaagatattggaacatcaatttgaaagagatgatagaagcgggagttcattttggtcatggtattaagaaatggaatcctaaaatggccccttacatctcggcaaagcgtaaaggtactcatattacaaatctcgctagaaccacccgttttttatcagaagcttgtgatttagtttttgatgcagcaagtcagggaaaaagcttcttaattgttggtaccaaaaaaagagcagcggatttagtagcatcagctgcaataagggctcgttgtcattatgttaataaaaagtggttcagtggtatgttaacgaattggtcgattactaaaactagactttctcaatttagagacttaacagcagaagaaaagatggaaaaattccaccatctcccaaaaagagatgtggcaatcttgaagagaaaattatctaccttgcaaagatatctcggcgggatcaaatatatgacgaggttgcctgacattgtgatcgtcctcgatcagcaaaaagagtatatagctcttcgggaatgtgccattttggggattcctactatttctttagccgatacaaattgtgacccagatctcgcgaatatatcgattccagccaatgatgacactatgacttcaattcgattgattcttaacaaattagtatttgcaatttgtgagggccgttctctctatataagaaatcattga

SEQ ID NO: 30785 - protein, 236 aa, Oryza sativa subsp
MTRRYWNINLKEMIEAGVHFGHGIKKWNPKMAPYISAKRKGTHITNLARTTRFLSEACDLVFDAASQGKSFLIVGTKKRAADLVASAAIRARCHYVNKKWFSGMLTNWSITKTRLSQFRDLTAEEKMEKFHHLPKRDVAILKRKLSTLQRYLGGIKYMTRLPDIVIVLDQQKEYIALRECAILGIPTISLADTNCDPDLANISIPANDDTMTSIRLILNKLVFAICEGRSLYIRNH

SEQ ID NO: 30786 - DNA, 738 bp, Cistanche salsa
  CDS (1)..(738): transl_table=11
atgacaataagatattggaacatcgacttggaagagatgctggaggcaggagttcattttgggcatggtactaagaaatggaatcctaaaatggcaccttatatctctgcaaagcgtaaaggtactcatattacaaatcttacgagaactgctcgttttttatccgaagcctgcaatttggtttttgatgcagcaagtaggggaaaacaattcttgattgttggtacaaaaaataaagcagctggttcagtagcacgggctgcaataaaggcccggtgtcattttgttaataaaaaatggcttggcgggatgttaacgaattggtccactacagaaacgagacttcataagttcagggacttgagaatggaacaaaaaataggaagattcaaccgcctttcgaaaagagatgcggctgtggtgaaaaggcaattatctcgtttgcaaacatatctgggcgggattaaatatatgacagggttacccgatattgtaatcattgttgatcagcatgaagaatatacggctctacgagagtgtattactttgggaattccaacaatttgtttaattgatacgaattgtgatcccgatcttgcagatatttcgattccggcgaatgatgatgctatatcttcaattcgtttaattcttaacaaattagtattcgcaatttgtgagggtcgttctagttatagttctatctatataagaaatcctggattaataataagataa

SEQ ID NO: 30787 - protein, 245 aa, Cistanche salsa
MTIRYWNIDLEEMLEAGVHFGHGTKKWNPKMAPYISAKRKGTHITNLTRTARFLSEACNLVFDAASRGKQFLIVGTKNKAAGSVARAAIKARCHFVNKKWLGGMLTNWSTTETRLHKFRDLRMEQKIGRFNRLSKRDAAVVKRQLSRLQTYLGGIKYMTGLPDIVIIVDQHEEYTALRECITLGIPTICLIDTNCDPDLADISIPANDDAISSIRLILNKLVFAICEGRSSYSSIYIRNPGLIIR

SEQ ID NO: 30788 - DNA, 738 bp, Cistanche salsa
  CDS (1)..(738): transl_table=11
atgaccataagatattggaacatcaacttggaagaaatgctggaggcaggagttcattttgggcatggtactaagaaatggaatcctaaaatggcaccttatatctctgcaaagcgtaaaggtattcatattataaatcttacgagaactgctcgttttttatccgaagcctgcgatttggtttttgatgcagcaagtaggggaaaacaattcttgattgttggtacaaaaaataaagcagctgattcagtagcatgggctgcaataagggcccggtgtcattttgttaataaaaaatggcttggcgggatgttaacgaattggtccactacagaaatgagacttcataaattcagggacttgagaatggaacaaaaaatgggaagattcaaccgccttccgaaaagagatgcagctgtggtgaaaaggcaattatctcgcttgcaaacatatttgggcgggattaaatatatgacagggttacccgatattataatcattgttgatcagcatgaagaatatacggctctacgagagtgtattaccctgggaattccaacaatttgtttaatcgatacaaattgtgatcccgatcttgcagatatttcgattccggcgaatgatgatgctatatcttcaattcgtttaattcttaacaaattagtattcgcaatttgtgagggtcgttctagctatagttctagctatataagaaatcctggattaataataagataa

SEQ ID NO: 30789 - protein, 245 aa, Cistanche salsa
MTIRYWNINLEEMLEAGVHFGHGTKKWNPKMAPYISAKRKGIHIINLTRTARFLSEACDLVFDAASRGKQFLIVGTKNKAADSVAWAAIRARCHFVNKKWLGGMLTNWSTTEMRLHKFRDLRMEQKMGRFNRLPKRDAAVVKRQLSRLQTYLGGIKYMTGLPDIIIIVDQHEEYTALRECITLGIPTICLIDTNCDPDLADISIPANDDAISSIRLILNKLVFAICEGRSSYSSSYIRNPGLIIR

SEQ ID NO: 30790 - DNA, 738 bp, Cistanche salsa
  CDS (1)..(738): transl_table=11
atgaccataagatattggaacatcgacttggaagaaatgctggaggcaggagttcattttgggcatggtactaggaaatggaatcctaaaatggcaccttatatctctgcaaagcgtaaaggtattcatattacaaatcttacgagaactgctcgttttttatccgaagcctgcaatttggtttttgatgcagcaagtaggggaaaacaattcttgattgttggtacaaaaaataaagcagctgattcagtagcatgggctgcaataaaggcccggtgtcattttgttaataaaaaatggcttggcgggatgttaacgaattggtccactacagaaatgagacttcataaattcagggacttgagaatggaacaaaaaatgggaagattcaaccgccttccgaaaagagatgcagctgtggtgaaaaggcaattatctcgcttgcaaacatatttgggcgggattaaatatatgacagggttacccgatattgtaatcattgttgatcagcatgaagaatatacggctctacgagagtgtattaccctgggaattccaacaatttgtttaatcgatacaaattgtgatcccgatcttgcagatatttcgattccggcgaatgatgatgctatatcttcaattcgtttaattcttaacaaattagtattcgcaatttgtgagggtcgttctagctatagttctagctatataagaaatcctggattaataataagataa

SEQ ID NO: 30791 - protein, 245 aa, Cistanche salsa
MTIRYWNIDLEEMLEAGVHFGHGTRKWNPKMAPYISAKRKGIHITNLTRTARFLSEACNLVFDAASRGKQFLIVGTKNKAADSVAWAAIKARCHFVNKKWLGGMLTNWSTTEMRLHKFRDLRMEQKMGRFNRLPKRDAAVVKRQLSRLQTYLGGIKYMTGLPDIVIIVDQHEEYTALRECITLGIPTICLIDTNCDPDLADISIPANDDAISSIRLILNKLVFAICEGRSSYSSSYIRNPGLIIR

SEQ ID NO: 30792 - DNA, 708 bp, Anthoceros formosae
  CDS (1)..(708)
atgaaacaaaaatactggaacattaatttggaagaaatgatggaagcaggaattcattttggtcatcaagctgcaaagtggaatcccaaaatgaaaccttatatcttcacagaacgtaggggcattcatatcctaaatgttactaaaacggctagactcttatcagaagcctgtgattttgttgctaatgctgcgagtaaagggaagcagtttttaatagtaggtacaaaatatcaagcagctgatttagtagcatcagctgctctaaaggctcgatgtcattatgtaaatcaaaagtggcttggtggaatgttaacaaattggtctactatagaaaaacgtttacggaaatttgaagacctacaaacgaagaaaaatatgggagcgcttgatgagcttccgaaaaaagaagcagccaatttggaaagacaattggctcaactgcaaaaatatttaggtgggattaggtatatgacaaacttaccagatattgttataattgtggaccaacaaaaagaattaacagctattcgggaatgtattaatttaaatattccaactatttgtttagttgatacagattgcgatccagatcttacggatatctcaattccagcaaatgatgatgctagagcttcaattagatgggttttggataaattaacttcagctattcaggaaggtcgttgtaattctacgaaaatctga

SEQ ID NO: 30793 - protein, 235 aa, Anthoceros formosae
MKQKYWNINLEEMMEAGIHFGHQAAKWNPKMKPYIFTERRGIHILNVTKTARLLSEACDFVANAASKGKQFLIVGTKYQAADLVASAALKARCHYVNQKWLGGMLTNWSTIEKRLRKFEDLQTKKNMGALDELPKKEAANLERQLAQLQKYLGGIRYMTNLPDIVIIVDQQKELTAIRECINLNIPTICLVDTDCDPDLTDISIPANDDARASIRWVLDKLTSAIQEGRCNSTKI

SEQ ID NO: 30794 - DNA, 711 bp, Arabidopsis thaliana
  CDS (1)..(711): transl_table=11
atgacaaaaagatattggaacatcgatttggaagagatgatgagagcaggagttcattttggacatggtacgaggaaatggaatcctagaatggcaccttatatttctgcaaagcgtaaaggtattcatattataaatctgactagaactgctcgttttttatcagaagcttgtgatttagtttttgatgcggcaagtaggggaaaacaattcttaattgttgggacaaaaaataaagcagctgatttagtgtcgcgggctgcaatacgggctcggtgtcattatgttaataaaaaatggctcggcggcatgttaacaaattggtccactaccgaaaaaagacttcataagtttagggacttgagaactgaacaaaagacagagggattcaaccgtcttccgaaaagggatgcagctgtgttgaagagacaattatctcgcttggaaacatatctaggcgggattaaatatatgacgggattgcctgatattgtaatcatcctcgatcagcaagaagaatatacggctcttagagaatgtatcactttgggaattccaaccatttctttaatcgatacaaattgtaatcccgatctcgcggatatttctattcccgcaaatgatgacgctatagcttcaattcgattcattcttaacaaattagtattcgcaatttgtgagggccgttctagctatatacaaaattcttga

SEQ ID NO: 30795 - protein, 236 aa, Arabidopsis thaliana
MTKRYWNIDLEEMMRAGVHFGHGTRKWNPRMAPYISAKRKGIHIINLTRTARFLSEACDLVFDAASRGKQFLIVGTKNKAADLVSRAAIRARCHYVNKKWLGGMLTNWSTTEKRLHKFRDLRTEQKTEGFNRLPKRDAAVLKRQLSRLETYLGGIKYMTGLPDIVIILDQQEEYTALRECITLGIPTISLIDTNCNPDLADISIPANDDAIASIRFILNKLVFAICEGRSSYIQNS

SEQ ID NO: 30796 - DNA, 711 bp, Chaetosphaeridium globosum
  CDS (1)..(711): transl_table=11
atgaattcttggaacataaatttagaggatatgatggaagctggggtttatttaggacatcaagcacgaaaatggaatcctaaaatggctccctatatttttgctgaacgtaaaggtattcatattataaatttaacacaaactgctagatttttaacagaagcctgtgatttactatttaatacagcaaaaaacggtgaacaatttttgatagttggaactaaatatcaggccgccgatcttgtggccttgaccgcaaaaaaatctagatgtcattatgtaaatcaaaaatggcttgggggaatgttaacaaattggacaacaataaaaaaacgtcttaaaaaattacaagaattagaatctttagaaagtattaatgggtttgaccgttttcctaaaaaagaagcaagtaatttaaaacgacaattagctcaactacggaaatatttaggtggaattcgtcacatgacgaaattacctgatattgttataataatagatcaacaacacgaacttactgctttaaaagaatgtttaattttaggaattcctactatttgttttgtcgatacagattgtgatccggatttgacagatatacctatccctgctaatgatgattcacgagcatcaatacaatggattttaaataaattaacaaatagtattcgtgaaggtcgagctttttcaaaaaatgattccattaattga

SEQ ID NO: 30797 - protein, 236 aa, Chaetosphaeridium globosum
MNSWNINLEDMMEAGVYLGHQARKWNPKMAPYIFAERKGIHIINLTQTARFLTEACDLLFNTAKNGEQFLIVGTKYQAADLVALTAKKSRCHYVNQKWLGGMLTNWTTIKKRLKKLQELESLESINGFDRFPKKEASNLKRQLAQLRKYLGGIRHMTKLPDIVIIIDQQHELTALKECLILGIPTICFVDTDCDPDLTDIPIPANDDSRASIQWILNKLTNSIREGRAFSKNDSIN

SEQ ID NO: 30798 - DNA, 726 bp, Chara vulgaris; identical to SEQ ID NO: 30642
  CDS (34)..(726)

SEQ ID NO: 30799 - protein, 230 aa, Chara vulgaris
MNHLYSKTNLEEMLEAGVHFGHQSHKWNPRMAPYIFSERKGVHIIDLIQTSNLLHEACDFLANAASNKKEFLLVGTKFQASDLIKSEALKSRCHYVNQRWLGGMLTNWMTIETRIQRLKNLETQEKLGAFHHLPKKDAAHLKRQLNQLQKYLGGMKYMKNLPDVVIIVDQQKEIIAVQECRVLGIPIIALVDTNCDPEIVDIPIPANDDARSSIRWILSKLTAAIRDNRF

SEQ ID NO: 30800 - DNA, 711 bp, Lotus japonicus
  CDS (1)..(711): transl_table=11
atgacaaaaagatattggaacataacttttgaagaaatgatggaagcgggggttcattttggccacggtactaggaaatggaatcctaaaatggcaccttatatatctatgaagcgcaagggtattcatattataaaccttacccgaactgctcgttttttgtcagaagcttgtgatttagtttttgatgcagcaagcaggggaaaacgattcttaattgttggtacaaaaaaaaaagcagccgatttggtagcccgggctgcaataagagcccgatgtcattatgttaataaaaaatggctcggaggtatgttaacgaattggtatactacagaaacgagacttcgtaagttcagggaattgagaacggaacaaaagacggggaaactcaactgtcttccaaaaagagatgccgctatcttgaagagacaattatcgcacttggaaacatatctgggcggcattaaatatatgacagggttacctgatattgtaataatcgttgatcaacaagaagaatatacggctcttcgcgaatgtattactttaggaattccaacgatttgtttaatcgatacaaattgtgaccccgatctcgcggatatttcgattccagctaatgacgatgctatagcttcaatccgattaattcttaacaaattagtatttgcaatttgtgagggtcattctagctatatacgaaatttttga

SEQ ID NO: 30801 - protein, 236 aa, Lotus japonicus
MTKRYWNITFEEMMEAGVHFGHGTRKWNPKMAPYISMKRKGIHIINLTRTARFLSEACDLVFDAASRGKRFLIVGTKKKAADLVARAAIRARCHYVNKKWLGGMLTNWYTTETRLRKFRELRTEQKTGKLNCLPKRDAAILKRQLSHLETYLGGIKYMTGLPDIVIIVDQQEEYTALRECITLGIPTICLIDTNCDPDLADISIPANDDAIASIRLILNKLVFAICEGHSSYIRNF

SEQ ID NO: 30802 - DNA, 711 bp, Zea mays
  CDS (1)..(711): transl_table=11
atgacaagaagatattggaacatcaatttgaaagagatgatagaagcgggagttcattttggtcatggtattaagaaatggaatcccaaaatggccccttacatctcggcaaagcgtaaaggtactcatattacaaatcttgctagaacagctcgttttttatcagaagcttgtgatttagtttttgatgcagcaagtcagggaaaaagcttcttaattgttggtaccaaaaaaagagcagcggatttagtagcatcagctgcaataaggtctcgttgtcattatgttaataaaaagtggttcagcggtatgttaacgaattggtcgattaccaaaactagactttctcaatttagagacttaagagcagaagaaaaaatgggaaaattccaccatctcccaaaaagagatgcggcaatcttaaagagaaaattatctaccttgcaaagatatctcggcgggatcaaatatatgacgaggttgcctgacattgtgatcgtccttgatcagcaaaaagagtatatagctcttcaggaatgtgccattttggggattcctactatttctttagtcgatacaaattgtgacccagatcttgcgaatatatcgattcctgccaacgatgacactatgacttcaattcgattaattcttaacaaattagtatttgcaatttctgagggccgttctctctatataagaaatcgttga

SEQ ID NO: 30803 - protein, 236 aa, Zea mays
MTRRYWNINLKEMIEAGVHFGHGIKKWNPKMAPYISAKRKGTHITNLARTARFLSEACDLVFDAASQGKSFLIVGTKKRAADLVASAAIRSRCHYVNKKWFSGMLTNWSITKTRLSQFRDLRAEEKMGKFHHLPKRDAAILKRKLSTLQRYLGGIKYMTRLPDIVIVLDQQKEYIALQECAILGIPTISLVDTNCDPDLANISIPANDDTMTSIRLILNKLVFAISEGRSLYIRNR

SEQ ID NO: 30804 - DNA, 708 bp, Marchantia polymorpha
  CDS (1)..(708): transl_table=11
atgaaacaaaaatcttggaatattcatttagaagaaatgatggaagcaggtgttcattttggtcaccaagctcggaaatggaatccaaaaatggcaccttatatttttacagaaagaaaaggtattcatattataaatcttactcaaacagctcgatttttatctgaagcttgtgatttagttgcaaatgcgtcaagtaaaggaaaacaatttttaattgtaggaacaaaatatcaagcagctgatttaattgagtcatctgctctaaaagctagatgtcattatgtaaatcaaaaatggcttgggggtatgttaacaaattggtcaactatagaaactcgtcttcaaaaatttaaagatttagaaaataaaaaaaaaacaggaacaataaatcgacttcctaaaaaagaagcagcaaatttaaaaagacaattagatcatttacaaaagtatttaggtggtattaaatatatgacaagtttacctgacattgttattattattgatcaacaaaaagaatttacagctattcaagaatgcattactttaggaattcctacaatttgtttagttgacacagattgtgatccagatatgacagatataccaattcctgccaacgatgatgctagagcttcaattagatggattttaaataaattaacattagctatttgtgaagggcgttataattcaataaaaaattaa

SEQ ID NO: 30805 - protein, 235 aa, Marchantia polymorpha
MKQKSWNIHLEEMMEAGVHFGHQARKWNPKMAPYIFTERKGIHIINLTQTARFLSEACDLVANASSKGKQFLIVGTKYQAADLIESSALKARCHYVNQKWLGGMLTNWSTIETRLQKFKDLENKKKTGTINRLPKKEAANLKRQLDHLQKYLGGIKYMTSLPDIVIIIDQQKEFTAIQECITLGIPTICLVDTDCDPDMTDIPIPANDDARASIRWILNKLTLAICEGRYNSIKN

SEQ ID NO: 30806 - DNA, 687 bp, Mesostigma viride
  CDS (1)..(687): transl_table=11
atgaaaagtgttggattagaagaaatgatggaagctggagtacattttggacatcaaactcgtggatggaatccaaaaatgtcttcttatatttatggaaatcgcaatggaatacatcttatagatttagtacaaactgctagattattatcagaagcatgtgattttttatttaacgctgcaaaagaaggaaaagaatttttatttgtgggaacaaaaagtcaagcttcagatattattgcttctgaagctttacgtgctgaatcacattatgtgaatcaaagatggttaggtggtatgcttaccaattggtctactataaaaactcgtattagaaaattgaaagatttagaacaaaaagaaaaaaatggtattttagatactcttcctaaaaaagaagctgcagtcttaaaaagacaattatataaattacgtaaatatttatcaggtcttcaagatatgaaatatttgcctgatgtagtaattatagttgaccaaaaaagagaaattaatgcggttaaagaatgtatcaaactaggtattcctacgatatctttggtagatacaaattgtgatcctactttagcagatttaccgattccagctaatgatgatgcaattagatcaattaatctgcttgtaagtaaattagcagatgcgatttatgaaggacaacgtgtaaaataa

SEQ ID NO: 30807 - protein, 228 aa, Mesostigma viride
MKSVGLEEMMEAGVHFGHQTRGWNPKMSSYIYGNRNGIHLIDLVQTARLLSEACDFLFNAAKEGKEFLFVGTKSQASDIIASEALRAESHYVNQRWLGGMLTNWSTIKTRIRKLKDLEQKEKNGILDTLPKKEAAVLKRQLYKLRKYLSGLQDMKYLPDVVIIVDQKREINAVKECIKLGIPTISLVDTNCDPTLADLPIPANDDAIRSINLLVSKLADAIYEGQRVK

SEQ ID NO: 30808 - DNA, 819 bp, Nephroselmis olivacea
  CDS (1)..(819): transl_table=11
atggcaacactcgaacaaatgctagatgtaggtgttcattttggacatcaagctagaaaatggaatcccaagatggctccgtatatttttggagagcgaaaaggaattcacattctggatatattacaaacagccattcttttagataaggcaagagtgtatgccagacgacaagctgcgtcgaatggaagcttcttatttgtgggcacaaaaaatcaagcagcaagtattgtgagatttgctgcggagcgatgccagaaaaatgatcgatcccaagcgcactatgtgaatcaccgttggcttggtggcatgttaacgaactggcctaccatgcaattatgcatcaaacgtttacttgaacttgagtccaaccatgaacgaggaggatttcaacaatttccgaaaaaagaagctgctgtagctcgcaaacaacttgctcgtctcgaaaaacatttaggcggagtcaaaaatatgactgggctccctacaactgttgtcattgttggtcaacctcaagaaatgaatgctgtgcgagaatgtgaaaaattaggaattcctatgattactatgttagatagtgattgtaatccattactcacagatattgggattccaagcaatgatgattccattgcttccattgaacttgtcatgcgtgaaattacaaaaggaattgaagaaggtcaatggattcagaaagaaggtcgagaagaggcgacgatcgaaattgaatggtttgttgtggaaccaactcctgtagagaaacctcttgtgattatagaaccgcctccggtagaaaaacctgttttgtcgaaataa

SEQ ID NO: 30809 - protein, 272 aa, Nephroselmis olivacea
MATLEQMLDVGVHFGHQARKWNPKMAPYIFGERKGIHILDILQTAILLDKARVYARRQAASNGSFLFVGTKNQAASIVRFAAERCQKNDRSQAHYVNHRWLGGMLTNWPTMQLCIKRLLELESNHERGGFQQFPKKEAAVARKQLARLEKHLGGVKNMTGLPTTVVIVGQPQEMNAVRECEKLGIPMITMLDSDCNPLLTDIGIPSNDDSIASIELVMREITKGIEEGQWIQKEGREEATIEIEWFVVEPTPVEKPLVIIEPPPVEKPVLSK

SEQ ID NO: 30810 - DNA, 711 bp, Pisum sativum
  CDS (1)..(711): transl_table=11
atgactaaaagatattggaacataacttttgaagagatgatggaagctggggttcattttggccatgatactaggaaatggaatcctcgaatggcaccttttatatcggcaaaacgtaaaggtattcatattacaaatcttactaaaactgctcgttttttatcagaagcttgtgatttggcttttgatgcagcaagcaaaggaaaacaatttttaattgttggtacaaaaaaaaaagcagccgattcagtaacacgggctgcaataagagctcgatgtcattatgttaataaaaaatggctccgaggtatgttaacgaattggtatactacagaaacgagacttggtaagttcagggacttgagaacggagcaaaagacggggaaactgaactctcttccaaaaagagatgcggctatgttgaagagacaattatctcatttcgaaacatatctaggcggtatcaaatatatgacagggttacctgatattgtaataatcgttgatcagcaaaaagaatatacggctcttcaagaatgtatcactttaggaattccaacgatttgtttaatcgatacaaattgtgacccagatcttgcagatatgtcgattccggctaatgatgatgctatagcttccatccgattaattcttaacaaattagtttttgcaatttgtgagggtcgttctagctctatacgaaattattga

SEQ ID NO: 30811 - protein, 236 aa, Pisum sativum
MTKRYWNITFEEMMEAGVHFGHDTRKWNPRMAPFISAKRKGIHITNLTKTARFLSEACDLAFDAASKGKQFLIVGTKKKAADSVTRAAIRARCHYVNKKWLRGMLTNWYTTETRLGKFRDLRTEQKTGKLNSLPKRDAAMLKRQLSHFETYLGGIKYMTGLPDIVIIVDQQKEYTALQECITLGIPTICLIDTNCDPDLADMSIPANDDAIASIRLILNKLVFAICEGRSSSIRNY

SEQ ID NO: 30812 - DNA, 681 bp, Phaeodactylum tricornutum
  CDS (1)..(681): transl_table=11
atgtctgatataagtttatctcaattattagaagccggcgtccactttggccataaagcctatcgctggaacccaaagatgttcccttacatttatagtgaagtcaataatattcatattttagatttagtacagtctgctacgctattaaaagaagcaaatttatatctagaatcagcggcgcgtgaaaataagacatttttatttgttggtacaaaacgtcaagcaagcaccttaattgctcaggaagcaaaacgctgcgattcgtattatgtaaatcatcgttggctgggtggaatgctaacaaattggtcaactttaaaagaacgtattgctcatttaaaagatcttgaacaacaagaagctaataatactttcgatttattaacaaagaaagaaggtgctttacgtcgaaaagaattaaaaaaattacgtaggcacttagatggtattaaagatatgaaaaacttaccagacattgctatcgttattgaccaaaaacgagaaacaacggcaattcgtgagtgtagaaagttaggaattcctgttgtatcaattttagatacaaactgtgatccagatttagtcgatattccaattccaggaaatgatgatgcggtaagatctattaaactaattctaaaatctctaacagatagtattcttattgggaagtcgtaa

SEQ ID NO: 30813 - protein, 226 aa, Phaeodactylum tricornutum
MSDISLSQLLEAGVHFGHKAYRWNPKMFPYIYSEVNNIHILDLVQSATLLKEANLYLESAARENKTFLFVGTKRQASTLIAQEAKRCDSYYVNHRWLGGMLTNWSTLKERIAHLKDLEQQEANNTFDLLTKKEGALRRKELKKLRRHLDGIKDMKNLPDIAIVIDQKRETTAIRECRKLGIPVVSILDTNCDPDLVDIPIPGNDDAVRSIKLILKSLTDSILIGKS

SEQ ID NO: 30814 - DNA, 705 bp, Pinus thunbergii
  CDS (1)..(705): transl_table=11
atgagcagaagatattggaacattgatttggaagagatgatggaagcaagagttcatttagggcataaaactaggaaatggaaccctaagatggcaccttacatttttacagagcgtaaagatactcatattataaatctggctaaaactgctcgttctttatcagaagcttgtgatttgctgtttgatatagcaggtagaggaaaacaattcctgatagtcggtacgaaatatcaagcaactgatttagtagcatcagctgctacagaagctcgatgtcattatgtaaatagaaaatggcttggtggtatgttaactaattggtctactacagagacgagacttcagaagttcaaggatttaaaaaaagaacaagatacgggacgattcaatcaacttccaaaaaaagaagcagctatgctcaagagacaattagaccaattgcagaaatatctaggtgggattagatatatgacaagcttacccgatattgctataattaccaatcaacgagaagaatccattgctcttggggaatgtagaactttgggtattccgacaatttgcttggttgatacagattgtgatccagatctcgtggatatcccaattccagccaatgatgatggtatagcttcaatccaattgatcctgaacagattaacgtcagcaatttgcgaaggaagggcattaaggtcattatag

SEQ ID NO: 30815 - protein, 234 aa, Pinus thunbergii
MSRRYWNIDLEEMMEARVHLGHKTRKWNPKMAPYIFTERKDTHIINLAKTARSLSEACDLLFDIAGRGKQFLIVGTKYQATDLVASAATEARCHYVNRKWLGGMLTNWSTTETRLQKFKDLKKEQDTGRFNQLPKKEAAMLKRQLDQLQKYLGGIRYMTSLPDIAIITNQREESIALGECRTLGIPTICLVDTDCDPDLVDIPIPANDDGIASIQLILNRLTSAICEGRALRSL

SEQ ID NO: 30816 - DNA, 777 bp, Pseudendoclonium akinetum
  CDS (1)..(777): transl_table=11
atgataacaaaactaaaaccttacttacaaatgacattaactttagaacaaatggttgcagcaggaatgcattttgggcatcaagctcgtaaatggaatccaaaaatgaaaccttttatttatgctcaaaaagactcgattcatattattgatttaatttctacttatacgcatttaaatgaagcttcaaaatttttgacagattcagtgtcaattggtcaaaaaatactttttgtcggaactaaaaagcaagtttcgcaactaatcgcaaaagctgctttagaatgcgattccttttatgtaaatggaaagtggctgggaggacaattaacaaattggcaaacaattaaactttcaattcaaaaattaaaatcattagaaacaaaagaacgacacggtcttttaggtaaaatacccaaaaaagaagcggcgcttttaaaaaaagaaaaggaaaaactaggaaaatatttagatggtattaaaaatatggctagcattcctgatattgttataattatcgggcaatcggaagaaattaacgctgtacgagaatgtaaaaaattggggattcgaacaattactattttagataccgattgtgacccctcattagcggatttatttattccagcaaatgatgattcgatttcttcaattaagttattattaggcgaatttgttactgctattaaaaaaggacagcaaaattttgctgaaaaacttttactttcctcagatcttaaaaagcaaattaaaaagcaaagatctcgtcgttaa

SEQ ID NO: 30817 - protein, 258 aa, Pseudendoclonium akinetum
MITKLKPYLQMTLTLEQMVAAGMHFGHQARKWNPKMKPFIYAQKDSIHIIDLISTYTHLNEASKFLTDSVSIGQKILFVGTKKQVSQLIAKAALECDSFYVNGKWLGGQLTNWQTIKLSIQKLKSLETKERHGLLGKIPKKEAALLKKEKEKLGKYLDGIKNMASIPDIVIIIGQSEEINAVRECKKLGIRTITILDTDCDPSLADLFIPANDDSISSIKLLLGEFVTAIKKGQQNFAEKLLLSSDLKKQIKKQRSRR

SEQ ID NO: 30818 - DNA, 720 bp, Psilotum nudum
  CDS (1)..(720): transl_table=11
atgcaacaaacaaattggaatattgagttgatagagatgctaaaagcaggagttcattttggtcaccaaactcgaaaatggaatcccaaaatggcacctcatatctttatggaacggaagggtgttcatattttaaatttgattcaaaccgctcgttttatatctgaagcttgtgatttagtttacaatgcagctagtgagggaaagcagtttttgctagtaggtacgaaacctcgaatagctcatttaatatcctcagctgctataaaagctcggtgtcattatgtcaactataaatggattggaggtatgctgaccaactggtctactatagaaaaacgtcttcaaaaattaagaagcttagagataaggaaaagaatgggggggcttgataacctttctaaggaagaggcagccatcttaagagggcaattatccaaattacataaatatctggggggaattctatacatgaaaaatttgccggatattgtaataattgttgatcaacacaaagaattgactgctatcagggaatgtatgattttagatattcctaccatttgtgtcgttgatacggattgtgatccagatcttaccaatattccaattccagctaatgatgatgcgcaatcttcgatccgatggatccttaatcaattaacattagcaattcgtgagggtcgttgtcattctatgtcccccaagaatagtaaataa

SEQ ID NO: 30819 - protein, 239 aa, Psilotum nudum
MQQTNWNIELIEMLKAGVHFGHQTRKWNPKMAPHIFMERKGVHILNLIQTARFISEACDLVYNAASEGKQFLLVGTKPRIAHLISSAAIKARCHYVNYKWIGGMLTNWSTIEKRLQKLRSLEIRKRMGGLDNLSKEEAAILRGQLSKLHKYLGGILYMKNLPDIVIIVDQHKELTAIRECMILDIPTICVVDTDCDPDLTNIPIPANDDAQSSIRWILNQLTLAIREGRCHSMSPKNSK

SEQ ID NO: 30820 - DNA, 711 bp, Solanum lycopersicum
  CDS (1)..(711): transl_table=11
atgacaagaagatattggaacataaatttggaagagatgatggaggcaggagttcattttggtcatggtactaggaaatggaatcctaaaatggcgccttatatctctgcaaagcgtaagggtattcatattacaaatcttactagaactgctcgttttttatcagaagcttgtgatttagtttttgacgcagcaagtaggggaaaacaattcttaattgttggtaccaaaaataaagcagctgattcagtagagtgggctgcaataagggcccggtgtcattatgttaataaaaaatggcttggcggtatgttaacgaattggtccactacagaaacaagacttcataagttcagggacttgagaatggaacaaaaaacagggagactcaaccgtctcccgaaaagagatgcagctatgttgaaaagacaattatctcgcttgcaaacatatctgggcgggattaaatatatgacaggggtacccgatattgtaatcatcgtggatcagcacgaagaatatacggccctgcgagagtgtattactttaggaattccaacaatttgtttaaccgatacaaattgtgaccccgatctcgcagatatttcaattccagcgaatgatgacgccatatcctcaatccgattaattcttaacaaattagtattcgcaatttgtgagggtcgttctagctatataagaaatccttga

SEQ ID NO: 30821 - protein, 236 aa, Solanum lycopersicum
MTRRYWNINLEEMMEAGVHFGHGTRKWNPKMAPYISAKRKGIHITNLTRTARFLSEACDLVFDAASRGKQFLIVGTKNKAADSVEWAAIRARCHYVNKKWLGGMLTNWSTTETRLHKFRDLRMEQKTGRLNRLPKRDAAMLKRQLSRLQTYLGGIKYMTGVPDIVIIVDQHEEYTALRECITLGIPTICLTDTNCDPDLADISIPANDDAISSIRLILNKLVFAICEGRSSYIRNP

SEQ ID NO: 30822 - DNA, 711 bp, Glycine max
  CDS (1)..(711): transl_table=11
atgacaaaaagatattggaacataatcttggaagagatgatggaagcaggagttcattttggccacggtactagaaaatggaatcctaaaatgtcaccttatatatctgcaaagcgtaagggtattcatattacaaatcttattagaactgctcggtttttatcagaagcttgtgatttagtttttgatgcagcaagtgagggaaaacaattcttaattgttggtacaaaaaaaaaagcagcggattcagtagcacgggctgcaataagagctcggtgtcattatgttaataaaaagtggctcggcggtatgttaacgaattggtatactacagaaacacgacttcaaaagttcagggacttgagaatgcaacaaaagacggggagactcaatagttttccaaaaagagatgccgctatattgaagagacatttagctcatttggaaacatatcttggcggcattaaatatatgacggggttacctgatattgtaataatcgtcgatcaacaagaagaatatacggctcttcgagaatgtataactttggaaattccaacaatttgtttaatcgatacaaattgtgacccggacctcgccgatatttcaattccagctaatgatgatgctatagcctcaattcgattaattcttaacaaattagtatttgcaatttgtgagggccgttctagctatatacgaaattcttga

SEQ ID NO: 30823 - protein, 236 aa, Glycine max
MTKRYWNIILEEMMEAGVHFGHGTRKWNPKMSPYISAKRKGIHITNLIRTARFLSEACDLVFDAASEGKQFLIVGTKKKAADSVARAAIRARCHYVNKKWLGGMLTNWYTTETRLQKFRDLRMQQKTGRLNSFPKRDAAILKRHLAHLETYLGGIKYMTGLPDIVIIVDQQEEYTALRECITLEIPTICLIDTNCDPDLADISIPANDDAIASIRLILNKLVFAICEGRSSYIRNS

SEQ ID NO: 30824 - DNA, 711 bp, Spinacia oleracea
  CDS (1)..(711): transl_table=11
atgacaagaagatattggaacatcaatttggaagagatgatggaagcgggagttcattttggtcacggtactcggaaatggaatcctcgaatgtcgccttatatctctgcaaaatgtaaaggtattcatattataaatcttactagaactgctcgttttttatcagaggcttgtgatttagtttttgatgcatcaagtagaggaaaacaatttttaattgttgggacaaaaaataaagcagctgattcagtagcacgggctgcaataagggctcgctgtcattatgttaataaaaagtggcttgggggtatgttaacgaattggtccacgacagaaacgagacttcacaaattcagggacttgagaatggaacaaacggcagggagactcgctcgtcttccaaagagagatgcggcggtggtgaagagacaattatctcacttgcaaacatatttgggtgggatcaaatatatgacagggttaccggatattgtaatcatcgttgatcaacaggaagaatatacggcccttcgagaatgtattactttgggaattccaactatttgtttaattgatacaaattgtaacccggatctcgcagatatttcgattccggcaaatgatgacgctatagcttcaattcgattaattcttaccaaattagtatttgcaatttgtgaaggccgctctagctatataagaaatccttga

SEQ ID NO: 30825 - protein, 236 aa, Spinacia oleracea
MTRRYWNINLEEMMEAGVHFGHGTRKWNPRMSPYISAKCKGIHIINLTRTARFLSEACDLVFDASSRGKQFLIVGTKNKAADSVARAAIRARCHYVNKKWLGGMLTNWSTTETRLHKFRDLRMEQTAGRLARLPKRDAAVVKRQLSHLQTYLGGIKYMTGLPDIVIIVDQQEEYTALRECITLGIPTICLIDTNCNPDLADISIPANDDAIASIRLILTKLVFAICEGRSSYIRNP

SEQ ID NO: 30826 - DNA, 711 bp, Triticum aestivum
  CDS (1)..(711)
atgacaagaagatattggaacattaatttgaaagagatgatagaagcaggagttcattttggtcatggtattaagaaatggaatcctaaaatggccccttacatttcggcaaagcgtaaaggtactcatattataaatctcgctagaacggctcgttttttatcagaagcttgtgatttagtttttgatgcagcaagtcagggaaaaagtttcttaattgttggtaccaaaaaaagagcaacagatttagtagcatcagctgcaataagggctcgttgtcattatgttaataaaaagtggttcagtggtatgttaacgaattggtcgattacgaaaactagactttctcaatttagagacttaagagcagaagaaaaaatgggaaaattccaccatctcccaaaaagagatgtggcaatcttgaagagaaaattatctaccttgcaaaggtatctcggcgggatcaaatatatgacgagattgccagacattgtgatcgtccttgatcagcaaaaagagtatatagctcttcgggaatgtgccattttggggattcctactatttctttagtcgatacaaattgtgacccggatctcgcgaatatatcgattccagccaacgatgacactatgacttcaattcgattgattcttaacaaattagtattttcaatttgtgagggccgttctctctatataagaaatcgttga

SEQ ID NO: 30827 - protein, 236 aa, Triticum aestivum
MTRRYWNINLKEMIEAGVHFGHGIKKWNPKMAPYISAKRKGTHIINLARTARFLSEACDLVFDAASQGKSFLIVGTKKRATDLVASAAIRARCHYVNKKWFSGMLTNWSITKTRLSQFRDLRAEEKMGKFHHLPKRDVAILKRKLSTLQRYLGGIKYMTRLPDIVIVLDQQKEYIALRECAILGIPTISLVDTNCDPDLANISIPANDDTMTSIRLILNKLVFSICEGRSLYIRNR

SEQ ID NO: 30828 - DNA, 750 bp, Acinetobacter sp
  CDS (1)..(750): transl_table=11
atggcagattacaacgtaagcatgcgcgaccttcttcaagctggtgcgcactttggtcaccaaactcgtttctggaacccaaaaatgcgtcaatacatttttggcgcgcgtaacaaaattcacatcattaaccttgagcacactgttcctgcgttaaatgatgctttgaacttcgctaaccaattagcaagcaaaaagaacaaagttttgttcgttggtactaagcgtgctgcttctaacatcatccgtgaacaagctcaacgtgctggtcaaccatatgtagatcaccgttggttaggtggtatgttgacgaactggaaaacacttcgccaatctatcaaccgtttgaaagatcttcaaactcaatctcaagatggtacttttgctaagctgactaagcgtgaagcattagagcgtacccgtgagatggaaaaacttgagcgttctttaggcggcgttaaaaacatgggtggtttacctgacgcattatttgtaatcgacgtagatcacgaagcgattgcaattaaagaagctaaaaaccttggtattcctgtaattggtatcgttgatacaaactctaatccagataacgtagattacgttattcctggtaatgacgatgcgattcgtgcagtaactctatatgcttcagcgatggctgacgcaattcttgctggtaaagaatacgcgcaatctcaagcgaatgctcaagctaaaggcgaagaagctccggctgcttctgaggcttaa

SEQ ID NO: 30829 - protein, 249 aa, Acinetobacter sp
MADYNVSMRDLLQAGAHFGHQTRFWNPKMRQYIFGARNKIHIINLEHTVPALNDALNFANQLASKKNKVLFVGTKRAASNIIREQAQRAGQPYVDHRWLGGMLTNWKTLRQSINRLKDLQTQSQDGTFAKLTKREALERTREMEKLERSLGGVKNMGGLPDALFVIDVDHEAIAIKEAKNLGIPVIGIVDTNSNPDNVDYVIPGNDDAIRAVTLYASAMADAILAGKEYAQSQANAQAKGEEAPAASEA

SEQ ID NO: 30830 - DNA, 768 bp, Agrobacterium tumefaciens
  CDS (1)..(768): transl_table=11
atggcattgcccgatttttctatgcgtcagcttctcgaagctggtgttcactttggtcaccagacgcatcgctggaacccgaagatgaagccgtacatcttcggcgaccgtaacaacatccacatcatcgacctggctcagaccgttccgatgctttcgcgcgcccttcaggtcgtgtccgacaccgttgcccgtggcggccgcgttctgttcgttggcaccaagcgccaggcgtcggaaatcattgccgacagcgcaaagcgttcggcccagtactacgtcaactcccgctggctcggcggcatgatgaccaactggaagaccatttcgaactcgatccagcgtctgcgcaaggttgacgaaatcctgaactcggaaggctccggctattccaagaaagagcgtctgaccctcgagcgcgaacgcgaaaagcttgaaaaggctctcggcggtatccgcgatatgggcggcgttccggacctgatgttcatcatcgacaccaacaaggaaaagatcgcgatcgaagaagccaagcgtcttggcattccggtcgttgcgatcatcgacagcaactgcgacccggatcacatcgactatccgatccccggtaacgacgatgcctcgcgcgccatctcgctttattgcgacctgatcgcccgcgctgccatcgacggtatcgcacgtcagcagggcgcttccggccgcgacatcggcgcttctgaagaagctccgattgagcccgctctcgaagacgaggctggcgcctga

SEQ ID NO: 30831 - protein, 255 aa, Agrobacterium tumefaciens
MALPDFSMRQLLEAGVHFGHQTHRWNPKMKPYIFGDRNNIHIIDLAQTVPMLSRALQVVSDTVARGGRVLFVGTKRQASEIIADSAKRSAQYYVNSRWLGGMMTNWKTISNSIQRLRKVDEILNSEGSGYSKKERLTLEREREKLEKALGGIRDMGGVPDLMFIIDTNKEKIAIEEAKRLGIPVVAIIDSNCDPDHIDYPIPGNDDASRAISLYCDLIARAAIDGIARQQGASGRDIGASEEAPIEPALEDEAGA

SEQ ID NO: 30832 - DNA, 756 bp, Azoarcus sp
  CDS (1)..(756): transl_table=11
atgactgtcacgatgcgtcagatgctcgaagcgggcgtccactttggccaccagacccgattctggaatccgcgcatggccccgtacattttcggccagcgcaacaagatccacatcgtcaacctcgaaaagacgatgggcaagtacaacgaagcgatgaactacgtgcgcaagctcgcggccaatcgcggcacgatcctgctcgtcggcaccaagcgccaggcacgcgagatcgtctccgaggaagccagccgtgccggcatgccgttcgtcgatgagcgctggctcggcggcatgctgaccaacttcaagacggtcaagcagtcgatcaagcgcctcaaggaaatggaagcgatggtcgaggatggctcgatcgagcgcctgtccaagaaggaagcgctgatggcgacgcgcgaaatggacaagctgaagaagagcatcggcggcatcaaggacatgggcggcctgcccgatgcgatgttcgtcatcgacgtcggctaccacaagatcgcgatcaccgaagcgcagaagctcggcatccccatcgtcgccgtcgtcgataccaaccattcgcccgagggaatcgactacgtgatccccggcaacgacgactcgtcgcgtgcgatccgcctgtacgctcgcggcgtcgccgacgcggtgctcgaaggccgcagccaggcgctgcaggacgtcgtcgccgcgggttcggacgagttcgtcgaagtccaggaagacggctcggacgagcaggcctga

SEQ ID NO: 30833 - protein, 251 aa, Azoarcus sp
MTVTMRQMLEAGVHFGHQTRFWNPRMAPYIFGQRNKIHIVNLEKTMGKYNEAMNYVRKLAANRGTILLVGTKRQAREIVSEEASRAGMPFVDERWLGGMLTNFKTVKQSIKRLKEMEAMVEDGSIERLSKKEALMATREMDKLKKSIGGIKDMGGLPDAMFVIDVGYHKIAITEAQKLGIPIVAVVDTNHSPEGIDYVIPGNDDSSRAIRLYARGVADAVLEGRSQALQDVVAAGSDEFVEVQEDGSDEQA

SEQ ID NO: 30834 - DNA, 702 bp, Bacillus anthracis
  CDS (1)..(702): transl_table=11
atgtcagtaatttctatgaagcaattgcttgaagctggtgttcatttcggacatcaaactcgtcgttggaacccaaaaatgaagcgttacattttcacagagcgtaacggtatctacatcatcgacttacaaaaaactgtgaaaaaagttgaggaagctttcaaagttatgcgtgacatcgctgctgaaggcggagacatcttattcgtaggtactaaaaaacaagcacaagaagctattaaagaagaagcaactcgtgctggtatgtacttcgttaaccaacgttggttaggtggaactttaactaacttccaaacaatccaaaagcgtatcaagcgtcttaaagacatcgaaagaatgcaagaagatggtactttcgaagtactacctaagaaagaagttgttcaacttaaaaaagagttagagcgtcttgagaaattcttaggcggtattaaagatatgaaaggtcttccaagtgcattattcgtagtagaccctcgtaaagagcgtattgcagttgctgaagcacgcaaattacacattccaatcatcggtatcgttgatacaaactgtgatccagacgaaatcgatcacgttatcccagcaaacgatgatgcaattcgtgctgtaaaacttcttacatctaaaatggcagacgcgatccttgaagcaaaacaaggtgaagaaactgttactgcgtaa

SEQ ID NO: 30835 - protein, 233 aa, Bacillus anthracis
MSVISMKQLLEAGVHFGHQTRRWNPKMKRYIFTERNGIYIIDLQKTVKKVEEAFKVMRDIAAEGGDILFVGTKKQAQEAIKEEATRAGMYFVNQRWLGGTLTNFQTIQKRIKRLKDIERMQEDGTFEVLPKKEVVQLKKELERLEKFLGGIKDMKGLPSALFVVDPRKERIAVAEARKLHIPIIGIVDTNCDPDEIDHVIPANDDAIRAVKLLTSKMADAILEAKQGEETVTA

SEQ ID NO: 30836 - DNA, 702 bp, Bacillus cereus
  CDS (1)..(702): transl_table=11
atgtcagtaatttctatgaagcaattgcttgaagctggtgttcatttcggacatcaaactcgtcgttggaacccaaaaatgaagcgttacattttcacagagcgtaacggtatctacatcatcgacttacaaaaaactgtgaaaaaagttgaggaagcttacagaacgatgcgcgacatcgctgctgaaggcggagacatcttattcgtaggtactaaaaaacaagcacaagaagctattaaagaagaagcaactcgtgctggtatgtacttcgttaaccaacgttggttaggtggaactttaacaaacttccaaacaatccaaaagcgtatcaagcgtcttaaagacatcgaaagaatgcaagaagatggtactttcgaagtacttcctaagaaagaagttgttcaacttaaaaaagagttagagcgtcttgagaaattcttaggcggtattaaagatatgaaaggtcttccaagtgcattattcgtagtagaccctcgtaaagagcgtattgcagttgctgaagcacgcaaattacacattccaatcatcggtatcgttgatacaaactgtgatccagacgaaatcgatcacgttatcccagcaaacgatgatgcaattcgtgctgtaaaacttcttacatctaaaatggcagacgcgatccttgaagcaaaacaaggtgaagaaactgttactgcgtaa

SEQ ID NO: 30837 - protein, 233 aa, Bacillus cereus
MSVISMKQLLEAGVHFGHQTRRWNPKMKRYIFTERNGIYIIDLQKTVKKVEEAYRTMRDIAAEGGDILFVGTKKQAQEAIKEEATRAGMYFVNQRWLGGTLTNFQTIQKRIKRLKDIERMQEDGTFEVLPKKEVVQLKKELERLEKFLGGIKDMKGLPSALFVVDPRKERIAVAEARKLHIPIIGIVDTNCDPDEIDHVIPANDDAIRAVKLLTSKMADAILEAKQGEETVTA

SEQ ID NO: 30838 - DNA, 735 bp, Bacillus halodurans
  CDS (1)..(735): transl_table=11
gtggcagttatttccatgaaacaattgttggaagctggggtgcacttcggtcaccaaacacgccgttggaaccctaaaatggatcgctacatcttcacagaacgtaacggaatttacattatcgatttacaaaagaccgtcaaaaaagtagaggaagcgtacaattttgttcgcgaacttgctgctgacggcgggaaagtccttttcgtagggacgaaaaagcaagcgcaagattcagtgaaggaagaagctgagcgctgcggtatgtactatatcaaccaacgttggttaggtggtacattaacgaactttgagaccattcaaaagcgcattgatcgccttaaaaagctcgagaaaatggaagaggatggaacgttcgatgttcttcctaagaaagaagttatccttcttaagaaagagatggagcgtcttgagaagttcctaggcggaattaaagatatgaacagccttccggatgccctttttgtgatcgaccctcgtaaagagcgtattgcgatcgcggaggctcataagctaaacattccaatcgtagcgattgtagatacaaactgtgacccagatgaaatcgattatgtcattccaggtaacgatgacgcgattcgcgcggttaaacttttgactggaaaaatggcagatgctgtagtagaagcaacttctggtgctggcgaagaggcagaagaagtggcggaagtgacagaagagacaacagcttaa

SEQ ID NO: 30839 - protein, 244 aa, Bacillus halodurans
MAVISMKQLLEAGVHFGHQTRRWNPKMDRYIFTERNGIYIIDLQKTVKKVEEAYNFVRELAADGGKVLFVGTKKQAQDSVKEEAERCGMYYINQRWLGGTLTNFETIQKRIDRLKKLEKMEEDGTFDVLPKKEVILLKKEMERLEKFLGGIKDMNSLPDALFVIDPRKERIAIAEAHKLNIPIVAIVDTNCDPDEIDYVIPGNDDAIRAVKLLTGKMADAVVEATSGAGEEAEEVAEVTEETTA

SEQ ID NO: 30840 - DNA, 729 bp, Bacillus clausii
  CDS (1)..(729): transl_table=11
gtggcagtaatctccatgaagcaattgcttgaagcaggtgtccactttggccatcaaacacgccgctggaaccctaaaatggatcgctacatcttcacagaaagaaacggaatttacattattgacttgcaaaaaacggtcaaaaaagtcgaaacagcgtacaactttgttcgtgatcttgcggctgacggagggaaaatcctttttgtcggcacgaaaaaacaagcgcaagattctgttcgcgacgaagcaatccgctgcggcatgtactacattaaccaacgctggcttggcggaacgcttacaaactttgagacgattcaaaagcggattacgcgcttgaaaaaccttgaaaaaatgcaagaagacggcacttttgatgtgcttccaaagaaagaagtcatcttgctgaaaaaagaaatggaccgtctagaaaaattcttaggcggaattaaagacatgaacggcgtgccggatgcgctgtttgttatcgatcctcgtaaagagcggattgcaattgccgaagcgcataaattaaacattccaattgtagcgattgtcgatacaaactgtgatcctgacgaaatcgattacgttatccctggtaacgatgatgccatccgcgctgtgaaactactaactggaaaaatggctgacgctgtgattgaggcgacagctggtgaatcagaagaagaagtcgacgttgaagaagaaacaacaacagcgtaa

SEQ ID NO: 30841 - protein, 242 aa, Bacillus clausii
MAVISMKQLLEAGVHFGHQTRRWNPKMDRYIFTERNGIYIIDLQKTVKKVETAYNFVRDLAADGGKILFVGTKKQAQDSVRDEAIRCGMYYINQRWLGGTLTNFETIQKRITRLKNLEKMQEDGTFDVLPKKEVILLKKEMDRLEKFLGGIKDMNGVPDALFVIDPRKERIAIAEAHKLNIPIVAIVDTNCDPDEIDYVIPGNDDAIRAVKLLTGKMADAVIEATAGESEEEVDVEEETTTA

SEQ ID NO: 30842 - DNA, 741 bp, Bacillus subtilis
  CDS (1)..(741): transl_table=11
atgtcagtcatttctatgaagcaattgcttgaagctggtgttcacttcggtcaccaaacacgccgttggaacccaaaaatgaagcgttacattttcacggagcgtaacggaatctacatcattgaccttcaaaaaacagtcaaaaaagtagaggaagcttacaacttcactaaaaatcttgctgctgaaggcggaaaaatccttttcgtcggaacaaaaaaacaagctcaagattctgttaaagaagaagctcaacgctctggcatgtactatgtcaaccaacgctggttgggcggtacattaacaaacttcgaaacaatccaaaaacgtattaaacgtcttaaagacattgaaaaaatgcaagaaaacggtacgtttgatgtacttcctaaaaaagaagtcgttcaattgaaaaaagaattagagcgtcttgaaaaattcctaggcggaattaaagatatgaaggatcttcctgatgcattattcatcatcgatcctcgcaaagagcgcatcgctgttgcggaagctcgcaaattaaacatccctatcatcggtatcgtagatactaactgtgatccagatgaaatcgatgttgttatcccagcgaacgatgacgctatccgcgctgttaaacttctaacttctaaaatggcagatgcaatcttagaagcgaagcaaggcgaagaagaagcggaagttgctgaagaaactgcaccagaaacagaaacaacaactgcgtaa

SEQ ID NO: 30843 - protein, 246 aa, Bacillus subtilis
MSVISMKQLLEAGVHFGHQTRRWNPKMKRYIFTERNGIYIIDLQKTVKKVEEAYNFTKNLAAEGGKILFVGTKKQAQDSVKEEAQRSGMYYVNQRWLGGTLTNFETIQKRIKRLKDIEKMQENGTFDVLPKKEVVQLKKELERLEKFLGGIKDMKDLPDALFIIDPRKERIAVAEARKLNIPIIGIVDTNCDPDEIDVVIPANDDAIRAVKLLTSKMADAILEAKQGEEEAEVAEETAPETETTTA

SEQ ID NO: 30844 - DNA, 774 bp, Bartonella henselae
  CDS (1)..(774): transl_table=11
atggcactaccagattttactatgcaccagcttttagaagcaggtgtacactttggtcaccagacacatcgctggaatccgaagatgaccccttatatttatggtcagcgtaataatattcatattattgatcttgctcagactgttccacttttacaccaagcgcttaaacttgtttcggatacggttgcacgtggtggtcgcattctctttgttggtaccaagcggcaggcctctgatattattgcagatgcagcgaatcgttcggcacaatattatgttaatgcgcgttggctcggaggtatgctgacaaactggaagacaatttctaattcgatacagcgtttgcgtaaactggacaaaattcttgctgctgaagcgcaaggctttaccaaaaaagaacgtttaaatcttgaacgtgatcgtgaaaagcttaaccgtgcacttggtggtattaaggatatgggatctgttccagatcttatatttattatcgataccaataaagaaaatattgctatccaagaagcaaaacgtttaggtatccctgttattgctattattgatactaactgcgatcctgacaacgtcgatcatccaattcctggcaatgatgatgcttcgcgggctatttctctttattgtgatctttttgctcgtgcggctcttgatggtattgctcgtcagcaaggtgcgatgggtatcgatttaggagctcaagctgatgcacctgtggatcctgttttggaaaatactgctccggtttctgagtaa

SEQ ID NO: 30845 - protein, 257 aa, Bartonella henselae
MALPDFTMHQLLEAGVHFGHQTHRWNPKMTPYIYGQRNNIHIIDLAQTVPLLHQALKLVSDTVARGGRILFVGTKRQASDIIADAANRSAQYYVNARWLGGMLTNWKTISNSIQRLRKLDKILAAEAQGFTKKERLNLERDREKLNRALGGIKDMGSVPDLIFIIDTNKENIAIQEAKRLGIPVIAIIDTNCDPDNVDHPIPGNDDASRAISLYCDLFARAALDGIARQQGAMGIDLGAQADAPVDPVLENTAPVSE

SEQ ID NO: 30846 - DNA, 774 bp, Bartonella quintana
  CDS (1)..(774): transl_table=11
atggcattaccagattttactatgcaccagcttttagaagcaggtgtacactttggtcaccagactcatcgctggaatccgaagatgattcgctatatttatggtcagcgtaataatattcatattattgatcttgctcagactgttccacttttacaccaagcacttaaacttgtttcagatacggttgcgcggggtggtcgcattctctttgttgggactaagcggcaggcatctgacattattgcggatgcagcgaatcgttcggcacaatattatgttaatgcgcgttggctcggaggcatgctgacaaactggaaaacaatttccaattcgatacatcgtttgcgtaagcttgataaaattcttgctactgaaacacaaggctttaccaaaaaagaacgtttaaatctcgaacgcgatcgtgaaaaacttaaccgtgcgcttggtggcattaaggatatggggtctgttccagatcttatattcataatcgataccaataaagaaaatattgctatccaagaagcgaaacgtctaggtattcctgttattgctattattgataccaattgcaatcctgataacgtcgatcatccgattccaggtaatgacgatgcttcacgggcaatttctctttattgtgatctttttgcccgtgcagctcttgatggtattgctcgtcagcaaggtgcaatgggtatcgatttaggagctcaagctgatgcgcctgtgaaacctattttggaaaatacgattccagtttctgaatag

SEQ ID NO: 30847 - protein, 257 aa, Bartonella quintana
MALPDFTMHQLLEAGVHFGHQTHRWNPKMIRYIYGQRNNIHIIDLAQTVPLLHQALKLVSDTVARGGRILFVGTKRQASDIIADAANRSAQYYVNARWLGGMLTNWKTISNSIHRLRKLDKILATETQGFTKKERLNLERDREKLNRALGGIKDMGSVPDLIFIIDTNKENIAIQEAKRLGIPVIAIIDTNCNPDNVDHPIPGNDDASRAISLYCDLFARAALDGIARQQGAMGIDLGAQADAPVKPILENTIPVSE

SEQ ID NO: 30848 - DNA, 696 bp, Blochmannia floridanus
  CDS (1)..(696): transl_table=11
atgaaaaagctttctatgcgtgaaatgttacaagctggggttcattttgggcatcaaactcgttattggaatcctaaaatgaaaccttttatttttggaattagaaacaaaatacatattattaatttggataaaactattgtaatgtttagtaatgcattagtcgaattaaaaaaaattgctttagcaaagggcaaaattttatttgtaggaacaaaacgtgcaactcgagagtcaataaagagtactgcgcttatttgtgggcaattttttgttaattatcgctggttagggggaatgttaacaaattggaaaactgtgcgccaatctataaaacgtttgaaggatttagaaaatcaatctcaagatgggacttttgataaattaacgaaaaaagaagttttaattttgaatcgtgaattaataagtttagaaaatagtttaggaggtattaaaaatatgggaggtttaccggatgcactttttacagcaggggcggaacaagagcatattgctataaaagaggcaaatagcttaggcattccggttttttcaattgttgatactaattctgatccagatggaatagattttattattccaggaaatgatgatgctattcgagctataaatttatatttaaatatagtatctaatgttatatgttcagatgaattaaataaagaaacacattga

SEQ ID NO: 30849 - protein, 231 aa, Blochmannia floridanus
MKKLSMREMLQAGVHFGHQTRYWNPKMKPFIFGIRNKIHIINLDKTIVMFSNALVELKKIALAKGKILFVGTKRATRESIKSTALICGQFFVNYRWLGGMLTNWKTVRQSIKRLKDLENQSQDGTFDKLTKKEVLILNRELISLENSLGGIKNMGGLPDALFTAGAEQEHIAIKEANSLGIPVFSIVDTNSDPDGIDFIIPGNDDAIRAINLYLNIVSNVICSDELNKETH

SEQ ID NO: 30850 - DNA, 750 bp, Bordetella bronchiseptica
  CDS (1)..(750): transl_table=11
atgtccctcatgcgtgaaatgctggaagctggcgtccacttcggccaccagacccgttactggaaccccaagatggccccgtacatcttcggtcaccgtaacaagattcacatcatcaacctcgagcagacggtcgccaagtaccaggaagcctcgaagttcgtcaagcaactggtcgcccgtggcggcaacatcctgttcgtcggcaccaagcgcgccgcgcgcgaactggtggcaaccgaagccgcccgctgcggcatgccctacgtcgacgcccgctggctcggcggcatgctgaccaacttcaagacggtcaagagctcgatcaagcgcctgaaggacatggaagccatggtcgccgacggcggcttcgagcgcatgaccaagaaggaaggcctgctgttccagcgcgaactggacaagctgaacaagtcgatcggcggcatcaaggacatgaacggcctgcccgacgcgctgttcgtcatcgacgtcggctaccacaagatcgcggtcgccgaagccaaggtgctgggcatcccggtcgtggccgtggttgataccaaccactcgcccgacggcatcgaccatgtcattcccggcaacgacgactcggcccgcgccatcgcgctgtacgccaagggcatggccgacgccgtgctggaaggccgcgagcagaacatcaatggcctggtcgaggaaatcggcgaaggccaggaagagttcgtcgaagtgcaggacaaccaggcctga

SEQ ID NO: 30851 - protein, 249 aa, Bordetella bronchiseptica
MSLMREMLEAGVHFGHQTRYWNPKMAPYIFGHRNKIHIINLEQTVAKYQEASKFVKQLVARGGNILFVGTKRAARELVATEAARCGMPYVDARWLGGMLTNFKTVKSSIKRLKDMEAMVADGGFERMTKKEGLLFQRELDKLNKSIGGIKDMNGLPDALFVIDVGYHKIAVAEAKVLGIPVVAVVDTNHSPDGIDHVIPGNDDSARAIALYAKGMADAVLEGREQNINGLVEEIGEGQEEFVEVQDNQA

SEQ ID NO: 30852 - DNA, 801 bp, Brucella melitensis; identical to SEQ ID NO: 30472
  CDS (31)..(801): transl_table=11

SEQ ID NO: 30853 - protein, 256 aa, Brucella melitensis
MALPDFSMRQLLEAGVHFGHQTHRWNPKMAPFIYGERNNIHILDLSQTVPLLNSALKVVSDTVARGGRVLYVGTKRQASDIIADAGNRSAQYYVNARWLGGMMTNWKTISNSIQRLRKLDELLAGEAQGFTKKERLNLEREREKLDRALGGIKDMGSVPDLMFIIDTNKEAIAIQEAKRLGIPVVAVIDSNCDPDQIDYPIPGNDDAARAIALYCDLIARAALDGIARQQGAMGIDVGAQVEAPVEPALQAPAEGA

SEQ ID NO: 30854 - DNA, 771 bp, Brucella suis
  CDS (1)..(771): transl_table=11
atggcattgcctgatttcagcatgcgccagcttctggaagctggtgttcacttcggccaccagacccatcgctggaacccgaagatggctcccttcatctatggtgagcgcaacaatatccacattctcgatctgtcccagaccgttcctctgttgaacagcgcgctgaaggtcgtttcggacactgttgcccgcggcggtcgcgttctgttcgttggcacgaagcgtcaggcttcggacatcattgccgatgccgccaaccgttcggcccagtattatgtcaatgcccgctggctcggcggcatgatgaccaactggaagacgatctccaactcgatccagcgtctgcgcaagctcgacgaacttctggctggcgaagcccagggcttcaccaagaaggaacgcctgaaccttgagcgtgaacgtgaaaaactcgaccgcgcgctcggtggtatcaaggacatgggttcggttcccgacctgatgttcatcattgacaccaataaggaagcgatcgccattcaggaagccaagcgccttggcattccggttgtcgccgtgatcgactcgaactgcgatcccgaccagatcgactatccgatcccgggcaatgacgacgctgctcgcgccatcgcgctttattgcgacctgattgctcgcgccgctctcgacggcattgcccgccagcagggcgccatgggcatcgatgtcggtgcgcaggttgaggctccggtcgagcctgcccttcaggctccggccgaaggcgcctga

SEQ ID NO: 30855 - protein, 256 aa, Brucella suis
MALPDFSMRQLLEAGVHFGHQTHRWNPKMAPFIYGERNNIHILDLSQTVPLLNSALKVVSDTVARGGRVLFVGTKRQASDIIADAANRSAQYYVNARWLGGMMTNWKTISNSIQRLRKLDELLAGEAQGFTKKERLNLEREREKLDRALGGIKDMGSVPDLMFIIDTNKEAIAIQEAKRLGIPVVAVIDSNCDPDQIDYPIPGNDDAARAIALYCDLIARAALDGIARQQGAMGIDVGAQVEAPVEPALQAPAEGA

SEQ ID NO: 30856 - DNA, 735 bp, Buchnera aphidicola subsp
  CDS (1)..(735): transl_table=11
atggaaattgtatcaatgcgcgagatgttaaaagcaggagttcatttcggtcaccaaacacgttattggaatccgaaaatgaaaccttttatttttggtattcgtaatagagtacatattattaatttagaaaagaccctaccaatgtttcatttcgctctatcagaattaaaaaaaattgctttgaagaaaggtagaatattgtttgtaggtactaagaaagctgcaagcaaaggaataaaagaagtcgctattaattgcgaacaattttatgtaaatcatcgttggctaggtggtatgttaacaaattggaaaactgttcgacaatctataaaacgtttaaaagatctagaaatagaatctaaagatggtactttttctaaattgactaaaaaagaagctttaataagatcaagagaattatttaaattagaaaatagtttaggaggtattaaaaatatgggaggattgcccgattgcttatttgttattgatgctgcacatgaaaatattgcaataacagaagctaataacttaggtattcctgtattttctatagttgatactaattctaatcctgatggtgtagattacatcatacctggtaatgatgatgccattagatctgtgaatctttatttaaaatctataatgcttacaatttctaaaataaataatcaaaattcgttagataaagtttttattgatactaaaaacagtactaatattgaatag

SEQ ID NO: 30857 - protein, 244 aa, Buchnera aphidicola subsp
MEIVSMREMLKAGVHFGHQTRYWNPKMKPFIFGIRNRVHIINLEKTLPMFHFALSELKKIALKKGRILFVGTKKAASKGIKEVAINCEQFYVNHRWLGGMLTNWKTVRQSIKRLKDLEIESKDGTFSKLTKKEALIRSRELFKLENSLGGIKNMGGLPDCLFVIDAAHENIAITEANNLGIPVFSIVDTNSNPDGVDYIIPGNDDAIRSVNLYLKSIMLTISKINNQNSLDKVFIDTKNSTNIE

SEQ ID NO: 30858 - DNA, 735 bp, Buchnera aphidicola subsp
  CDS (1)..(735): transl_table=11
atggaaatagtatcaatgcgcgatatgttaaaagccggtgttcactttggtcatcaaacacgctattggaatccgaagatgaaaccttttatttttggttctcgaaataaagtgcatatcattaatttggaaaaaacccttccaatgtttaattttgctttatctgaattgaaaaaaatttctttaaaaaaaggaaaaatactatttgtaggtactaaaagagcagccagtaaaaaaataaaagaaacggctttaaattgcaatcaattttacgttaatcatcgttggttaggaggtatgctaactaactggaaaactgttcgccaatctataaaacgtttaaaagatttagagacagaatcacaagatggcactttttcaaaaattactaagaaagaagcattaataagaacacgagaattatctaaattagaaaatagtttaggtggtattaagaatatgggggggttacctgattgtttatttgtcattgatgctgctcatgaaaatattgcgattaaagaagcaaacaatttaggaattcctgtatttgccatagttgatactaattctaatcctgatggtgtagattatgttattcctggtaatgatgatgctattagatcagtgactttatatttacaggctgtatcacttagtatttgtaaaaaccaaaatggtaattcgtttagcgaaatgttgttagattcagataaaaaaatgaacatagaataa

SEQ ID NO: 30859 - protein, 244 aa, Buchnera aphidicola subsp
MEIVSMRDMLKAGVHFGHQTRYWNPKMKPFIFGSRNKVHIINLEKTLPMFNFALSELKKISLKKGKILFVGTKRAASKKIKETALNCNQFYVNHRWLGGMLTNWKTVRQSIKRLKDLETESQDGTFSKITKKEALIRTRELSKLENSLGGIKNMGGLPDCLFVIDAAHENIAIKEANNLGIPVFAIVDTNSNPDGVDYVIPGNDDAIRSVTLYLQAVSLSICKNQNGNSFSEMLLDSDKKMNIE

SEQ ID NO: 30860 - DNA, 687 bp, Buchnera aphidicola subsp
  CDS (1)..(687): transl_table=11
atgatggtatcaatgagagatatgttaaatgcaggtgttcattttggtcatcaaactcgttattggaatcctaaaatgaagccgtttatttttggatcaaaaaataaagtacatattattaatttagaaaagacaatgacgatgtttaattttgcgttgttcgaattaaaaaaaatttcattgcgaaaaggtaagattttatttgtaggaactaaacaatcggctagtaaaataataaaagaatcagctattttatgtaaacagttttatgttaatcatcgttggttaggtggtatgttaactaattggaaaactgttcgtcaatctataaaacgtttaaaggatttagaatcacaatcacaagatggaacttttaataaattaacaaagaaagaagtgttattgcgtatgcgcgaattgtcaaaattagaaaatagtttaggtggaattaaggaaatgggtagtttgccagatgcattatttgtagttgatgctgatcatgaacatatagctattcgtgaagctaataatttaggtatttctgtattttcaatagttgatactaattctgatcctgatggagttgactttattattcctggtaatgatgatgcaattcgagcagttaatttatatttaaatgctgtttctaaagttattaaaaaaaatgttaaaaatgaaaaataa

SEQ ID NO: 30861 - protein, 228 aa, Buchnera aphidicola subsp
MMVSMRDMLNAGVHFGHQTRYWNPKMKPFIFGSKNKVHIINLEKTMTMFNFALFELKKISLRKGKILFVGTKQSASKIIKESAILCKQFYVNHRWLGGMLTNWKTVRQSIKRLKDLESQSQDGTFNKLTKKEVLLRMRELSKLENSLGGIKEMGSLPDALFVVDADHEHIAIREANNLGISVFSIVDTNSDPDGVDFIIPGNDDAIRAVNLYLNAVSKVIKKNVKNEK

SEQ ID NO: 30862 - DNA, 741 bp, Burkholderia mallei
  CDS (1)..(741): transl_table=11
atggcaatcacgatgcgccaaatgctggaagccggtgtccacttcggtcaccagacgcgcttctggaacccgaagatggctcctttcatcttcggtcaccgcaacaagattcacatcatcaacctcgaaaagacgctgccgatgtacaacgacgcgctgaagtacgtgcgtcagctcgcagcgaatcggggcacgatcctcttcgtcggcacgaagcgccagtcgcgcgacacgatcgcgcaggaagcgctgcgcgcgggcatgccgtacgtgaacgcacgctggctcggcggcatgctgaccaacttcaagacgctgaaggtatcgatcaagcgcctgaaggacatggaagcggcggtcgaggcgggcgagctcgagaagatgagcaagaaggaagcgctgctgttcgaacgcgaaatcgcgaagctgcagaagtcgatcggcggcgtgaaggacatgggcggcattccggacgcgatcttcgtcgtcgacgtcggctatcacaagatcgccgtcaccgaagcgaacaagctgggcgtgcccgtcatcgcggtggtcgacacgaaccactcgccggaaggcgtggactacgtgatcccgggtaacgacgattcgagcaaggcggtcgcgctgtacgcgcaaggcgtcgccgacgcgatcctcgaaggccgtgcgaacgcggtcaacgaagtggtccaggcggtgcgcggcgacgacgaatacgtcgaggaaaacgcgtaa

SEQ ID NO: 30863 - protein, 246 aa, Burkholderia mallei
MAITMRQMLEAGVHFGHQTRFWNPKMAPFIFGHRNKIHIINLEKTLPMYNDALKYVRQLAANRGTILFVGTKRQSRDTIAQEALRAGMPYVNARWLGGMLTNFKTLKVSIKRLKDMEAAVEAGELEKMSKKEALLFEREIAKLQKSIGGVKDMGGIPDAIFVVDVGYHKIAVTEANKLGVPVIAVVDTNHSPEGVDYVIPGNDDSSKAVALYAQGVADAILEGRANAVNEVVQAVRGDDEYVEENA

SEQ ID NO: 30864 - DNA, 792 bp, Campylobacter jejuni
  CDS (1)..(792): transl_table=11
atggttagtatgagagatttattagaatgcggtgtgcattttggacaccaaacaagacgctggaatccaaagatgaaaaaattcatttttggcgagagaaaaggtatttatgtaattgatttacaaaaaactttaagatattttagatatacctataatatcgttcgtgacgctgctgctgaaggaaaaactatactttttgttgggacaaaaaaacaagcaggtggagcgattaaagaatacgctgaaaaatgcggtatgccttatgtaaatcatagatggcttggcggtatgatgacaaattttggtactattcgccaatcaattagaaaattagaagtaattgaaaaaatggaagaagatggaagtattaaacttttaactaaaaaagaagctttaatgcttacaagaaaaaaagaaaaattattagcttatttaggtggaattcgttatatgaaaactcaacctgatatgatttttgttattgacacagtaaaagaaaaaattgctgttcaagaagcaaatagattaagaattcctgttgtagctccactagatacaaactgcgatcctgacttggtaacttatcctattccaggaaatgatgatgcaattcgttcagtgcaacttttctgccaagaaatggctgaagcgattaatgaaggaaaagctttaagagaacaagatggcgaagctttagtaaatgaagaaaaagaaatcaccgatgaagagaaaaaagaagttttagatgaagcgatgagcgaagaagacttcggtgaggagcaagaataa

SEQ ID NO: 30865 - protein, 263 aa, Campylobacter jejuni
MVSMRDLLECGVHFGHQTRRWNPKMKKFIFGERKGIYVIDLQKTLRYFRYTYNIVRDAAAEGKTILFVGTKKQAGGAIKEYAEKCGMPYVNHRWLGGMMTNFGTIRQSIRKLEVIEKMEEDGSIKLLTKKEALMLTRKKEKLLAYLGGIRYMKTQPDMIFVIDTVKEKIAVQEANRLRIPVVAPLDTNCDPDLVTYPIPGNDDAIRSVQLFCQEMAEAINEGKALREQDGEALVNEEKEITDEEKKEVLDEAMSEEDFGEEQE

SEQ ID NO: 30866 - DNA, 807 bp, Caulobacter crescentus
  CDS (1)..(807): transl_table=11
atggctcttcccgaattctccatgcgtcagctcctggaagccggcgctcacttcggtcaccagacgcaccgctggaacccgaagatggaccgctacatcttcggttcgcgctcgaacatccacatcatcgacctgtcgcagtcgatcccgctgctgcaccaggccctggtgaaggttcgtgaagtcgccgccgccggtggccgcgtgctgttcgtcggcaccaagcgccaggccagcgacccggtcgccaccgccgccaagcgctgcgcccagtactacgtgaaccaccgctggctcggcggcaccctgaccaactggcgtaccgtctcgggctcgatcgcgcgtctgcgcgagctggaaggcgtgctggccggcgaaggtcaaggccgctccaagaaggagctgctgcagctgacgcgcgaacgcgacaagctggagctgtcgctgggcggcatcaaggacatgggcggcatccccgacatcatgttcgtgatcgacaccaacaaggaagcgatcgcgatcctggaagcccgcaagctgaacatcccggtcgtcgccatcctcgacaccaactgcgatccggacggcatcacctatcctatcccaggcaacgacgacgccgcccgcgccctgcagctgtactgcgacctgatcgccgacgccgtcctggacggtctggccgctggtcaagccgctgctggcgtggacctcggcgcctcggtggctccggtcgagccggccctggcccgcgaactggcgccggaagctccggccgccgaagcggccccggaatcggccgaaggctga

SEQ ID NO: 30867 - protein, 268 aa, Caulobacter crescentus
MALPEFSMRQLLEAGAHFGHQTHRWNPKMDRYIFGSRSNIHIIDLSQSIPLLHQALVKVREVAAAGGRVLFVGTKRQASDPVATAAKRCAQYYVNHRWLGGTLTNWRTVSGSIARLRELEGVLAGEGQGRSKKELLQLTRERDKLELSLGGIKDMGGIPDIMFVIDTNKEAIAILEARKLNIPVVAILDTNCDPDGITYPIPGNDDAARALQLYCDLIADAVLDGLAAGQAAAGVDLGASVAPVEPALARELAPEAPAAEAAPESAEG

SEQ ID NO: 30868 - DNA, 732 bp, Chromobacterium violaceum
  CDS (1)..(732): transl_table=11
atgtccaccaacgttaccatgcgtcaaatgctggaggctggcgttcacttcggccaccaaacccgcttctggaacccgaagatggccaagtacatcttcggcagccgcaacaagatccacatcatcaacctggaaaagaccctgccgctgttcgtagaggcccaggagtatgtgcgtcgtctggctgccaacaagggcaccgtgatgttcgtgggtaccaagcgtcaggcgcgtgagatcgtacgtgaagaagccgctcgctgcggcatgccgtttgtcgaccaccgctggctgggcggcatgctgaccaactacaagaccgtgaagcagtccatcaagcgtcttgaagagaagcgtgccatcctggaaggcgccggcgaaaccggttacaacaagaaggaactgctggacctgcaacgcgaagttgaaaagctggagcgttcgctgggcggtatcaaggatatgaagggcctgccggacgccatcttcgtgatcgatacaggctaccagaagggcaccattgttgaagccaagaagctgggcatcccggtgatcggcgttgttgataccaacaactccccggacggcatcgattacgtggttccgggcaacgacgactcctcccgcgccatccgcctgtacgctcgcggcatcgccgacgctgtgctggaaggtcgcgcgcactctctgcaagagatcgtcgcagctgctgaaacggcccaggccgagtaa

SEQ ID NO: 30869 - protein, 243 aa, Chromobacterium violaceum
MSTNVTMRQMLEAGVHFGHQTRFWNPKMAKYIFGSRNKIHIINLEKTLPLFVEAQEYVRRLAANKGTVMFVGTKRQAREIVREEAARCGMPFVDHRWLGGMLTNYKTVKQSIKRLEEKRAILEGAGETGYNKKELLDLQREVEKLERSLGGIKDMKGLPDAIFVIDTGYQKGTIVEAKKLGIPVIGVVDTNNSPDGIDYVVPGNDDSSRAIRLYARGIADAVLEGRAHSLQEIVAAAETAQAE

SEQ ID NO: 30870 - DNA, 702 bp, Clostridium perfringens
  CDS (1)..(702): transl_table=11
atgtcagtaatttcaatgaaacaattattagaagctggtgttcatttcggacatcaaacaagaagatggaaccctaaaatggctccttacatctttacagaaagaaacggtatatacataatcgatttacaaaaaactgtaaagaaagctgaagaagcttacaactttataagagaagtatcagaagctggtaaagacgtaatattcgttggaactaaaaaacaagctcaagaagctgttaaagaagaagctgaaagatcaaacatgtacttcgttaaccacagatggttaggaggaatgttaactaacttcacaactataaaaacaagaataaacagattaaacaaattagatgaaatggaacaagacggaacattcgacgttttacctaagaaagaagtaatcaagttaaaacttgaaagagaaaaattacaaagaaacttaggtggaatcaaagaattagacgcttcaaacataggagctatgttcgttgttgacccaagaaaagaaaagaatgcaatagcagaagctaaaatattaggaataccagtagtagctatagttgatactaactgtgatccagaagaagttgactacgtaattccaggaaatgacgatgctataagagcagttaaattaatagctggtaaaatggcagacgctataatcgaaggaagacaaggcgagcaattagcagagtaa

SEQ ID NO: 30871 - protein, 233 aa, Clostridium perfringens
MSVISMKQLLEAGVHFGHQTRRWNPKMAPYIFTERNGIYIIDLQKTVKKAEEAYNFIREVSEAGKDVIFVGTKKQAQEAVKEEAERSNMYFVNHRWLGGMLTNFTTIKTRINRLNKLDEMEQDGTFDVLPKKEVIKLKLEREKLQRNLGGIKELDASNIGAMFVVDPRKEKNAIAEAKILGIPVVAIVDTNCDPEEVDYVIPGNDDAIRAVKLIAGKMADAIIEGRQGEQLAE

SEQ ID NO: 30872 - DNA, 702 bp, Clostridium tetani
  CDS (1)..(702): transl_table=11
atgtcagttatatcaatgaaacaattattagaagcaggtgttcactttggacatcaaacaagaagatggaaccctaaaatggctccatatatctttacagaaagaaatggtatatacataatagacctacaaaagactgtaaagaaagtagagcaagcgtacaacttcataagagaagttgcagcagaaggaaaagatgttatatttgttggtactaaaaaacaagctcaagaagcaatccaagaagaagctgtaagatgcgatatgcactttgttaataatagatggctaggtggaatgctaacaaacttctcaactattaaaggaagaataagaacattagaagaacttgaacaaatggaacaagatggaacatttgaagtgcttcctaaaaaagaagttataaagttaaagttagaagaagaaaaactagaaaagaacttaggtggaattaaaaacttaaatgctaataatgtaggagctatgtttgttgtagatccaagaaaagaaaagaatgctatatcagaagcaaaaatattaggtataccagtagttgctatagtggatacaaactgtgatccagatgaagtagattatgtaattccaggtaatgatgatgctataagagcggtaaaattaattactgcgaaaatggcagatgcagtaatagaaggaagacaaggggaacaattagctgagtaa

SEQ ID NO: 30873 - protein, 233 aa, Clostridium tetani
MSVISMKQLLEAGVHFGHQTRRWNPKMAPYIFTERNGIYIIDLQKTVKKVEQAYNFIREVAAEGKDVIFVGTKKQAQEAIQEEAVRCDMHFVNNRWLGGMLTNFSTIKGRIRTLEELEQMEQDGTFEVLPKKEVIKLKLEEEKLEKNLGGIKNLNANNVGAMFVVDPRKEKNAISEAKILGIPVVAIVDTNCDPDEVDYVIPGNDDAIRAVKLITAKMADAVIEGRQGEQLAE

SEQ ID NO: 30874 - DNA, 801 bp, Corynebacterium diphtheriae
  CDS (1)..(801): transl_table=11
atggcagttgtaaccatgcgcgagcttctcgacgctggtgttcacttcggacaccagacccgtcgctggaacccaaagatgcgtcgtttcatcttcaccgaccgtaacggcatctacatcatcgaccttcagcagaccctgacctacattgacgaggcatacgagttcgtcaaggagacggttgcacacggtggcactatcttgtacgtcggtaccaagaagcaggctcaggagtccgtcaagaacgaggctgagcgcgttggtatgccttacgtcaaccaccgttggcttggcggtatgctcaccaacttccagaccgtttctaagcgacttcaccgtatgaaggagctccaggctatggatgctgcagaaaacggttacgagggtcgcaccaagaaggaagttctcatgctgacccgtgagcgcaccaagttggagcgcgtcctcggcggtattgcagacatgaccaagacgccttctgctatgtgggttgtagacaccaacaaggagcacatcgctgtttccgaggctcacaagctgaacatcccagttgtggcaattcttgacaccaactgtgatccagatgttgttaacttcccagttccaggcaacgatgacgcaatccgctccatcgacgttctgaccaaggttatctctcacgcagttatcgagggcaagaaggctcgcgaagagcgtgcacttgccgctgctaaagaagcagctggcgatgccaacaagaccgaggtagcagctaaggttgaggcaaccgaagaggttgcagctgaagctgaggctaagtaa

SEQ ID NO: 30875 - protein, 266 aa, Corynebacterium diphtheriae
MAVVTMRELLDAGVHFGHQTRRWNPKMRRFIFTDRNGIYIIDLQQTLTYIDEAYEFVKETVAHGGTILYVGTKKQAQESVKNEAERVGMPYVNHRWLGGMLTNFQTVSKRLHRMKELQAMDAAENGYEGRTKKEVLMLTRERTKLERVLGGIADMTKTPSAMWVVDTNKEHIAVSEAHKLNIPVVAILDTNCDPDVVNFPVPGNDDAIRSIDVLTKVISHAVIEGKKAREERALAAAKEAAGDANKTEVAAKVEATEEVAAEAEAK

SEQ ID NO: 30876 - DNA, 831 bp, Corynebacterium efficiens
  CDS (1)..(831): transl_table=11
atggcagtcgtaaccatgcgagagcttctcgatgctggtgtgcacttcggccaccagacccgccgctggaacccgaagatgcgtcgtttcatcttcaccgagcgcaatggcatctacatcatcgacctccagcagaccctgacctacatcgatcaggccttcgagttcgtcaaggagaccgtcgcccacggtggcaccatcctgttcgtcggcaccaagaagcaggcacaggaagctgtccaggttgaggcggagcgcgtcggcatgccgtacgtgaaccaccgctggctcggcggcatgctgaccaacttccagaccgtgtccaagcgtctgcaccgcatgaaggaactccaggcgatggacgctgctgaggacggctacgagggccgcaccaagcgcgagaccctcatgctgacccgcgagcgcgtcaagctggagcgtgtcctcagcggtatcgctgacatgagccgcatcccgtccgctctgtggatcatcgacaccaacaaggagcacatcgctgtcgccgaggcgcacaagctgaacatccctgtggttgccatcctggacaccaactgcgaccctgacgttgtcgattacccggttccgggcaacgacgacgccatccgcgccaccgctctgctgtcccgcgtcatctccaccgctgtggaagagggcaagaaggcacgcgaggagcgtcagctggccgccgcacgtgaagctgccggcgagcccaagtccgaggacgcaccagccgaggctgctgctaccgaagaggcccccgcaaccgaggctcctgcagccgaggcacagcaggagaacgcagctgaataa

SEQ ID NO: 30877 - protein, 276 aa, Corynebacterium efficiens
MAVVTMRELLDAGVHFGHQTRRWNPKMRRFIFTERNGIYIIDLQQTLTYIDQAFEFVKETVAHGGTILFVGTKKQAQEAVQVEAERVGMPYVNHRWLGGMLTNFQTVSKRLHRMKELQAMDAAEDGYEGRTKRETLMLTRERVKLERVLSGIADMSRIPSALWIIDTNKEHIAVAEAHKLNIPVVAILDTNCDPDVVDYPVPGNDDAIRATALLSRVISTAVEEGKKAREERQLAAAREAAGEPKSEDAPAEAAATEEAPATEAPAAEAQQENAAE

SEQ ID NO: 30878 - DNA, 819 bp, Corynebacterium glutamicum
  CDS (1)..(819): transl_table=11
atggcagtcgtaaccatgcgagagcttctcgatgctggtgtgcactttggccaccagacccgccgctggaacccaaagatgcgtcgtttcatcttcaccgagcgtaacggcatctacatcattgaccttcagcagaccctgacctacatcgatcaggctttcgagttcgtcaaggaaaccgttgctcacggtggcaccgttcttttcgttggtaccaagaagcaggctcaggaagctgttcaggttgaggcagaccgcgttggtatgccttacgtgaaccaccgttggctcggcggcatgctgaccaacttccagaccgtttccaagcgtctgaaccgcatgaaggaactgcaggcaatggatgctgcagaaaacggctacgagggtcgcaccaagcgcgaagttctcatgctgacccgtgagcgcaccaagctggagcgcgtcctcggtggtatcgcagagatgacccgcgtgccttccgcactgtggatcattgacaccaacaaggagcacatcgctgtcgctgaggctcacaagctgaacatcccagttgttgccatcctggacaccaactgtgacccagacgttgttgacttcccagttcctggtaacgacgacgcaatccgctccaccgcactgctttcccgcgttatctccaccgctgtggaagagggtaagaaggcacgcgaggagcgtcagctggcagctgctaaggatgcagcaggcgacgcaaagcctgaggcagaggaagcaccagcagcagctgaggctgaagaggcacctgcagctgaggctgaagaggcacctgcagctgagtaa

SEQ ID NO: 30879 - protein, 272 aa, Corynebacterium glutamicum
MAVVTMRELLDAGVHFGHQTRRWNPKMRRFIFTERNGIYIIDLQQTLTYIDQAFEFVKETVAHGGTVLFVGTKKQAQEAVQVEADRVGMPYVNHRWLGGMLTNFQTVSKRLNRMKELQAMDAAENGYEGRTKREVLMLTRERTKLERVLGGIAEMTRVPSALWIIDTNKEHIAVAEAHKLNIPVVAILDTNCDPDVVDFPVPGNDDAIRSTALLSRVISTAVEEGKKAREERQLAAAKDAAGDAKPEAEEAPAAAEAEEAPAAEAEEAPAAE

SEQ ID NO: 30880 - DNA, 942 bp, Coxiella burnetii
  CDS (1)..(942): transl_table=11
atgactgatataaccatgcgtcaactgctggaagctggtgttcattttggacatcaaactcgctattggaaccccaaaatggctccctatatttatggggcccgtcaaaagatccatataatcaaccttgaagagaccttgcccgcttttcgagatgccttgaagttcgtaaaggaagttgcttccaaacgcggcaaagtgctgtttgtggggacaaaatttgcggcacgcgaaattgtaaaagaagaagccacgcgctgcggtatgccctatgtggattatcgctggttgggcggaatgttgactaactacaaaaccattcgccagtcgattaaacgactcaaggaattagaagaacgtctggagaatgaagaaaatttagtcggtatgacgaaaaaagaaatcctaaatttgatgcgcgaaaaagaaaaattgtcagctaatttggctggcattaaaaatatgggcagcttgccagatgtgctgtttgtcattgacgtggaacatgagagaaacgccgttcaggaagcaaatcgtttaggcataacggttctgggaatcgtcgataccaatgccagtcccgataacatcgatcacgttatcccgggtaatgatgatgccattcgcgccattcgactttattgcaaagcgatagcggacactattattgacgcccgcagcgtgttggagttgcaaaaggacgaagaagctaaagaagaaaaaaccaaggcaaaaaccacggcgaagaaagtcgtcactaagaaagcgaaagtagccgaaaaggcacaagccgcagcggagaaaaaatccgaaaaaccgacaactgagaaaagaccaacgaaagaagccgctgaaacgaaagaaacttctgaagagcctaagactaaagaagtgcagcagcccatagaagccagtaaagctgaggcggaagaaggcaaatag

SEQ ID NO: 30881 - protein, 313 aa, Coxiella burnetii
MTDITMRQLLEAGVHFGHQTRYWNPKMAPYIYGARQKIHIINLEETLPAFRDALKFVKEVASKRGKVLFVGTKFAAREIVKEEATRCGMPYVDYRWLGGMLTNYKTIRQSIKRLKELEERLENEENLVGMTKKEILNLMREKEKLSANLAGIKNMGSLPDVLFVIDVEHERNAVQEANRLGITVLGIVDTNASPDNIDHVIPGNDDAIRAIRLYCKAIADTIIDARSVLELQKDEEAKEEKTKAKTTAKKVVTKKAKVAEKAQAAAEKKSEKPTTEKRPTKEAAETKETSEEPKTKEVQQPIEASKAEAEEGK

SEQ ID NO: 30882 - DNA, 765 bp, Desulfovibrio vulgaris
  CDS (1)..(765): transl_table=11
atggcttacgtcagcatgaagcaaatgctggagacgggtgtccacttcggccaccagacccgccgctggaaccccaagatgcgtcctttcatcttcggcgcccgtaacggcatccatatcatcgaccttcagcagaccgtgaagatgttccgcgtcgcccatgacaaggtggtcgacaccgtcgccaacggcggccgcgtgatgttcatcggcaccaagcgtcaggcgcaggaagccgtggccaccgaagccggtcgcgccggtcagttctacgtgaccaaccgttggatgggcggcacgctcaccaacttcttcaccatccagaagagcatcgaccgtctgaagaagcttgaggccatgttcgccgacggcaccgtcaaccgttaccagaagaaggaaatccttcgcctccagcgcgaaatggacaagcttctggcgaccctcggcggtatcaaggacatggacaagctgccccagctcgccttcgtcatcgacccccaccgcgaagacatcgccatcaaggaatgccgcaagctcggcatcccgatcgtggctgtcaccgataccaactgcgatcccgacctcatcgacttcgtcatccccggtaacgacgacgccatccgcgccatcaagctcttcgtcgccgccatcgctgacgcctgcctcgaaggcgacgccctccgcaaggaacgcaagggtcaggacgccgaagaggaactgaagaaggccagcgagcccaaggccgcagaagccgccgccgagtaa

SEQ ID NO: 30883 - protein, 254 aa, Desulfovibrio vulgaris
MAYVSMKQMLETGVHFGHQTRRWNPKMRPFIFGARNGIHIIDLQQTVKMFRVAHDKVVDTVANGGRVMFIGTKRQAQEAVATEAGRAGQFYVTNRWMGGTLTNFFTIQKSIDRLKKLEAMFADGTVNRYQKKEILRLQREMDKLLATLGGIKDMDKLPQLAFVIDPHREDIAIKECRKLGIPIVAVTDTNCDPDLIDFVIPGNDDAIRAIKLFVAAIADACLEGDALRKERKGQDAEEELKKASEPKAAEAAAE

SEQ ID NO: 30884 - DNA, 726 bp, Escherichia coli O157
  CDS (1)..(726): transl_table=11
atggcaactgtttccatgcgcgacatgctcaaggctggtgttcacttcggtcaccagacccgttactggaacccgaaaatgaaaccgttcatcttcggtgcgcgtaacaaagttcacatcatcaaccttgagaaaactgtaccgatgttcaacgaagctctggctgaactgaacaagattgcttctcgcaaaggtaaaatccttttcgttggtactaaacgcgctgcaagcgaagcggtgaaagacgctgctctgagctgcgaccagttcttcgtgaaccatcgctggctgggcggtatgctgactaactggaaaaccgttcgtcagtccatcaaacgtctgaaagacctggaaactcagtctcaggacggtactttcgacaagctgaccaagaaagaagcgctgatgcgcactcgtgagctggagaaactggaaaacagcctgggcggtatcaaagacatgggcggtctgccggacgctctgtttgtaatcgatgctgaccacgaacacattgctatcaaagaagcaaacaacctgggtattccggtatttgctatcgttgataccaactctgatccggacggtgttgacttcgttatcccgggtaacgacgacgcaatccgtgctgtgaccctgtacctgggcgctgttgctgcaaccgtacgtgaaggccgttctcaggatctggcttcccaggcggaagaaagcttcgtagaagctgagtaa

SEQ ID NO: 30885 - protein, 241 aa, Escherichia coli O157
MATVSMRDMLKAGVHFGHQTRYWNPKMKPFIFGARNKVHIINLEKTVPMFNEALAELNKIASRKGKILFVGTKRAASEAVKDAALSCDQFFVNHRWLGGMLTNWKTVRQSIKRLKDLETQSQDGTFDKLTKKEALMRTRELEKLENSLGGIKDMGGLPDALFVIDADHEHIAIKEANNLGIPVFAIVDTNSDPDGVDFVIPGNDDAIRAVTLYLGAVAATVREGRSQDLASQAEESFVEAE

SEQ ID NO: 30886 - DNA, 726 bp, Erwinia carotovora subsp
  CDS (1)..(726): transl_table=11
atggcaactgtttccatgcgcgatatgctcaaggctggcgtacactttggtcaccagacccgttactggaacccgaaaatgaagccattcatcttcggtgcgcgtaacaaagttcacatcatcaaccttgaaaacacagtaccgatgttcaacgatgctttggctgagctgggcaaaattgcttctcgcaaaggcaaaattctgttcgttggtaccaagcgcgcagcaagcgaagcggtaaaagattctgctaacaactgcgatcagttcttcgtgaaccatcgttggttgggcggtatgctgactaactggaaaaccgttcgtcagtccatcaagcgtttgaaagatctggaaatccaatctcaagacggcacgttcgacaagctgaccaaaaaagaggcgctgatgcgcactcgtgaactggacaagcttgagaaaagcctgggtggtatcaaagatatgggtggcctgccagacgcgctgtttgttatcgatgccgatcacgagcacatcgcaatcaaagaagctaacaacctaggtattccggtattcgctgtggttgataccaactctgatcccgatggtgttgacttcatcatccctggtaacgatgacgcaatccgtgcaattaacctgtacctgggtgctgttgctactgctgtccgcgaaggccgttctcaagatctggctgtgcaggcagaagaaggcttagtagaagctgaataa

SEQ ID NO: 30887 - protein, 241 aa, Erwinia carotovora subsp
MATVSMRDMLKAGVHFGHQTRYWNPKMKPFIFGARNKVHIINLENTVPMFNDALAELGKIASRKGKILFVGTKRAASEAVKDSANNCDQFFVNHRWLGGMLTNWKTVRQSIKRLKDLEIQSQDGTFDKLTKKEALMRTRELDKLEKSLGGIKDMGGLPDALFVIDADHEHIAIKEANNLGIPVFAVVDTNSDPDGVDFIIPGNDDAIRAINLYLGAVATAVREGRSQDLAVQAEEGLVEAE

SEQ ID NO: 30888 - DNA, 720 bp, Francisella tularensis subsp
  CDS (1)..(720): transl_table=11
atgtctttaatgaaagaaatgttatcggttggtgttcacttcgggcacaaaaaggctttctggaatccacaaatgaaagaatacatctttggtattaatcatggtgtacatatcattaacctagaaaaaacagttccgcttttccaagatgcggttaactttgttggtaaaactgttgctaacggtggaaaaattctatttgttggtacaaaaagacaagcacaagatatcgttgaagctgaagctaaaagatgtggtatgtcatttgtaagccatagatggctaggtggtatgcttactaactacaaaacggttagacagtctatcaagagattggcacaactagaaaaaatgagagaagatggtactttagaatctcttactaaaaaagagatgttacaaaatattagaactatcgaaaaattagagaaagttcttggtggtatcaaagaaatgggcggtttacctgatgcaatcgttgttattgatagcaacaaagagcatatcgctattcaagaagcacaaaagctaggtatcaaagttgtagcaatcgtagatacaaattcaaacccagaaggtattgattatataatcccaggtaatgatgatgctgttaagtcaatatctttctatatgaaaaaatttgctgatgctgttattgatgctcaaggtctagatagagcagttgaagcaaaagctgatgaagccgctcaagcataa

SEQ ID NO: 30889 - protein, 239 aa, Francisella tularensis subsp
MSLMKEMLSVGVHFGHKKAFWNPQMKEYIFGINHGVHIINLEKTVPLFQDAVNFVGKTVANGGKILFVGTKRQAQDIVEAEAKRCGMSFVSHRWLGGMLTNYKTVRQSIKRLAQLEKMREDGTLESLTKKEMLQNIRTIEKLEKVLGGIKEMGGLPDAIVVIDSNKEHIAIQEAQKLGIKVVAIVDTNSNPEGIDYIIPGNDDAVKSISFYMKKFADAVIDAQGLDRAVEAKADEAAQA

SEQ ID NO: 30890 - DNA, 708 bp, Geobacillus kaustophilus
  CDS (1)..(708): transl_table=11
atgtcggttatttcgatgaaacaactgcttgaagctggcgtccactttggacatcagacgcgccgttggaatccgaagatgaaaaaatacattttcacggagcgcaacggcatctatatcatcgacttgcaaaaaacggtgaaaaaagtcgaggaagcatacaacttcgtccgcgaattggcggcgaatggcggcaaaattttgttcgtcggcacgaaaaaacaagcgcaagagtcggtgaaggaagaagcggaacgctgcgacatgttttatgtcaaccaacgctggctcggcggcacgctgacgaacttcgctacgatccaaaagcggatcaaacggctgcgtgaaattgaaaaaatggaagaagatggaatatttgacgttctgccgaaaaaagaagtcattcgcttgaaaaaagaaaaagagcgtcttgagaagtttttgggcggcatcaaagacatgaaagagctgccagatgcgttgtttgtcattgacccgcgcaaagagcggatcgcggtggcggaagcgcgcaagctgaacatcccgatcatcggcatcgtcgacacgaactgcgatccggatgaaattgactatgtcattccggccaacgacgacgccatccgcgctgttaagctgttgacttcgaaaatcgccgacgccgtgcttgaggcgaaacaaggcgaagaagcggccgtcgcagcagagtaa

SEQ ID NO: 30891 - protein, 235 aa, Geobacillus kaustophilus
MSVISMKQLLEAGVHFGHQTRRWNPKMKKYIFTERNGIYIIDLQKTVKKVEEAYNFVRELAANGGKILFVGTKKQAQESVKEEAERCDMFYVNQRWLGGTLTNFATIQKRIKRLREIEKMEEDGIFDVLPKKEVIRLKKEKERLEKFLGGIKDMKELPDALFVIDPRKERIAVAEARKLNIPIIGIVDTNCDPDEIDYVIPANDDAIRAVKLLTSKIADAVLEAKQGEEAAVAAE

SEQ ID NO: 30892 - DNA, 756 bp, Geobacter sulfurreducens
  CDS (1)..(756): transl_table=11
atgtcgaacatcaccatgaaggagcttctggaggccggtgttcatttcggccaccagaccaagagatggaacccgaagatgaagccatatatcttcggggcgcgtaacggtatttacattatcgacctccagaagaccgtacgcctcttcaagaatgcgtataatttcgttcgtgagaacgcccaggctggcgaaacgatgctcttcgtgggcaccaagaagcaagcccaggatgccatcggcgaagaagcagtccgttgtggcatgtatttcgtcaaccagcgctggcttggcggcatgctcaccaacttcgtcaccgtcaagcagagcatcgaccgcctcaagcggctggatgccatgttcgccgacggctccattgaagcgtacaccaagaaggaagctctgcagcttgaaaaagagcgggagaagctggaaaagattctcggcggcatcaaagggatgggcaagcttcccggcgcgctcttcgtgatcgaccccaagaatgagactatcgccatcagcgaggccaagaagctgggtattcccgttgtggccgtggttgacaccaactgtgaccccgatcccatcgactatgtaattcctggcaatgacgacgccatccgcgccattcgcctgctcacttccaagatggctgacgcggtcatcgagggctcccaggcacgtgacgccgttcttcagaccggcgacgaggaggctatggaagccgctgcggaagagagtggcgccgaggcctga

SEQ ID NO: 30893 - protein, 251 aa, Geobacter sulfurreducens
MSNITMKELLEAGVHFGHQTKRWNPKMKPYIFGARNGIYIIDLQKTVRLFKNAYNFVRENAQAGETMLFVGTKKQAQDAIGEEAVRCGMYFVNQRWLGGMLTNFVTVKQSIDRLKRLDAMFADGSIEAYTKKEALQLEKEREKLEKILGGIKGMGKLPGALFVIDPKNETIAISEAKKLGIPVVAVVDTNCDPDPIDYVIPGNDDAIRAIRLLTSKMADAVIEGSQARDAVLQTGDEEAMEAAAEESGAEA

SEQ ID NO: 30894 - DNA, 825 bp, Gloeobacter violaceus
  CDS (1)..(825): transl_table=11
atgagcgttgtctcgctgccgcaaatgctggaagccggtgtccattttggacaccaaacccgccgctggaatcccaagatgcggcgctatatcttcaccgaccgcaacggcattcacatcatcgatctcacccagaccgcccacctgctcgacgaggcctacagctatctgcgcgaagcttcggaccagggcaagaaaatcctcttcgtgggcaccaagcgccaggcggctcccgtcatcgcccaggaggccaagcgctgcggtatgttctgggtcaaccagcgctggttgggcggcatgctcaccaactgggatacgatccgcacctcggtcgaccagctcaaagaactcgaaactatggaggccaacggcacccttgatctgctgcccaaaaaagaagcgtcggtgacgcgcaagaaactggagcggctcaccaagtacctgggcggcctcaaaaatatgcgccgcaagcctgatattctgctggtggtcgatcagcgccgcgagcagaacgccgtcatggaagcgcgccggctcaacatcccgatcgtctcgcttctcgataccaattgcgacccggatctgaccgacgtgggcatcccggccaacgacgacgccattcgttcgatccggctcatcgtgggcaagttggcggatgccatctacgaaggtcgccacgggcagctcgaagatttctccgaggaggagccggtgccggccgccgcccctgtggcggcggtggcggtggcggtggccgctcccgccgaggcggaatcggaagataaaggcgaagtgctctactcgttcgacgacgaagaagaataa

SEQ ID NO: 30895 - protein, 274 aa, Gloeobacter violaceus
MSVVSLPQMLEAGVHFGHQTRRWNPKMRRYIFTDRNGIHIIDLTQTAHLLDEAYSYLREASDQGKKILFVGTKRQAAPVIAQEAKRCGMFWVNQRWLGGMLTNWDTIRTSVDQLKELETMEANGTLDLLPKKEASVTRKKLERLTKYLGGLKNMRRKPDILLVVDQRREQNAVMEARRLNIPIVSLLDTNCDPDLTDVGIPANDDAIRSIRLIVGKLADAIYEGRHGQLEDFSEEEPVPAAAPVAAVAVAVAAPAEAESEDKGEVLYSFDDEEE

SEQ ID NO: 30896 - DNA, 717 bp, Haemophilus ducreyi
  CDS (1)..(717): transl_table=11
atggcacaagtttctatgcgcgatatgcttaatgctggcgttcactatggtcaccaaactcgttattggaatccaaaaatgaaaccatttatttttggtgcacgtaatggtgtccacgtaatcaatttagaaaaaacattaccattatttaatgaagcattagcagaattaacgcgtatttcaagcaataatggtaaagttttatttgttggtacaaaacgtgcagcgtctgaagcagttaaagcagcagcagtagattgccaacaattctatgtaaatcaccgctggttaggtggtatgttgactaactggaaaacagtacgtcaatcaattaaacgtttaaaagatttagaagctcagactcaagatggtactttcgataaaatcactaagaaagaagctttaatgcgtacacgtgaacttgagaaattagagttaagtcttggcggtatcaaagatatggcaggtttacctgatgcaatttttgttattggcgcagatcatgaacatatcgcaattaaagaagcaaataacttaggtattccagtgtttgctattgttgatactaactcaacgccagatggtattaactacatcattccaggtaacgatgatgcaacacgtgcaattcaactttacttagatgcagcttctgcagccgtgaaagaaggtcgtggctcaaacgttgaagctgaattacaaattccagctgagtaa

SEQ ID NO: 30897 - protein, 238 aa, Haemophilus ducreyi
MAQVSMRDMLNAGVHYGHQTRYWNPKMKPFIFGARNGVHVINLEKTLPLFNEALAELTRISSNNGKVLFVGTKRAASEAVKAAAVDCQQFYVNHRWLGGMLTNWKTVRQSIKRLKDLEAQTQDGTFDKITKKEALMRTRELEKLELSLGGIKDMAGLPDAIFVIGADHEHIAIKEANNLGIPVFAIVDTNSTPDGINYIIPGNDDATRAIQLYLDAASAAVKEGRGSNVEAELQIPAE

SEQ ID NO: 30898 - DNA, 795 bp, Helicobacter hepaticus
  CDS (1)..(795): transl_table=11
atggtaacaatgaaagacctacttgaatgtggtgtgcattttggacatcaaactcgtcgctggaatccaaagatgaaaagatttatctttggcgtgagaaaaaatattcacattattgacttgcaaaagactttacgctactttcgctacacttataatattattaaacaagcagcaagtgagggtaaagtgattatgtttgtgggcacaaagcgacaagcaagtgaaacattaaaacaatatgcagaatctgtaaatgcgccttatgttaattaccgatggcttggcggaatgctcacgaattttagcacaatcaaaaaatcaattcgcagacttgaaattattgaagaaatggagagcagcgggcaaattgatttgctcacgaagaaagaaaagcttatgttgcaacgcaaaaaagaaaagcttgataaatatcttggcggtgtgcgacatatgaaaaaagcccctgatatgatttttgtcattgatgcagcaaaagagaaaattgctgtagcagaagcaagacggcttggtattcctgtggttgcaccacttgatacaaactgcgaccctgatatggtagattatcctattccgggtaatgatgatgcgatacgttccattcagctcttttgcaaagaaataagtgaggcaattttagaggggcgctctgaaaataaagatgagcagaatgagcaaggagagcaaattgctccagtcactaatgaagaaaagcaagagattcttgatgaagtaactgctgaagttgctacacaaatgcaagaggaggcataa

SEQ ID NO: 30899 - protein, 264 aa, Helicobacter hepaticus
MVTMKDLLECGVHFGHQTRRWNPKMKRFIFGVRKNIHIIDLQKTLRYFRYTYNIIKQAASEGKVIMFVGTKRQASETLKQYAESVNAPYVNYRWLGGMLTNFSTIKKSIRRLEIIEEMESSGQIDLLTKKEKLMLQRKKEKLDKYLGGVRHMKKAPDMIFVIDAAKEKIAVAEARRLGIPVVAPLDTNCDPDMVDYPIPGNDDAIRSIQLFCKEISEAILEGRSENKDEQNEQGEQIAPVTNEEKQEILDEVTAEVATQMQEEA

SEQ ID NO: 30900 - DNA, 795 bp, Helicobacter pylori J99
  CDS (1)..(795): transl_table=11
atggtaaccatgaaagatttattagaatgcggtgtgcattttggacaccaaacaaggcgttggaaccctaaaaccaaaaaattcatttttggcgttaggaaaaatatccatattattgatttgcaaaaaaccttgcgctactttagatacacttataacatcgtgcgcgatgcgagcgctcaaggcaagagcatcatgtttgtaggcactaaaaaacaagccaatgagactttgaaagaatttgctgaaagcattcaagtcccttacgtcaattaccgctggcttggtggcatgctgactaattttagcaccattagaaaatcggttaggaaattagaaatcattgaagaaatggaaaatagcggtcaaattgatctattgactaaaaaagaaaaactcatgattttaaggaaaaaagaaaagctagacaagtatcttggcggggtgcgccacatgaaaaaaatccctgatatgatttttgtgattgatgtggctaaagaaaaaatcgctgtcgctgaagcgaggaaactccatatccctatcgtggcccccttagacactaactgcgaccctgatttagtggattaccccattcctggaaatgacgatgcgatccgctctatcaggctattttgtaaagaaatgagcgaggcgattttagaggggcgagaactcatgcaagaagaaatcgtccatgcggatgaaaatagcgaagaaatagagttcgtgagcaatgaagaaaaagaagaaatgctcgctgaaattcaaaaagaaatcactcaaggagccgaataa

SEQ ID NO: 30901 - protein, 264 aa, Helicobacter pylori J99
MVTMKDLLECGVHFGHQTRRWNPKTKKFIFGVRKNIHIIDLQKTLRYFRYTYNIVRDASAQGKSIMFVGTKKQANETLKEFAESIQVPYVNYRWLGGMLTNFSTIRKSVRKLEIIEEMENSGQIDLLTKKEKLMILRKKEKLDKYLGGVRHMKKIPDMIFVIDVAKEKIAVAEARKLHIPIVAPLDTNCDPDLVDYPIPGNDDAIRSIRLFCKEMSEAILEGRELMQEEIVHADENSEEIEFVSNEEKEEMLAEIQKEITQGAE

SEQ ID NO: 30902 - DNA, 795 bp, Helicobacter pylori
  CDS (1)..(795): transl_table=11
atggtaaccatgaaagatttattagaatgcggtgtgcattttggacaccaaacaaggcgttggaaccctaaaaccaaaaaattcatttttggcgttaggaaaaatatccatattattgatttgcaaaaaaccttgcgctattttagatacacctataatatcgtgcgcgatgcgagcgctcaaggcaagagcatcatgtttgtaggcactaaaaaacaagccaatgagactttgaaagaatttgctgaaagcattcaagtcccttatgtcaattaccgctggcttggcggcatgctgactaattttagcaccattagaaaatcggttaggaaattagaaatcattgaagaaatggaaaatagcggtcaaattgatttattgactaaaaaagaaaagctcatgattttgaggaaaaaagaaaagctggataaatatcttggtggggtgcgccacatgaaaaaaatccctgatatgatttttgtgattgatgtggctaaagaaaaaatcgctgtcgctgaagcaagaaaactccatatccctatcgtggctcccttagacactaactgcgatcctgatttagtggattaccccattcctggaaatgacgatgcgatccgctctattaggctattttgtaaagaaatgagcgaagcgattttagaggggcgagaactcatgcaagaagaaatcgtccatgcgaatgaaaatagcgaagagatagaatatgtgagccatgaagaaaaagaagaaatgctcgctgaaatccaaaaagaaatcactcaaggagccgaataa

SEQ ID NO: 30903 - protein, 264 aa, Helicobacter pylori
MVTMKDLLECGVHFGHQTRRWNPKTKKFIFGVRKNIHIIDLQKTLRYFRYTYNIVRDASAQGKSIMFVGTKKQANETLKEFAESIQVPYVNYRWLGGMLTNFSTIRKSVRKLEIIEEMENSGQIDLLTKKEKLMILRKKEKLDKYLGGVRHMKKIPDMIFVIDVAKEKIAVAEARKLHIPIVAPLDTNCDPDLVDYPIPGNDDAIRSIRLFCKEMSEAILEGRELMQEEIVHANENSEEIEYVSHEEKEEMLAEIQKEITQGAE

SEQ ID NO: 30904 - DNA, 729 bp, Idiomarina loihiensis
  CDS (1)..(729): transl_table=11
atggctaacgtgtcaatgcgtgacatgctgaaagcgggtgtccacttcggtcaccaaactcgtttctggaacccaaaaatgaaaccttacatttttggtgctcgtaacaaaattcatatcattaacctcgaaaaaactgtgcctatgttcaacgacgcgttgagctatatgcagcacgttgcttctaacaaaggcaaaatcctgtttgttggtactaagcgcgcagcagctgaagcggttaaagaagcagccattaactgtggtcagtactatgtaaaccaccgttggttaggcggcatgttgactaactggaaaacagttcgtcaatcaatcaagcgtctaaaagaccttgaaacaatgagccaggacggtactttcgagaaactgaccaagaaagaagctttggttaatactcgtgaaatggaaaagctggaaaaaggcttaggcggtatcaaaaacatgggcggcttaccagacgttctgtttgttatcgacgcagatcacgaacacatctctattaaagaagcaaataacctgggcattccagttgtttctgttgtggatacaaactctaaccctgacggtgtggactacattgttccaggtaacgatgacgcaatccgtgcggttcaattatacttgaacactgcagctgaagcggtaaaagaagcacgtacagcgcaagttgaagcgaaagactcagacgatttcgtcgaagcaactgaataa

SEQ ID NO: 30905 - protein, 242 aa, Idiomarina loihiensis
MANVSMRDMLKAGVHFGHQTRFWNPKMKPYIFGARNKIHIINLEKTVPMFNDALSYMQHVASNKGKILFVGTKRAAAEAVKEAAINCGQYYVNHRWLGGMLTNWKTVRQSIKRLKDLETMSQDGTFEKLTKKEALVNTREMEKLEKGLGGIKNMGGLPDVLFVIDADHEHISIKEANNLGIPVVSVVDTNSNPDGVDYIVPGNDDAIRAVQLYLNTAAEAVKEARTAQVEAKDSDDFVEATE

SEQ ID NO: 30906 - DNA, 786 bp, Lactobacillus johnsonii
  CDS (1)..(786): transl_table=11
atgacagttgttactatgaagcaattgcttgaagcaggtgtccactttggtcaccaaactagaagatgggatccaaagatggctccttacattttcactcaaagaaacggaatctacatcattgacttacaaaagactattaagatgttagatgacgcttacaactacgttaaggcagttgctcaagacggtggcgtattcttgtttgttggtactaagaaacaagcacaagacgctgttaaagaagaagctacacgtgcaggtcaatactacgttaaccaacgttggttaggtggtactttgactaactggactactatccaaagccgtgttaagagattaaaggaattaaagcaaatgtcagaagatggcactttcgacgtattaccaaagaaggaagttgcacttttgactaaggaaatggaaaaacttgaaagattcttaggtggtattgaagatatgccaagaatcccagatgttatgtttgttgttgatcctaagaaagaaaagatcgctgttcacgaagcaaacattttaggtatccctgtagtagctatggttgatactaacactgatccagatccaatcgacgttgttattccagcaaacgatgacgcaattcgtgcaattcgtttgatttcaggtgctatggctgatgcaattatcgaaggtaagcaaggccaagatgacagcgaagatgttgaaaaagaaatggctgataaagcagcagctgaagacgatgaagaagaatccatcgaagtagttgttgaaaaatcagaagactaa

SEQ ID NO: 30907 - protein, 261 aa, Lactobacillus johnsonii
MTVVTMKQLLEAGVHFGHQTRRWDPKMAPYIFTQRNGIYIIDLQKTIKMLDDAYNYVKAVAQDGGVFLFVGTKKQAQDAVKEEATRAGQYYVNQRWLGGTLTNWTTIQSRVKRLKELKQMSEDGTFDVLPKKEVALLTKEMEKLERFLGGIEDMPRIPDVMFVVDPKKEKIAVHEANILGIPVVAMVDTNTDPDPIDVVIPANDDAIRAIRLISGAMADAIIEGKQGQDDSEDVEKEMADKAAAEDDEEESIEVVVEKSED

SEQ ID NO: 30908 - DNA, 768 bp, Lactococcus lactis subsp
  CDS (1)..(768): transl_table=11
atgtcagttatttcaatgaaacaacttcttgaagctggtgttcacttcggtcaccaaactcgtcgttggaacccaaaaatgaaaccatacatcttcacagaacgtaatggtatccacgttatcgaccttcaaaaaactgtaaaacttgttgacgatgcttacaactatgtaaaaaacgcttcacaagaaggtgcagtagtcctttttgttggtactaaaaaacaagctgcagaagcagttaaagaagaagctctccgcgctggtcaatactacgtaaaccaccgttggttgggtggtatgctcactaactggaacactatccaaacacgtgtgacacgccttaaagaaatcaacaaaatggaagaagaaggaactttcgaagttttacctaagaaagaagtagttcttcttaacaaagaacgcgaacgccttgaaaaattcatcggtggtatcgctgatatgcctcgtattccagatgttatgtacatcgttgacccacatgctgaacaaatcgcagttaaagaagctaaaactttgggaatcccagttgtagcaatggttgacacaaacgcagatccagaaccaatcgacgtagttatccctgcaaatgatgatgctatccgtgctgttaaattgattacagctaaaatggcagacgctatcattgaaggacgtcaaggtgaagatgcagcggatgatttcgtagcagaagaagcagcttcagaagaatcacttgaagaacttgctgaaatcgttgaaggtaaataa

SEQ ID NO: 30909 - protein, 255 aa, Lactococcus lactis subsp
MSVISMKQLLEAGVHFGHQTRRWNPKMKPYIFTERNGIHVIDLQKTVKLVDDAYNYVKNASQEGAVVLFVGTKKQAAEAVKEEALRAGQYYVNHRWLGGMLTNWNTIQTRVTRLKEINKMEEEGTFEVLPKKEVVLLNKERERLEKFIGGIADMPRIPDVMYIVDPHAEQIAVKEAKTLGIPVVAMVDTNADPEPIDVVIPANDDAIRAVKLITAKMADAIIEGRQGEDAADDFVAEEAASEESLEELAEIVEGK

SEQ ID NO: 30910 - DNA, 804 bp, Lactobacillus plantarum
  CDS (1)..(804): transl_table=11
atggctgttatttctatgaaacaattgcttgaagccggtgtccatttcggtcaccaaactcgtcgttggaacccaaagatgaaaccatacatctttacggaacggaacggcatctacatcattgacttacaaaagacggtcaagatgatcgactcagcttacaacttcgttaaggatgctgcggctgatgatggtgttatcttgtttgttgggactaagaaacaagcccaagattcaatcgaagaagaagcaacccgtgcaggtcaatactacgttaaccatcgttggttaggtgggactttgactaactggaacaccatccaaacacggatcaagcgtcttaaagacttgaagaagatggaagctgatggcaccttcgaacggttacctaagaaggaagtttcattattaatgaagcaacgtgccaagcttgaaaagttcttgggcggtatcgaagacatgcctcggattccagatgtaatcttcatcgttgatcctcgtaaggaacaaatcgccgttaaggaagctcaaaaattgaacattccgatcgttgcgatggttgatacgaacactgatccagatgacatcgacgttattattccttcaaacgatgacgcaatccgtgccgttcgtttgatcacttctaagatggctgatgctgtcattgaaggtcgtcaaggtgaagacgaagatgttactgaagattctttcaaggacaacaaggacgctaagaagtccgttgactcattggaagacatcgttgaagctgttgaaggcgacaacgacgccaagtctgacaaataa

SEQ ID NO: 30911 - protein, 267 aa, Lactobacillus plantarum
MAVISMKQLLEAGVHFGHQTRRWNPKMKPYIFTERNGIYIIDLQKTVKMIDSAYNFVKDAAADDGVILFVGTKKQAQDSIEEEATRAGQYYVNHRWLGGTLTNWNTIQTRIKRLKDLKKMEADGTFERLPKKEVSLLMKQRAKLEKFLGGIEDMPRIPDVIFIVDPRKEQIAVKEAQKLNIPIVAMVDTNTDPDDIDVIIPSNDDAIRAVRLITSKMADAVIEGRQGEDEDVTEDSFKDNKDAKKSVDSLEDIVEAVEGDNDAKSDK

SEQ ID NO: 30912 - DNA, 897 bp, Leifsonia xyli subsp
  CDS (1)..(897): transl_table=11
atggccgtcgtcaccatgcgccagctgctcgacagcggcgtccactttggacaccagacccgtcgctggaacccgaagatgaagcgcttcatcctcaccgagcgctcgggcagctacatcatcgacctccagcagtcgctgacctacatcgataagacctacgacttcgtgcgcgagactgtcgctcacggcggcaccatcctgttcgtgggaaccaagaagcaggcgcagcaggcgatcgccgagcaggcgacccgcgtcggtcagccctacgtcaaccagcgctggctgggcggtctgctgaccaacttccagaccgtctccaaacgcctcgcccgcatgaaggagctcgaggaactcgacttcgagggcaccaccagcggcttcaccaagaaagagctgctgatcaagaaacgcgagctggacaagctgcacaagtcgctcggcggcatccgcaacctgtcgaagacgccgagcgcgctctgggtggtcgacacgaagaaggagcacctcgcgatcgacgaggcgaagaagctggggattccggtcatcgccatcctcgatacgaactgcgaccccgacgaggtgcagtacccgatcccgggcaacgacgacgcgatccgctccgtctcgctgctgacccacatcgtcgccgacgcggcggccgagggcctcatccagcgtcaccagaagccggaagagggagtggaggcggctgagccgctcgccgagtgggagcaggagctcctcgctcagcccgccgccgaggtccaggccagcgccgagaccgagaaggcagcggacgccgacctcgccgaggccaaggcggactccgccgccgtcgtcgccgagggcgaagcagctgccgacgcggtcgccgagactccggccgagtaa

SEQ ID NO: 30913 - protein, 298 aa, Leifsonia xyli subsp
MAVVTMRQLLDSGVHFGHQTRRWNPKMKRFILTERSGSYIIDLQQSLTYIDKTYDFVRETVAHGGTILFVGTKKQAQQAIAEQATRVGQPYVNQRWLGGLLTNFQTVSKRLARMKELEELDFEGTTSGFTKKELLIKKRELDKLHKSLGGIRNLSKTPSALWVVDTKKEHLAIDEAKKLGIPVIAILDTNCDPDEVQYPIPGNDDAIRSVSLLTHIVADAAAEGLIQRHQKPEEGVEAAEPLAEWEQELLAQPAAEVQASAETEKAADADLAEAKADSAAVVAEGEAAADAVAETPAE

SEQ ID NO: 30914 - DNA, 885 bp, Leptospira interrogans serogroup Icterohaemorrhagiae serovar
  CDS (1)..(885): transl_table=11
atgtcagtgatctcaatgaaaaatcttctggaaaccggagtacacttcggacaccagactcgtaaatggaatcctaaaatggctccgtatgtttttacggccagaaacggaatccatatcatagaccttcaaaagaccgttcaaaaagccaaagaggcatacgacgctcttaaaaaattaacttccgaaggtaagaaagttctttttgtaggaactaaaaaacaagcgagaggcgcgatcgaaagagaagcgatccgctctaatatgttctttatcaataatcgctggccgggcggtcttttgaccaactggaatacggtaaagagaagtatcgcgcgtcttaaaaaactcgaaggaatggaagcggataacagttttgaaaaagaagttaaaactaaaaaagaagttctgactttaagaagagagttagaaaaacttcgcaagactctcggcgggatcaaggatatggctaccattcccgaaatcatgtttgtaatcgatcctaaaaaagaagaaatcgctgttaaagaagccagaaaactgggtcttaaaattttcgcggttgttgatacgaactgtgatcctgagttgattgattatccgattccaggaaacgatgacgcgatccgagccatttctctttttctggaaactatgtccaatgcggtgattgaaggaaccggtggtgttgtagaacaacctagattcagcgaagacttggattccgaagctctggctctggaataccaaggtgaatatgatgaaagcggcaagttcatcatggacgaagacccggattctaaaaaaactaaaactgcggaagaaccttctgctacgatcgaaccttctactaccactacggtcgaagtggatcaaaacgaataa

SEQ ID NO: 30915 - protein, 294 aa, Leptospira interrogans serogroup Icterohaemorrhagiae serovar
MSVISMKNLLETGVHFGHQTRKWNPKMAPYVFTARNGIHIIDLQKTVQKAKEAYDALKKLTSEGKKVLFVGTKKQARGAIEREAIRSNMFFINNRWPGGLLTNWNTVKRSIARLKKLEGMEADNSFEKEVKTKKEVLTLRRELEKLRKTLGGIKDMATIPEIMFVIDPKKEEIAVKEARKLGLKIFAVVDTNCDPELIDYPIPGNDDAIRAISLFLETMSNAVIEGTGGVVEQPRFSEDLDSEALALEYQGEYDESGKFIMDEDPDSKKTKTAEEPSATIEPSTTTTVEVDQNE

SEQ ID NO: 30916 - DNA, 750 bp, Listeria innocua
  CDS (1)..(750): transl_table=11
atgcctgttatttcaatgaaacaattactcgaagcaggagttcacttcggccaccaaactcgccgttggaacccaaaaatgaagaaatatatcttcacagaaagaaatggtatttatatcattgacctacaaaaaacagtgaaaaaagtagacgaagctttcaacttcatgcgtgaagtagctagcgacaacggaactatcctgtttgtaggaactaaaaaacaagctcaagaatccgttcgcgacgaagctatccgttctggacaatatttcgtgaatcatcgttggttaggtggtactttaactaactttgaaactattcaaaaacgtattcaacaccttaaaaaaatcgaaaaaatggaagcagacggaacttttgaagtccttcctaaaaaagaagtagtccttcttaaaaaagaacaagaaaaactagaacgcttcttaggcggaatcaaagacatgaaaggtcttcctgatgctttattcatcgttgacccacgcaaagaacgtattgcggttgcagaagctcgtaaacttcatattcctatcatcggtattgttgatacaaactgtgatccggatgaaatcgactacgtaatccctgcaaatgatgacgctatccgtgcggttaaacttttaactgctaaaatggctgacgctatcattgaagtgaaccaaggggaagagttaactgaagcggaagttgctcctgtagaagaaaaagctgcagaagaaactactgaagcataa

SEQ ID NO: 30917 - protein, 249 aa, Listeria innocua
MPVISMKQLLEAGVHFGHQTRRWNPKMKKYIFTERNGIYIIDLQKTVKKVDEAFNFMREVASDNGTILFVGTKKQAQESVRDEAIRSGQYFVNHRWLGGTLTNFETIQKRIQHLKKIEKMEADGTFEVLPKKEVVLLKKEQEKLERFLGGIKDMKGLPDALFIVDPRKERIAVAEARKLHIPIIGIVDTNCDPDEIDYVIPANDDAIRAVKLLTAKMADAIIEVNQGEELTEAEVAPVEEKAAEETTEA

SEQ ID NO: 30918 - DNA, 750 bp, Listeria monocytogenes serotype 4b
  CDS (1)..(750): transl_table=11
atgcctgttatttcaatgaaacaattactcgaagcaggagttcacttcggccaccaaactcgccgttggaacccaaaaatgaagaaatatatcttcacagaaagaaatggtatttatatcattgacctacaaaaaacagtgaaaaaagtagacgaagctttcaacttcatgcgtgaagtagctagcgacaacggaactatcctgtttgtaggaactaaaaaacaagctcaagaatccgttcgcgacgaagctatccgttctggacaatatttcgtgaatcatcgttggttaggtggtactttaactaactttgaaactattcaaaaacgtattcaacaccttaaaaaaatcgaaagaatggaagcagatggaacttttgaagtccttcctaaaaaagaagttgtccttcttaaaaaagaacaagaaaaattagaacgcttcttaggcggaatcaaagacatgaaaggtcttcctgatgcattattcatcgttgacccacgcaaagaacgtattgcggttgcagaagctcgtaaacttcatattcctatcatcggtattgttgatacaaactgtgatccggatgaaatcgactacgtaatccctgcaaatgatgacgctatccgcgcggttaaacttttaactgctaaaatggctgacgctatcattgaagtgaaccaaggggaagagttaacggaagcggaagttgctcctgtagaagaaaaagctacagaagaaactactgaagcataa

SEQ ID NO: 30919 - protein, 249 aa, Listeria monocytogenes serotype 4b
MPVISMKQLLEAGVHFGHQTRRWNPKMKKYIFTERNGIYIIDLQKTVKKVDEAFNFMREVASDNGTILFVGTKKQAQESVRDEAIRSGQYFVNHRWLGGTLTNFETIQKRIQHLKKIERMEADGTFEVLPKKEVVLLKKEQEKLERFLGGIKDMKGLPDALFIVDPRKERIAVAEARKLHIPIIGIVDTNCDPDEIDYVIPANDDAIRAVKLLTAKMADAIIEVNQGEELTEAEVAPVEEKATEETTEA

SEQ ID NO: 30920 - DNA, 771 bp, Mannheimia succiniciproducens; identical to SEQ ID NO: 30558
  CDS (43)..(771): transl_table=11

SEQ ID NO: 30921 - protein, 242 aa, Mannheimia succiniciproducens
MAQVSMRDMLQAGVHFGHQTRYWNPKMKPFIYGPRNGVHIINLEKTVPMFNGALAELTRIASNNGKILFVGTKRAATEAVQAAALDCQQYYVNHRWLGGMLTNWKTVRQSIKRLKDLETQSQDGTFDKLTKKEALVRTREMEKLELSLGGIKDMAGLPDAIFVIGADYEHIAIKEANNLGIPVFAVVDTNSNPDGIDFVIPGNDDATRAIQLYVTAAAAAVKEGRSQQTATEEKFAEEVAAE

SEQ ID NO: 30922 - DNA, 771 bp, Methylococcus capsulatus
  CDS (1)..(771): transl_table=11
atgacctcagttaccatgcgtcagatgctcgaagcgggcgttcacttcgggcaccagacgcgttactggaatccgaagatggctcctttcatcttcggcgcgcgcagcaatatccatatcatcaatctggaaaagacgctgcccctgttcaacgatgccatgaaatacctggagcaggtcgccgccaaccgcggtaagattctgttcgtaggcaccaagaagaccatgcgcaaggtcatcgaagaagaagcccggcgctgtggcatgccttacgtcaatcaccgctggctgggcggcatgctgaccaatttcaagaccatcaaggcgtccatcgcccggatgaaggacttgcaggccatgcgcgacgatggccgtctcaaccgcttcagcaaaaaggaagccctcggcatgatgcgcgagctggagaagctggtttgcaacgtcggcggcatcggcgacatggatcgtctccccgacgtgatgttcatcatcgatacgggttacgagaagaacgccgtcagtgaggcacgtaagctgggcatccccgtcgtcggcgtggtggataccaacaacagccccgtcggcatcgactatgtgattccgggcaacgacgattccattcgggcggtccagttgtatgcccagagcgccgcgacggcgattctgcgcggcaaggcgtccggtgtggattttggcgcggtggcggacgaatttgtggaaatggagccggaaacggagcagggggccacgggcgagaccttgggcggctga

SEQ ID NO: 30923 - protein, 256 aa, Methylococcus capsulatus
MTSVTMRQMLEAGVHFGHQTRYWNPKMAPFIFGARSNIHIINLEKTLPLFNDAMKYLEQVAANRGKILFVGTKKTMRKVIEEEARRCGMPYVNHRWLGGMLTNFKTIKASIARMKDLQAMRDDGRLNRFSKKEALGMMRELEKLVCNVGGIGDMDRLPDVMFIIDTGYEKNAVSEARKLGIPVVGVVDTNNSPVGIDYVIPGNDDSIRAVQLYAQSAATAILRGKASGVDFGAVADEFVEMEPETEQGATGETLGG

SEQ ID NO: 30924 - DNA, 864 bp, Mycobacterium bovis
  CDS (1)..(864): transl_table=11
atggccgtagtcaccatgaagcagctgcttgacagcggcacccacttcgggcatcagacccgtcgctggaatcccaagatgaagcgtttcatcttcaccgaccgcaacggcatctacatcatcgacctgcagcagacgttgaccttcatcgataaggcgtacgagttcgtgaaagagaccgtcgctcacggtgggtcggtgctcttcgtcggcacaaagaagcaggcgcaggagtcggtggccgccgaagccacccgggtcggcatgccgtatgtgaaccagcgctggctgggaggcatgctcaccaacttctccaccgtgcataagcggctgcaacgcctcaaggagcttgaggcgatggagcagaccggtggcttcgagggccgcaccaagaaggaaatcttgggattgacccgcgagaagaacaagctcgagcgcagcctcggcggcatccgcgacatggccaaggtgccgtcggcgatctgggtcgtcgacacgaacaaagagcacattgccgtcggtgaggcccgcaaactgggcatcccggtcatcgcgatccttgacacgaactgcgaccccgacgaggtcgactacccaatcccaggcaacgacgacgcgatccgctcggccgcgctgctgactagggtgatcgcttccgcggtcgccgagggcctgcaggcccgtgccggactggggcgcgccgacggcaagccggaggccgaagccgccgagccgctggccgaatgggagcaagagctgctggcctcggcgacagcttcggcaacgccatcagcaaccgcgtcaacaactgccctcaccgacgcccccgcaggcgcaaccgaaccaaccacagatgcatcctag

SEQ ID NO: 30925 - protein, 287 aa, Mycobacterium bovis
MAVVTMKQLLDSGTHFGHQTRRWNPKMKRFIFTDRNGIYIIDLQQTLTFIDKAYEFVKETVAHGGSVLFVGTKKQAQESVAAEATRVGMPYVNQRWLGGMLTNFSTVHKRLQRLKELEAMEQTGGFEGRTKKEILGLTREKNKLERSLGGIRDMAKVPSAIWVVDTNKEHIAVGEARKLGIPVIAILDTNCDPDEVDYPIPGNDDAIRSAALLTRVIASAVAEGLQARAGLGRADGKPEAEAAEPLAEWEQELLASATASATPSATASTTALTDAPAGATEPTTDAS

SEQ ID NO: 30926 - DNA, 834 bp, Mycobacterium leprae
  CDS (1)..(834): transl_table=11
atggctgttgtgaccatgaaacagctgcttgacagcggcacccacttcgggcaccagacccgtcgttggaatcccaagatgaagaggttcattttcactgatcgcaacggcatctacatcattgacctacagcagacgctgactttcatcgacaaggcctacgagttcgttaaagagactgtcgcccgcggtggcttagttttgttcgttggcaccaagaagcaggcgcaggagtccgtcgcggccgaagcgactcgcgtcggcatgccgtatgtgaaccagcgctggctgggtggcatgctcaccaacttctccaccgtgcataagcggttgcagcgtctaaaggagctggaggcgatggagcagactggtggtttcgagggtcgtaccaagaaggagatcttgggcttgacccgggaaaagaacaagctggagcgcagcctgggcggtatccgggatatggcgaaggtgccgtcggcaatctgggttgtcgacacgaacaaagagcacatcgccgttggcgaagcccgcaaactgggcgtcccggtgattgcgatcctggacactaattgcgaccccgacgaggtcgactacccgatcccgggcaacgacgacgcgatccgatcggcggagctgttgactacggtgatcgcctccgcggttgccgaaggcttgcaggtccgtgccggtctgaggtgcggcgatggcaagcccgaaacggaggccgttgagccgctcccggaatgggagcaggagctgttagccggtgctggttccagcgccctcaacgattcgggcgcggacttatcagaagccaaccctacggaagcctga

SEQ ID NO: 30927 - protein, 277 aa, Mycobacterium leprae
MAVVTMKQLLDSGTHFGHQTRRWNPKMKRFIFTDRNGIYIIDLQQTLTFIDKAYEFVKETVARGGLVLFVGTKKQAQESVAAEATRVGMPYVNQRWLGGMLTNFSTVHKRLQRLKELEAMEQTGGFEGRTKKEILGLTREKNKLERSLGGIRDMAKVPSAIWVVDTNKEHIAVGEARKLGVPVIAILDTNCDPDEVDYPIPGNDDAIRSAELLTTVIASAVAEGLQVRAGLRCGDGKPETEAVEPLPEWEQELLAGAGSSALNDSGADLSEANPTEA

SEQ ID NO: 30928 - DNA, 831 bp, Mycobacterium paratuberculosis
  CDS (1)..(831): transl_table=11
atggccgtagtcaccatgaagcagctgctcgacagcggcacccacttcgggcaccagacccgtcgctggaaccccaagatgaagcggttcatcttcaccgaccgcaacggcatatacatcatcgacctgcagcagacgctgacgttcatcgacaaggcgtacgagttcgtcaaggaaaccgtcgcccacggcggcaccgtgctgttcgtcggcaccaagaagcaggcgcaggaatccattgcggcagaagcgacccgggtcggcatgccgtacgtcaaccagcgctggctcggcggcatgctgaccaacttctccaccgtgcacaagcggctgcaacgcctcaaggaactcgaggccatggagcagaccggcggcttcgagggccgcaccaagaaggagatcctcgggctgacccgcgagaagaacaagctcgagcgcagcctcggcggtatccgcgacatgagcaaggtgccgtcggcgatctgggtcgtcgacaccaacaaggagcacatcgccgtcggcgaggcccgcaagctgggcatcccggtcatcgcgatcctggacaccaactgcgaccccgacgaggtcgactacccgatcccgggcaacgacgacgccatccgcagcgccgcgctgctgaccaaggtgatcgcctccgcggtcgccgagggcctgcaggcccgcgccggcgtgggccgcggtgacggcaagccggaggtcgaggccgccgagccgctcgccgagtgggagcaggagctgctcgcctcggccactgcgacagccgcccccaccgaagcgggcgcacccgaacccaccaccgacccctcctaa

SEQ ID NO: 30929 - protein, 276 aa, Mycobacterium paratuberculosis
MAVVTMKQLLDSGTHFGHQTRRWNPKMKRFIFTDRNGIYIIDLQQTLTFIDKAYEFVKETVAHGGTVLFVGTKKQAQESIAAEATRVGMPYVNQRWLGGMLTNFSTVHKRLQRLKELEAMEQTGGFEGRTKKEILGLTREKNKLERSLGGIRDMSKVPSAIWVVDTNKEHIAVGEARKLGIPVIAILDTNCDPDEVDYPIPGNDDAIRSAALLTKVIASAVAEGLQARAGVGRGDGKPEVEAAEPLAEWEQELLASATATAAPTEAGAPEPTTDPS

SEQ ID NO: 30930 - DNA, 729 bp, Neisseria meningitidis serogroup A
  CDS (1)..(729): transl_table=11
atgtctcaaattactatgcgtcagatgattgaagccggtgtccacttcggccaccaaacccgtttctggaacccgaaaatggcacaatacattttcggcgcgcgcaacaaaatccacatcgtcaacctggaaaaaaccctgccgatgttccaagacgcgcaagaagccgtacgtcgtttggttgccaacaaaggtacagtattgttcgtaggtaccaaacgccaagcccgcgacatcatccgcgaagaagcgacccgcgccggtatgcctttcgtcgattaccgctggttgggcggtatgctgaccaactacaaaaccgttaagcaatccatcaaacgcctggaagaaaaaaccgcagccttggaaaatgctgccgaaagcggtttcagcaaaaaagaaattctggaaatgcaacgcgatgttgaaaaactggaacgttctttgggcggtatcaaaaacatgaaaggcctgcctgacgcgattttcgttatcgataccggctaccaaaaaggtactctggttgaagctgaaaaattgggcatccctgttatcgccgtagtcgataccaacaacagccccgacggcgtgaaatacgttatccccggcaacgacgactccgccaaagccatccgcctgtactgccgcggcatcgctgacgcagttttggaaggcaaaaaccaagcgctgcaagaaaccgtagccgctgcccaagaagccgctgccgagtaa

SEQ ID NO: 30931 - protein, 242 aa, Neisseria meningitidis serogroup A
MSQITMRQMIEAGVHFGHQTRFWNPKMAQYIFGARNKIHIVNLEKTLPMFQDAQEAVRRLVANKGTVLFVGTKRQARDIIREEATRAGMPFVDYRWLGGMLTNYKTVKQSIKRLEEKTAALENAAESGFSKKEILEMQRDVEKLERSLGGIKNMKGLPDAIFVIDTGYQKGTLVEAEKLGIPVIAVVDTNNSPDGVKYVIPGNDDSAKAIRLYCRGIADAVLEGKNQALQETVAAAQEAAAE

SEQ ID NO: 30932 - DNA, 756 bp, Nitrosomonas europaea
  CDS (1)..(756): transl_table=11
atgtcagttactatgcggcaaatgttggaagcgggcgttcactttggtcatcagacccgtttctggaatccgaaaatggccccctatattttcggccagcgtaataagatccatatcgttaatcttgagcatacgctcgtaatgctcagagaggcgctggactatgcccgccgattgacagcaaacaagggaacgattcttttcgtgggaaccaaacgccaggcccgtgacatcgtcatggaagaagcaatacgatgtggtgctccttacgtcaatcagcgctggctgggcgggatgttgaccaatttcaaaacgatcaggcagtcgatcaaacgcctgcaggatatggagaaaatggtacaggacgggacgctgaacaaacttacgaagaaagaagctcttgattttcagcgtgaattggaaaagctgaataacagtcttggtggtatcaaggaaatgaaaggtttaccggatgcgatgtttgtgatcgatgtcggttatcagaaaggtgcaatcgtggaagcggacaagctggggattccggttgtgggcgtggtggataccaatcacagtccggcaggtgtccggtatgtggtgccgggtaacgatgattccagtcaggctatacggctttatgcgcgtgcgatggcggatgccattctggaaggacgtaaccagtccgtgcaggaaattatcgaaatgagtaagtctgacgatgaaatcatgtcgggtagagatcaatctgcgggtgcgtga

SEQ ID NO: 30933 - protein, 251 aa, Nitrosomonas europaea
MSVTMRQMLEAGVHFGHQTRFWNPKMAPYIFGQRNKIHIVNLEHTLVMLREALDYARRLTANKGTILFVGTKRQARDIVMEEAIRCGAPYVNQRWLGGMLTNFKTIRQSIKRLQDMEKMVQDGTLNKLTKKEALDFQRELEKLNNSLGGIKEMKGLPDAMFVIDVGYQKGAIVEADKLGIPVVGVVDTNHSPAGVRYVVPGNDDSSQAIRLYARAMADAILEGRNQSVQEIIEMSKSDDEIMSGRDQSAGA

SEQ ID NO: 30934 - DNA, 858 bp, Nocardia farcinica
  CDS (1)..(858): transl_table=11
atggctgtcgtaaccatgaagcagctgctcgacagcggcgcacacttcggacaccagacccggcgctggaacccgaagatgaagcggttcatcttcaccgaccgcaacggcatctacatcatcgacctgcagcagacgctgacctacatcgacaaggcgtacgagttcgtcaaggagacggtcgcccacggtggcaccgtgctcttcgtcggtaccaagaagcaggcgcaggagtcgatcgcggccgaggccacccgcgtgggcatgccctacgtgaaccagcggtggctgggcggcatgctcaccaacttctccaccgtgcacaagcgcctgcagcgcctcaaggagctcgaggcgatggagcagaccggtggcttcgagggtcgcaccaagaaggaaatcctcatgctcacgcgtgagatgaacaagctggagcgcaccctcggcggtatccgcgacatgcagaaggtgccctcggccatctgggtcgtcgacaccaacaaggagcacatcgccgtcggcgaggcgcgcaagctgaacatcccggtcatcgcgatcctggacaccaactgcgaccccgacctggtcgactacccgatcccgggcaacgacgacgccatccgttcggccgcgctgctgaccaaggtcgtcgcctccgcggtggccgagggcgtgcaggcccgcgcgggcctggcctccggcgacgccaagcccgaggcgggcgcgggcgagccgctggccgagtgggagcaggagctgctggcgcaggcgaacccgaacgcggagggctcggccgaggccgcgcccgctgccgcgaccgaggaagccccggccgcgcagaccccggccgacttctga

SEQ ID NO: 30935 - protein, 285 aa, Nocardia farcinica
MAVVTMKQLLDSGAHFGHQTRRWNPKMKRFIFTDRNGIYIIDLQQTLTYIDKAYEFVKETVAHGGTVLFVGTKKQAQESIAAEATRVGMPYVNQRWLGGMLTNFSTVHKRLQRLKELEAMEQTGGFEGRTKKEILMLTREMNKLERTLGGIRDMQKVPSAIWVVDTNKEHIAVGEARKLNIPVIAILDTNCDPDLVDYPIPGNDDAIRSAALLTKVVASAVAEGVQARAGLASGDAKPEAGAGEPLAEWEQELLAQANPNAEGSAEAAPAAATEEAPAAQTPADF

SEQ ID NO: 30936 - DNA, 765 bp, Oceanobacillus iheyensis
  CDS (1)..(765): transl_table=11
atggcagcaatttcaatgaaacaattgctagaagctggtgtacattttggacaccaaactcgtcgttggaacccgaaaatgaagaaatatatcttcacggagcgtaacggcatttacatcatcgacttacaaaaaacagttaaaaaagtggatgaagcatataactacgtaaaggaaatcgcatcaaacggcggtacaattcttttcgttggtacaaaaaaacaagcacaagattctgtgcgtgatgaagcaatccgttcaggtatgtattttgtgaatcaacgttggttaggtggaacattaacaaacttccaaactatccgcaaacgtattaatcgattgaaatccattgaaaaaatggaagaagacggtacattcgaagtactacctaaaaaagaagttgtaaacttattaaaagaaaaagaacgtttagtgaaattccttggtggaattaaagaaatgaacaagcttcctgatgcattatttgtaatcgaccctcgtaaagagcgtattgcaattgctgaagctcataaactaaacattccaatcatcggtattgtagatacaaactgtgatccagatgaaattgactacgtaattccagctaatgacgacgctatccgcgccgtgaagcttttgacttccaaaatggcagatgctatcttagaagtgaaacaaggggaagaaacagaagtagttgaagaagaagcaaatgaagctgttgctgaagaagaagcagctgaagaagtttcaactcaagagtaa

SEQ ID NO: 30937 - protein, 254 aa, Oceanobacillus iheyensis
MAAISMKQLLEAGVHFGHQTRRWNPKMKKYIFTERNGIYIIDLQKTVKKVDEAYNYVKEIASNGGTILFVGTKKQAQDSVRDEAIRSGMYFVNQRWLGGTLTNFQTIRKRINRLKSIEKMEEDGTFEVLPKKEVVNLLKEKERLVKFLGGIKEMNKLPDALFVIDPRKERIAIAEAHKLNIPIIGIVDTNCDPDEIDYVIPANDDAIRAVKLLTSKMADAILEVKQGEETEVVEEEANEAVAEEEAAEEVSTQE

SEQ ID NO: 30938 - DNA, 759 bp, Pasteurella multocida; identical to SEQ ID NO: 30468
  CDS (37)..(759): transl_table=11

SEQ ID NO: 30939 - protein, 240 aa, Pasteurella multocida
MAQVSMRDMLQAGVHFGHQTRYWNPKMKPFIYGPRNGVHIINLEKTVPMFNEALVELTRIAGNNGKILFVGTKRAATEAVKAAALDCQQYYVNHRWLGGMLTNWKTVRQSIRRLKDLETQSQDGTFDKLTKKEALMRTREMEKLELSLGGIKEMGGLPDALFVIGADHEHIAVKEANNLGIPVFAIVDTNSDPDGVDFVIPGNDDAARAIQLYLSAAAAAVKEGRHQDAVTEENFVAEAE

SEQ ID NO: 30940 - DNA, 786 bp, Pediococcus acidilactici
  CDS (1)..(786): transl_table=11
atgtctgttatttcgatgaaacaattgcttgaagcaggtgtacatttcggacaccaaacccgtcgctggaaccctaagatgaagccattcatttttactgaacgaaatggtatttacatcattgatttgcaaaagaccgttaagttgattgacaatgcttacaactttgttaaagacgttgctgcaaatgatggggttgttctttttgttggtactaagaaacaagcacaaactgctatcgaagaagaagcaaaacgtgctggtcaattctacgttaaccatcgttggttaggtggaacccttactaactggaacacaatccaaaaacggatcaagcgtttgaaggatcttaagaagatggaagaagatggtacttttgaccgtctacctaagaaagaagtagcacttcttaacaagcaaaaagacaagcttgaaaaattcttgggtggtatcgaagacatgccacacattccagatgtattgtttgttgttgaccctcgcaaggaacaaattgcaatcaaggaagctcaaaaattgaatattccggttgtagctatggtcgacaccaatactgatccagatcaagttgacgtaattattccatcaaatgatgatgctatccgtgccgttcgtttgattacttctaagatggctgatgctgttgttgaaggtcgtcaaggtgaagatgatgaagctgttcaacaagaagaagttgctgaaggcgtaagcaaagactcccttgaagacttgaagaagacggttgaagaaggaagcaacgaagaataa

SEQ ID NO: 30941 - protein, 261 aa, Pediococcus acidilactici
MSVISMKQLLEAGVHFGHQTRRWNPKMKPFIFTERNGIYIIDLQKTVKLIDNAYNFVKDVAANDGVVLFVGTKKQAQTAIEEEAKRAGQFYVNHRWLGGTLTNWNTIQKRIKRLKDLKKMEEDGTFDRLPKKEVALLNKQKDKLEKFLGGIEDMPHIPDVLFVVDPRKEQIAIKEAQKLNIPVVAMVDTNTDPDQVDVIIPSNDDAIRAVRLITSKMADAVVEGRQGEDDEAVQQEEVAEGVSKDSLEDLKKTVEEGSNEE

SEQ ID NO: 30942 - DNA, 726 bp, Photorhabdus luminescens subsp
  CDS (1)..(726): transl_table=11
atggcaactgtttccatgcgcgatatgctgcaagcgggcgttcacttcggtcaccagactcgttactggaacccaaaaatgaaaccattcatctttggtgctcgtaacaaagtgcatatcatcaacctggaaaaaactgttccaatgttcaacgatgcgttagctgaactgaacaaaattgcttcacgcaaaggcaaaattctgtttgttggtactaagcgtgctgcgagcgaagcggttaaagaagcagctcagaactgtgatcaattcttcgttaatcaccgttggttgggcggtatgctgactaactggaaaaccgttcgtcaatccatcaaacgtttgaaagatttagaagcacagtctcaggacggtacttttgacaaactgaccaagaaagaagcgttaattcgttctcgtgaacttggtaagttagaaaatagtctgggcggtatcaaagatatgggcggcttacctgatgctctgtttgttatcgatgctgaacatgaacacattgctatcaaagaagcaaacaacctgggtatcccggtattcgctgttgttgatactaactctgatccagatggtgttgatttcatcatccctggtaatgatgacgcaatccgtgcagtaaaactgtatctaggtgctgttgctactgctgttcgtgaaggtcgttctcaagatctggctgttcaggcagaagaaagctttgtagaagctgaataa

SEQ ID NO: 30943 - protein, 241 aa, Photorhabdus luminescens subsp
MATVSMRDMLQAGVHFGHQTRYWNPKMKPFIFGARNKVHIINLEKTVPMFNDALAELNKIASRKGKILFVGTKRAASEAVKEAAQNCDQFFVNHRWLGGMLTNWKTVRQSIKRLKDLEAQSQDGTFDKLTKKEALIRSRELGKLENSLGGIKDMGGLPDALFVIDAEHEHIAIKEANNLGIPVFAVVDTNSDPDGVDFIIPGNDDAIRAVKLYLGAVATAVREGRSQDLAVQAEESFVEAE

SEQ ID NO: 30944 - DNA, 729 bp, Photobacterium profundum
  CDS (1)..(729): transl_table=11
atggcaactgtatcaatgcgcgacatgcttaaggctggtgtacactttggtcaccaaactcgttactggaacccaaaaatgaagccattcatttttggtgctcgtaacaaggtacacatcatcaaccttgagaaaactgtaccaatgttcaacgacgcactagctgaaatcaacaagattgcagctcgtaaaggtaaggtgcttttcgttggtactaagcgtgcagccagcgaatctgttaaagaatcagctatcagctgtgatcagtactacgtaaacaaccgttggttgggtggtatgctgactaactggaaaactgttcgtcagtcaatcaaacgtctgaaagagctagaaattcagtctgctgacggtacgttcgaaaagctaacaaagaaagaagcgctaatgcgtactcgtgaaatggagaaacttgaaaagtctctaggcggtatcaagaacatgggcggtcttcctgacgcaatgttcgtaattgatgctgatcacgaacacatcgctattaaagaagctaacaacctgggtatcccagtattctctattgtagatactaactctaacccagacggcgttgacttcgttatccctggtaacgatgatgcaatccgttcaattcagctttacactggtgctgtagcacaaactgtaactgaagctcgtaaccaagacatcgttgttcaagctgaacaagatggtttcgtagcagaagcttaa

SEQ ID NO: 30945 - protein, 242 aa, Photobacterium profundum
MATVSMRDMLKAGVHFGHQTRYWNPKMKPFIFGARNKVHIINLEKTVPMFNDALAEINKIAARKGKVLFVGTKRAASESVKESAISCDQYYVNNRWLGGMLTNWKTVRQSIKRLKELEIQSADGTFEKLTKKEALMRTREMEKLEKSLGGIKNMGGLPDAMFVIDADHEHIAIKEANNLGIPVFSIVDTNSNPDGVDFVIPGNDDAIRSIQLYTGAVAQTVTEARNQDIVVQAEQDGFVAEA

SEQ ID NO: 30946 - DNA, 852 bp, Propionibacterium acnes
  CDS (1)..(852): transl_table=11
atggccgtcgtcaccactcgccagctcctcgagagcggcgtccacttcggacatcagacgcgtcgctggaacccgaagatgaagcgcttcatcttcaccgagcgcaacggcatctacatcattgacctgcaccagtcgctgacctacattgataaggcgtacgccttcgtcaaggagactgtcgccaagggcggccagattcttttcgtcggcacgaagaagcaggcccaggagtccatcgttgagcaggccactcgcgttggcatgccctatgtcaaccagcgttggcttgggggaatgctcactaatttccagaccatctcgaagcgcattgcccggctcaaggagctcgaggccatggactttgacaaggtttccggctccggtctcaccaagaaggagctgcttatgctctctcgtgagaaggacaagctggagaaggacctcggcggtatccgcgatatgccgaaggttccgcaagcggtctgggtcgttgatacgaagaaggagcacctcgccatcgacgaggctcgcaagctcaagattccggtcgtcgccatcctcgacaccaactgtgaccccgacgaggtggattacgccatcccgggtaacgatgacgccattcgttcggtgtccttactgacccgcatcatcgccgacgccgccgctgagggcctcatggctcgctcagctggtaagtctggtgagcagcctgctgaggccgagcccatgcccgactgggagcgcgagctcctcgaaggggacggcgctaagaccgaggccaaggctgaagagccgaaggccgaggccaagaaggctgacgaggcccccgaggccgagaagtccaactga

SEQ ID NO: 30947 - protein, 283 aa, Propionibacterium acnes
MAVVTTRQLLESGVHFGHQTRRWNPKMKRFIFTERNGIYIIDLHQSLTYIDKAYAFVKETVAKGGQILFVGTKKQAQESIVEQATRVGMPYVNQRWLGGMLTNFQTISKRIARLKELEAMDFDKVSGSGLTKKELLMLSREKDKLEKDLGGIRDMPKVPQAVWVVDTKKEHLAIDEARKLKIPVVAILDTNCDPDEVDYAIPGNDDAIRSVSLLTRIIADAAAEGLMARSAGKSGEQPAEAEPMPDWERELLEGDGAKTEAKAEEPKAEAKKADEAPEAEKSN

SEQ ID NO: 30948 - DNA, 741 bp, Pseudomonas aeruginosa
  CDS (1)..(741): transl_table=11
atgtcccaagtcaacatgcgcgatatgctgaaggccggtgtgcacttcggccaccagacccgttactggaacccgaaaatgggcaagttcattttcggcgcgcgcaacaagatccatatcatcaacctcgaaaagaccctgccgatgttcaacgaggccctgaccttcgttgagcgcctggccgctggcaagaacaagatcctgttcgtcggcaccaagcgttccgctggcaagatcgttcgcgaggaagccgctcgttgcggcatgccgtacgtcgaccatcgctggctgggcggcatgctcaccaactacaagaccatccgtcagtcgatcaagcgcctgcgcgacctggaaacccagtcccaggacggcaccttcgacaagctgaccaagaaagaagccctgatgcgcagccgtgacctcgagaagctcgagcgcagcctgggcggcatcaaggacatgggcggcctgccggacgctctgttcgtgatcgacgtcgaccacgagcgcatcgccatcaccgaagccaacaagctgggcatcccggtcatcggcgttgtcgataccaacagcagcccggaaggcgtcgactatgtaattcccggtaacgatgatgccatccgcgccgtgcaactctacctgaactcgatggccgaagcggtaatccgcggcaagcagggcgctgccaccagcgccgacgagttcgtcgaggaagcgccggccgaatccgccgaaggctga

SEQ ID NO: 30949 - protein, 246 aa, Pseudomonas aeruginosa
MSQVNMRDMLKAGVHFGHQTRYWNPKMGKFIFGARNKIHIINLEKTLPMFNEALTFVERLAAGKNKILFVGTKRSAGKIVREEAARCGMPYVDHRWLGGMLTNYKTIRQSIKRLRDLETQSQDGTFDKLTKKEALMRSRDLEKLERSLGGIKDMGGLPDALFVIDVDHERIAITEANKLGIPVIGVVDTNSSPEGVDYVIPGNDDAIRAVQLYLNSMAEAVIRGKQGAATSADEFVEEAPAESAEG

SEQ ID NO: 30950 - DNA, 738 bp, Pseudomonas putida
  CDS (1)..(738): transl_table=11
atgtcccaagtcaacatgcgcgatatgctgaaggccggtgtgcacttcggccaccagacccgttactggaacccgaaaatgggcaagtacattttcggcgcgcgtaacaagatccacatcgtcaacctggaaaaaaccctgccaatgttcaacgacgctctgtcgttcgtagagcgcctggcccagggcaagaacaagatcctgttcgtcggcaccaagcgttccgccggcaagatcgtcgccgagcaagcagctcgttgcggttcgccgtacgttgaccaccgttggttgggcggcatgctgaccaactacaagaccatccgcgcttcgatcaagcgtctgcgcgacctggaaacccaggccgaagacggcactttcgccaagctgaccaagaaagaagccctgatgcgctcccgcgacctggaaaaactggatcgcagcctgggtggcatcaaggacatgggcggtctgccagacgctctgttcgttatcgacgttgatcacgagcgcatcgcgatcaccgaagccaacaaactgggtatcccggtcatcggcgttgtcgataccaacagcagcccggaaggtgttgactacatcatcccaggtaacgatgacgccattcgcgctatcgagctgtacatgacttcgatggctgacgcagtcatccgcggccgcaacaacgttgccggcggcaccgaagtttacgctgaagaagcggctgcacctgctgctgagtaa

SEQ ID NO: 30951 - protein, 245 aa, Pseudomonas putida
MSQVNMRDMLKAGVHFGHQTRYWNPKMGKYIFGARNKIHIVNLEKTLPMFNDALSFVERLAQGKNKILFVGTKRSAGKIVAEQAARCGSPYVDHRWLGGMLTNYKTIRASIKRLRDLETQAEDGTFAKLTKKEALMRSRDLEKLDRSLGGIKDMGGLPDALFVIDVDHERIAITEANKLGIPVIGVVDTNSSPEGVDYIIPGNDDAIRAIELYMTSMADAVIRGRNNVAGGTEVYAEEAAAPAAE

SEQ ID NO: 30952 - DNA, 744 bp, Pseudomonas syringae pv
  CDS (1)..(744): transl_table=11
atgtcccaagtcaatatgcgcgatatgctgaaggccggtgtgcacttcggtcaccaaacccgttactggaacccgaaaatgggtaaatacattttcggcgcgcgtaacaagattcacatcatcaaccttgaaaaaaccctgcctatgttcaacgaagctctgactttcgttgagcgcctggcgtcgggcaaaaacaagattctgttcgtcggcaccaagcgctccgctggcaagatcgttgctgaagaagcagcacgttgcggttcgccgtacgtcgatcatcgctggttgggcggcatgctgaccaacttcaagaccatccgtcagtcgatcaaacgtctgcgcgagctggaagtacaagctgaagacggtactttcgccaagctgaccaagaaagaagccctgatgcgcacccgtgatctggaaaaactggatcgcagcctgggtggtatcaaggacatgggcggtctgccagacgcactgttcgttatcgacgttgatcacgagcgcatcgcgatcaccgaagccaacaagctgggcatcccggttatcggcgttgtcgataccaacagcagcccggaaggcgttgactacatcatcccgggcaacgatgacgcaatccgcgccatccagctgtacatgggctcgatggctgacgctgttatccgtggtcgtaacaatgttgctggcggcaccgacgtattcgtcgaagaagctccagctgcagctgctgtagaaggctga

SEQ ID NO: 30953 - protein, 247 aa, Pseudomonas syringae pv
MSQVNMRDMLKAGVHFGHQTRYWNPKMGKYIFGARNKIHIINLEKTLPMFNEALTFVERLASGKNKILFVGTKRSAGKIVAEEAARCGSPYVDHRWLGGMLTNFKTIRQSIKRLRELEVQAEDGTFAKLTKKEALMRTRDLEKLDRSLGGIKDMGGLPDALFVIDVDHERIAITEANKLGIPVIGVVDTNSSPEGVDYIIPGNDDAIRAIQLYMGSMADAVIRGRNNVAGGTDVFVEEAPAAAAVEG

SEQ ID NO: 30954 - DNA, 744 bp, Ralstonia solanacearum
  CDS (1)..(744): transl_table=11
atgtccgtgaccatgcgcgaaatgctggaagccggtgtccactttggccaccagacccgcttctggaaccccaagatggcccccttcattttcggccatcgcaacaagattcacatcatcaacctggaaaagacgctgccgatgtacctggacgcactgaagtatgtgcgccagctggcagccaaccggggcaccatcctgttcgtcggcaccaagcgccagtcgcgtgagatcctggctgaggaagccgctcgcgccggcatgccgtacgtcgacagccgctggctcggcggcatgctgaccaacttcaagacggtcaagatctcgatcaagcgcctgaaggacatggaagccgccaaggaagccggcgcgctggagtccatgagcaagaaggaagcgctgatgttcgagcgcgaaatggagaagctggaaaagtccatcggcggcatcaaggacatgggcggcattccggacgccatcttcgtggtggacgtcggctaccacaagatcgccgtgaccgaggctgccaagctgggcatcccggtgatcggcgtggtggataccaaccactcgccggaaggcatcgactacgtcatcccgggtaacgacgactcgagcaaggctgtcgcactgtacgtgcgcggcgtggccgacgcgatcctggaaggccgcgccaacgcggttcaggaagtggtggaagccgcccgtggcggcgacgacttcgtcgaagtccaggaaggctaa

SEQ ID NO: 30955 - protein, 247 aa, Ralstonia solanacearum
MSVTMREMLEAGVHFGHQTRFWNPKMAPFIFGHRNKIHIINLEKTLPMYLDALKYVRQLAANRGTILFVGTKRQSREILAEEAARAGMPYVDSRWLGGMLTNFKTVKISIKRLKDMEAAKEAGALESMSKKEALMFEREMEKLEKSIGGIKDMGGIPDAIFVVDVGYHKIAVTEAAKLGIPVIGVVDTNHSPEGIDYVIPGNDDSSKAVALYVRGVADAILEGRANAVQEVVEAARGGDDFVEVQEG

SEQ ID NO: 30956 - DNA, 783 bp, Rhizobium loti
  CDS (1)..(783): transl_table=11
atggctctgcctgatttcagcatgcgccagcttttggaagctggcattcacttcggccaccagacccaccgctggaacccgaagatggcgccctacatctatggcgcccgcaacaacatccacatcatcgacctctcgcagacggtgcccttgctgcaccaggcgctgaagcaggtttccgacaccgtcgccaagggcgggcgcgtgctgttcgtcggcaccaagcgccaggcgtccgacatcgtcgccgatgcggcgcagcgttcggcccagtactacgtcaattcgcgttggctcggcggcatgctgaccaattggaagacgatctcgaattcgatccagcgcctgcgcaagctcgacgagatgctggccggcgaggcccagggcctgaccaagaaggagcgcctgaatctcgaccgcgagcgcgagaagctcgacaaggcgctcggcggcatcaaggacatgggctcgacgcctgacctgatgttcgtgatcgacaccaacaaggaagcgatcgccatcctggaggccaagcgcctcggcattccggtggtcgccatcatcgattcgaactgcgatccggacaagatcgacttcccgatccccggcaatgacgacgcggcccgcgccatccaactctattgcgacctgatcgccaaggctgcgatcgacggcatcgcccgtcagcagggcgcgctcggcgtcgatatcggcgcttcggtcgaagccccggtcgagccggcgctcgatccggctccgtcgaccgaggccccgcaggcgtaa

SEQ ID NO: 30957 - protein, 260 aa, Rhizobium loti
MALPDFSMRQLLEAGIHFGHQTHRWNPKMAPYIYGARNNIHIIDLSQTVPLLHQALKQVSDTVAKGGRVLFVGTKRQASDIVADAAQRSAQYYVNSRWLGGMLTNWKTISNSIQRLRKLDEMLAGEAQGLTKKERLNLDREREKLDKALGGIKDMGSTPDLMFVIDTNKEAIAILEAKRLGIPVVAIIDSNCDPDKIDFPIPGNDDAARAIQLYCDLIAKAAIDGIARQQGALGVDIGASVEAPVEPALDPAPSTEAPQA

SEQ ID NO: 30958 - DNA, 768 bp, Rhizobium meliloti
  CDS (1)..(768): transl_table=11
atggcattgcctgatttcactatgcgccagcttctcgaggcgggcgtgcacttcggccaccagacacaccgctggaacccgaagatgaagccgtacatcttcggcgaccgtaacaacgttcacatcatcgatctcgcccagaccgttccgatgctgtcgcgcgcccttcaggtcgtcagcgacaccgtcgccagcggcggccgcgtgcttttcgtcggcaccaagcgccaggcttccgagatcatcgcggacgcagcgaagcgttccgcccagtactacgtcaatgcccgctggctcggcggcatgatgacgaactggaagacgatctccaactcgatccagcgcctgcgcaagctcgatgagatcttggcttcggaagcttccggcttcacgaagaaggagcgcctgaacctcgagcgcgagcgcgagaagctcaaccgcgcactcggcggcatccgcgatatgggcggtaccccggatctgatgttcatcatcgacaccaacaaggaatcgatcgccatcgacgaagccaagcgtcttggcattccggtggttgccgtcatcgactccaattgcgatccggaccagatcgattacgcgatcccgggcaacgacgacgcatcgcgcgctatcgccctttactgcgatctcatcgcccgcgccgccattgacggtattgcccgtcagcagggcgcctctggccgcgatctcggcgcatccgaagaggttccggtcgagccggctctcgaggaagcgtccgaagcctga

SEQ ID NO: 30959 - protein, 255 aa, Rhizobium meliloti
MALPDFTMRQLLEAGVHFGHQTHRWNPKMKPYIFGDRNNVHIIDLAQTVPMLSRALQVVSDTVASGGRVLFVGTKRQASEIIADAAKRSAQYYVNARWLGGMMTNWKTISNSIQRLRKLDEILASEASGFTKKERLNLEREREKLNRALGGIRDMGGTPDLMFIIDTNKESIAIDEAKRLGIPVVAVIDSNCDPDQIDYAIPGNDDASRAIALYCDLIARAAIDGIARQQGASGRDLGASEEVPVEPALEEASEA

SEQ ID NO: 30960 - DNA, 996 bp, Rhodopseudomonas palustris
  CDS (1)..(996): transl_table=11
atgtcgcttcctgaattctctatgcgtcagctgctcgaagctggcgtgcatttcggtcaccagtcgcatcgctggaatccgaagatggcggactacattttcggcgtccgcaacaacatccacatcgtcgacctgacccagaccgtgccgttgctgcatcgtgcgctgcaggcgatcagcgacaccgtcgccaagggtggccgcgtgctgttcgtcggcaccaagcgccaggctcaggatgccgttgccgatgcggccaagcgctcggcgcagtacttcgtcaactcgcgttggctcggcggcacgctgactaactggaagacgatctcgggttcgatccgccgtctgcgtcaccttgaagacgtgctgagctcggccgacgccaatgcctacaccaaaaaggaacgtctggagctgcagcgcgagcgcgacaagctcaatcgctcgctcggcggcatcaaggacatgggcggcctgccggatctgatcttcgtgatcgataccaacaaggaagacatcgctatccaggaagcccagcgtctcggcatcccggtcgccgcgatcgtcgataccaactgcgatccgaagggcatcacctatctggtgccgggcaacgacgacgccggccgcgcgatcgcgctgtactgcgatctggtcgcccgtgcggtgatcgacggcatctcgcgcgcgcagggcgacgtcggcatcgacatcggtgctgcggcgcagccgctgcgtgaggatctgccggcggcgcaggcgaccaccttccaggggttgccgggcccgcgcggcactccggacgacctcaagaagctgccgggcgtgtccggcgcgatcgagaagaagttcaacgacctcggcatcttccacttctggcagctcgccgagctcgaccaggccaccgcgcatcagatcggcgaagagctcggtctgccgagccgggccgatgcctgggtggcgcaggccaagtcgctgaccgccgaggcggagtaa

SEQ ID NO: 30961 - protein, 331 aa, Rhodopseudomonas palustris
MSLPEFSMRQLLEAGVHFGHQSHRWNPKMADYIFGVRNNIHIVDLTQTVPLLHRALQAISDTVAKGGRVLFVGTKRQAQDAVADAAKRSAQYFVNSRWLGGTLTNWKTISGSIRRLRHLEDVLSSADANAYTKKERLELQRERDKLNRSLGGIKDMGGLPDLIFVIDTNKEDIAIQEAQRLGIPVAAIVDTNCDPKGITYLVPGNDDAGRAIALYCDLVARAVIDGISRAQGDVGIDIGAAAQPLREDLPAAQATTFQGLPGPRGTPDDLKKLPGVSGAIEKKFNDLGIFHFWQLAELDQATAHQIGEELGLPSRADAWVAQAKSLTAEAE

SEQ ID NO: 30962 - DNA, 726 bp, Salmonella paratyphi
  CDS (1)..(726): transl_table=11
atggcaactgtttccatgcgcgacatgctcaaggctggtgttcactttggtcaccagacccgttactggaacccgaaaatgaagcctttcatcttcggcgcgcgtaacaaagttcacatcatcaaccttgagaaaactgtaccgatgttcaacgaagctctggctgaactgaacaagatctctgctcgtaaaggtaaaatccttttcgttggtactaaacgcgctgcaagcgaagcggtgaaagaagctgctaacagctgcgaccagttcttcgtgaaccatcgctggctgggcggtatgctgactaactggaaaacagttcgtcagtccatcaaacgtctgaaagacctggaaactcagtctcaggacggtactttcgaaaagctgaccaagaaagaagcgctgatgcgtactcgtgagcttgagaaactggaaaacagcctgggcggtatcaaagacatgggcggtctgccggacgctctgttcgttatcgatgctgaccacgagcacattgctatcaaagaagcgaacaacctgggtatcccggtatttgctatcgttgataccaactctgatccggacggcgttgacttcgttatcccgggtaacgatgacgcaatccgtgctgttagcctgtacctgggcgctgtcgctgcaaccgttcgtgaaggccgttctcaggatctggcttcccaggcggaagaaagcttcgtagaagccgagtaa

SEQ ID NO: 30963 - protein, 241 aa, Salmonella paratyphi
MATVSMRDMLKAGVHFGHQTRYWNPKMKPFIFGARNKVHIINLEKTVPMFNEALAELNKISARKGKILFVGTKRAASEAVKEAANSCDQFFVNHRWLGGMLTNWKTVRQSIKRLKDLETQSQDGTFEKLTKKEALMRTRELEKLENSLGGIKDMGGLPDALFVIDADHEHIAIKEANNLGIPVFAIVDTNSDPDGVDFVIPGNDDAIRAVSLYLGAVAATVREGRSQDLASQAEESFVEAE

SEQ ID NO: 30964 - DNA, 729 bp, Shewanella oneidensis
  CDS (1)..(729): transl_table=11
atgactacagtttcaatgcgcgatatgctccaggccggtgtccacttcggtcaccaaacccgttactggaacccaaaaatgaagccattcattttcggtgctcgcaacggcgttcacatcatcaaccttgagcatactgtgccaatgttcaatgaagctctggctttcattagcaacgttgcttcaaagaaaggtaaagtattattcgttggtactaaacgtgctgctggcgaagcgatcaaagaagctgctatttcttgtgatcagtactatgttgatcaccgttggttaggcggtatgctgactaactggaaaaccgttcgtcagtcaatcaaacgtctgaaagaactggaaagccaatcagtagacggtacttttgacaagctgaccaagaaagaagcgctgatgcgtactcgtgagcttgaaaagctggaaaaatctttaggcggtattaaaaacatgggcggcctgccagacgtattattcgttatcggcgctgaccacgagcatatcgctattaaagaagctaacaacctgggtatccctgttgttgcagttgttgatactaactctgcgccagatggtgttaactacatcgttcctggtaacgacgacgcgatgcgtgctattcgcctgtacactacttctgttgctgcagcagctaacgctggccgtggtcaagatttagctgttcaagctgagcaagacggtttcgtagaagccgaataa

SEQ ID NO: 30965 - protein, 242 aa, Shewanella oneidensis
MTTVSMRDMLQAGVHFGHQTRYWNPKMKPFIFGARNGVHIINLEHTVPMFNEALAFISNVASKKGKVLFVGTKRAAGEAIKEAAISCDQYYVDHRWLGGMLTNWKTVRQSIKRLKELESQSVDGTFDKLTKKEALMRTRELEKLEKSLGGIKNMGGLPDVLFVIGADHEHIAIKEANNLGIPVVAVVDTNSAPDGVNYIVPGNDDAMRAIRLYTTSVAAAANAGRGQDLAVQAEQDGFVEAE

SEQ ID NO: 30966 - DNA, 726 bp, Shigella flexneri
  CDS (1)..(726): transl_table=11
atggcaactgtttccatgcgcgacatgctcaaggctggtgttcacttcggtcaccagacccgttactggaacccgaaaatgaagccgttcatcttcggtgcgcgtaacaaagttcacatcatcaaccttgagaaaactgtaccgatgttcaacgaagctctggctgaactgaacaagattgtttctcgcaaaggtaaaatccttttcgttggtactaaacgcgctgcaagcgaagcggtgaaagacgctgctctgagctgcgaccagttcttcgtgaaccatcgctggctgggcggtatgctgactaactggaaaaccgttcgtcagtccatcaaacgtctgaaagacctggaaactcagtctcaggacggtactttcgacaagctgaccaagaaagaagcgctgatgcgcactcgtgagctggagaaactggaaaacagcctgggcggtatcaaagacatgggcggtctgccggacgctctgtttgtaatcgatgctgaccacgaacacattgctatcaaagaagcaaacaacttgggtattccggtatttgctatcgttgataccaactctgatccggacggtgttgacttcgttatcccgggtaacgacgacgcaatccgtgctgtgaccctgtacctgggcgctgttgctgcaaccgtacgtgaaggccgttctcaggatctggcttcccaggcggaagaaagcttcgtagaagctgagtaa

SEQ ID NO: 30967 - protein, 241 aa, Shigella flexneri
MATVSMRDMLKAGVHFGHQTRYWNPKMKPFIFGARNKVHIINLEKTVPMFNEALAELNKIVSRKGKILFVGTKRAASEAVKDAALSCDQFFVNHRWLGGMLTNWKTVRQSIKRLKDLETQSQDGTFDKLTKKEALMRTRELEKLENSLGGIKDMGGLPDALFVIDADHEHIAIKEANNLGIPVFAIVDTNSDPDGVDFVIPGNDDAIRAVTLYLGAVAATVREGRSQDLASQAEESFVEAE

SEQ ID NO: 30968 - DNA, 774 bp, Silicibacter pomeroyi
  CDS (1)..(774): transl_table=11
atggctcttcccgagttctccatgcgtcagctgctggaagctggcgttcacttcggccaccagacccaacgttggaacccgcgcatgtcgccgttcatctacggcgctcgcaacggcatccacatcctggacctgacccagaccgttccgatgctggaccaggcgctgaaagccgtgcgcgacaccgtcgccaagggcggccgcgttctgttcgtgggcaccaagcgtcaggcctcgggcccgatcgccgaagccgccgagaaatcggcccagtattacatgaaccaccgctggctgggcggcaccctgaccaactggaagaccgtgtcgcagtcgattcagcgcctgcgcatgatcgacgagaagatggaaggcggcgccgagggcctgaccaagaaagagcgtctgggcatggaacgcgaccaggccaagctgcaggcttcgctgggcggcatccgcgaaatgggcggcgtgcctgacctgctgttcgtcatcgacgtcaagaaagaagcgctggccatcgccgaagccaacaagctgggcatcccggttgtggccgtggtcgataccaactgctcgcccgatggtgtggattacatcatccccggcaacgatgacgccgcccgcgccatctcgctgtattgcgatctggccgcgcgcgccgcactcgacggcatgacggcacagctgggcgccgcaggcgtcgacctgggcgagctggaagaggcccccgccgaagaggcgctggccgaagaggcagccgccgaggcctga

SEQ ID NO: 30969 - protein, 257 aa, Silicibacter pomeroyi
MALPEFSMRQLLEAGVHFGHQTQRWNPRMSPFIYGARNGIHILDLTQTVPMLDQALKAVRDTVAKGGRVLFVGTKRQASGPIAEAAEKSAQYYMNHRWLGGTLTNWKTVSQSIQRLRMIDEKMEGGAEGLTKKERLGMERDQAKLQASLGGIREMGGVPDLLFVIDVKKEALAIAEANKLGIPVVAVVDTNCSPDGVDYIIPGNDDAARAISLYCDLAARAALDGMTAQLGAAGVDLGELEEAPAEEALAEEAAAEA

SEQ ID NO: 30970 - DNA, 756 bp, Spirulina platensis
  CDS (1)..(756): transl_table=11
atgcctagcgtaaccatgcgcgacatgctcaaggcgggcgttcatttcggccaccagacccgtttctggaacccgaagatgaagccctacatctttggcgcacgtaacaagatccatatcgtcaacctggaaaagaccctgccgctgttcaacgatgccctgggtttcgttaacaagctggcgtccagcaacaacacgattctgttcgtgggcaccaagcgtgcggcgcagaaagcggtggctgaagaagcaacccgctgcggtatgccgtacgtcgaccaccgctggctcggtggcatgctcaccaactggaagaccatccgtcagtcgatcaagcggttccgtgacctggaagcccaggccaacgacggcaccttcgacaagctgaccaagaaagaagcgctgatgcgccgccgcgagatggagaagctggaacgctccatcggtggtatcaaggacatgggcggcctgcctgatgccctgttcgtgatcgacgtggaccacgaagacatcgccgtccaggaagcccgcaagctgggtattccggtgatcgcggtggtggacaccaacagcaacccggacggtgtggactacttcatcccgggcaacgatgacgctatccgcgccattcagctgtacgtgggtgccgtggccgacgccatcatcgaaggccgtcagtacgccgcgacccaggcaccgggtggcgacagtgacggttttgtcgaggtcgaggaagcgggcgaagcccaggcctga

SEQ ID NO: 30971 - protein, 251 aa, Spirulina platensis
MPSVTMRDMLKAGVHFGHQTRFWNPKMKPYIFGARNKIHIVNLEKTLPLFNDALGFVNKLASSNNTILFVGTKRAAQKAVAEEATRCGMPYVDHRWLGGMLTNWKTIRQSIKRFRDLEAQANDGTFDKLTKKEALMRRREMEKLERSIGGIKDMGGLPDALFVIDVDHEDIAVQEARKLGIPVIAVVDTNSNPDGVDYFIPGNDDAIRAIQLYVGAVADAIIEGRQYAATQAPGGDSDGFVEVEEAGEAQA

SEQ ID NO: 30972 - DNA, 777 bp, Staphylococcus aureus
  CDS (1)..(777): transl_table=11
atggcagtaatttcaatgaaacaattactagaagcgggtgttcacttcggtcaccaaacacgtcgttggaacccaaaaatgaaaaaatatatcttcactgagagaaatggtatttatatcatcgacttacaaaaaacagtgaaaaaagtagacgaggcatacaacttcttgaaacaagtttcagaagatggtggacaagtcttattcgtaggaactaaaaaacaagcacaagaatcagttaaatctgaagcagaacgtgctggtcaattctacattaaccaaagatggttaggtggattattaactaactataaaacgatctcaaaacgaatcaaacgtatttctgaaattgaaaaaatggaagaagatggtttattcgaagtattacctaaaaaagaagtagtagaacttaaaaaagaatacgaccgtttaatcaaattcttaggcggaattcgtgatatgaaatcaatgcctcaagcattattcgtagttgacccacgtaaagagcgtaatgcaattgctgaagctcgtaaattaaatattcctatcgtaggtatcgttgacactaactgtgatcctgacgaaattgactacgttatcccagcaaacgacgatgctatccgtgcggttaaattattaactgctaaaatggcagatgcaatcttagaaggtcaacaaggcgtttctaatgaagaagtagctgcagaacaaaacatcgatttagatgaaaaagaaaaatcagaagaaacagaagcaacagaagcaactgaagaataa

SEQ ID NO: 30973 - protein, 258 aa, Staphylococcus aureus
MAVISMKQLLEAGVHFGHQTRRWNPKMKKYIFTERNGIYIIDLQKTVKKVDEAYNFLKQVSEDGGQVLFVGTKKQAQESVKSEAERAGQFYINQRWLGGLLTNYKTISKRIKRISEIEKMEEDGLFEVLPKKEVVELKKEYDRLIKFLGGIRDMKSMPQALFVVDPRKERNAIAEARKLNIPIVGIVDTNCDPDEIDYVIPANDDAIRAVKLLTAKMADAILEGQQGVSNEEVAAEQNIDLDEKEKSEETEATEATEE

SEQ ID NO: 30974 - DNA, 768 bp, Staphylococcus aureus
  CDS (1)..(768): transl_table=11
atggcagtaatttcaatgaaacaattactagaagcgggtgttcacttcggtcaccaaacacgtcgttggaacccaaaaatgaaaaaatatatcttcactgagagaaatggtatttatatcatcgacttacaaaaaacagtgaaaaaagtagacgaggcatacaacttcttgaaacaagtttcagaagatggtggacaagtcttattcgtaggaactaaaaaacaagcacaagaatcagttaaatctgaagcagaacgtgctggtcaattctacattaaccaaagatggttaggtggattattaactaactataaaacaatctcaaaacgaatcaaacgtatttctgaaattgaaaaaatggaagaagatggtttattcgaagtattacctaaaaaagaagtagtagaacttaaaaaagaatacgaccgtttaatcaaattcttaggcggaattcgtgatatgaaatcaatgcctcaagcattattcgtagttgacccacgtaaagagcgtaatgcaattgctgaagctcgtaaattaaatattcctatcgtaggtatcgttgacactaactgtgatcctgacgaaattgactacgttatcccagcaaacgacgatgctatccgtgcggttaaattattaactgctaaaatggcagatgcaatcttagaaggtcaacaaggcgtttctaatgaagaagtagctgcagaacaaaacatcgatttagatgaaaaagaaaaatcagaagaaacagaagcaactgaagaataa

SEQ ID NO: 30975 - protein, 255 aa, Staphylococcus aureus
MAVISMKQLLEAGVHFGHQTRRWNPKMKKYIFTERNGIYIIDLQKTVKKVDEAYNFLKQVSEDGGQVLFVGTKKQAQESVKSEAERAGQFYINQRWLGGLLTNYKTISKRIKRISEIEKMEEDGLFEVLPKKEVVELKKEYDRLIKFLGGIRDMKSMPQALFVVDPRKERNAIAEARKLNIPIVGIVDTNCDPDEIDYVIPANDDAIRAVKLLTAKMADAILEGQQGVSNEEVAAEQNIDLDEKEKSEETEATEE

SEQ ID NO: 30976 - DNA, 789 bp, Staphylococcus epidermidis
  CDS (1)..(789): transl_table=11
atggcagtaatttctatgaaacaattacttgaagccggtgttcacttcggtcaccaaacacgccgttggaacccaaaaatgaaaaaatatatcttcactgaaagaaatggtatttatatcattgatttacaaaaaacagtgaaaaaagttgaagaagcatacaactttgtaaaacaaatctctgaagaaggcggaaaagtcttattcgtaggtacaaaaaaacaagcgcaagaatcagttaaagctgaggcagagcgtgctggtcaattctacgttaaccaaagatggttaggtgggattttaactaactacaaaacaatctcaaaacgaattaaacgtatttctgaaattgaaaaaatggaagaagacggattatttgaagtattacctaaaaaagaagttgttgaacttaaaaaagaatacgaccgtttaattaagttcttaggcggtattcgcgatatgaaatcaatgcctcaagcattattcgttgttgatcctcgtaaagagcgcaacgctattgctgaagctcgcaaactaaatattcctatcgtaggtattgttgacactaactgtgatcctgatgaaattgattacgttatcccagcaaacgatgatgctattcgtgccgttaaattattaactggtaaaatggcagacgctatcttagaaggtcaacaaggtgtatctaatgaagaagtagctgcagaacaaaacatcaatttagatgacaaagaagaatctgaacaagcagaaacaactgaagaaaacacttctgttgaatcaaactaa

SEQ ID NO: 30977 - protein, 262 aa, Staphylococcus epidermidis
MAVISMKQLLEAGVHFGHQTRRWNPKMKKYIFTERNGIYIIDLQKTVKKVEEAYNFVKQISEEGGKVLFVGTKKQAQESVKAEAERAGQFYVNQRWLGGILTNYKTISKRIKRISEIEKMEEDGLFEVLPKKEVVELKKEYDRLIKFLGGIRDMKSMPQALFVVDPRKERNAIAEARKLNIPIVGIVDTNCDPDEIDYVIPANDDAIRAVKLLTGKMADAILEGQQGVSNEEVAAEQNINLDDKEESEQAETTEENTSVESN

SEQ ID NO: 30978 - DNA, 771 bp, Streptococcus agalactiae serotype III
  CDS (1)..(771): transl_table=11
atggcagtaatttcaatgaaacaacttcttgaggctggtgttcactttggtcaccaaactcgtcgctggaaccctaagatggctaagtacatcttcacagaacgtaatggtatccacgttatcgaccttcaacaaactgtaaaattagctgaccaagcttacgaatttgttcgtgatgctgcagcaaacgatgcagttatcttgtttgttggtactaagaaacaagcagctgaagctgttgctgaagaagctaaacgtgctggtcaatacttcattaaccaccgttggttaggtggaactcttactaactggggaactatccaaaaacgtattgctcgtttgaaagaaatcaaacgtatggaagaagaaggaacttttgaacttcttcctaagaaagaagttgcattgttaaacaaacaacgtgcacgtcttgaaaaattcttgggtggtatcgaagatatgccacgcatcccagatgtaatgtatgttgttgacccacataaagagcaaatcgctgttaaagaagctaaaaaacttggtattccagttgtagctatggttgacactaacgctgatccagatgatatcgatgttatcatcccagcaaacgatgacgctattcgcgccgttaaattaattacttctaaattagctgatgcagttattgaaggtcgtcaaggtgaagatgctgacgttgacttcgctcaagaagcacaagcagattcaattgaagaaatcgttgaagtagttgaaggatcaaacaacgactaa

SEQ ID NO: 30979 - protein, 256 aa, Streptococcus agalactiae serotype III
MAVISMKQLLEAGVHFGHQTRRWNPKMAKYIFTERNGIHVIDLQQTVKLADQAYEFVRDAAANDAVILFVGTKKQAAEAVAEEAKRAGQYFINHRWLGGTLTNWGTIQKRIARLKEIKRMEEEGTFELLPKKEVALLNKQRARLEKFLGGIEDMPRIPDVMYVVDPHKEQIAVKEAKKLGIPVVAMVDTNADPDDIDVIIPANDDAIRAVKLITSKLADAVIEGRQGEDADVDFAQEAQADSIEEIVEVVEGSNND

SEQ ID NO: 30980 - DNA, 927 bp, Streptomyces avermitilis
  CDS (1)..(927): transl_table=11
atggccgtcgtcacgatgcgggagctgctggaaagcggcgtccacttcggtcaccagacccgtcgctggaacccgaagatgaagcgcttcatcttcaccgagcgcaacggcatctacatcatcgacctgctccagtcgctgtcgtacatcgaccgcgcctacgagttcgtcaaggagaccgtcgcccacggcggcacggtcatgttcgtcggcacgaagaagcaggcgcaggaggccatcgcggagcaggccacccgcgtcggcatgccctacgtcaaccagcgctggctgggcggcatgctcaccaacttctcgaccgtctacaagcgtctgcagcgcctcaaggagctcgagcagatcgacttcgaggacgtcgccgcttccggtctgaccaagaaggagcttctcgtgctctcgcgcgagaaggccaagctggagaagaccctcggtggtatccgcgagatgcagaaggtgcccagcgccgtctggatcgtggacaccaagaaggagcacatcgcggtcggcgaggcccggaagctcaacatcccggtcgtcgccatcctcgacaccaactgcgaccccgacgaggtcgactacaagatcccgggcaacgacgacgcgatccgctccgtcaccctgctcacccgcgtgatcgccgacgccgtcgccgagggcctcatcgcccgctccggcgccggcaaggccgagggtgacaaggccgcgggcgagccgctcgccgcgtgggagcgcgacctgctcgagggcgagaagaaggccgacgaggctgaggctccggccgccgccgaggccgagaagccggccgaggccgctgctgaggcgccggccgccgaggcccccgctgccgaggctcccgccgctgaggcccccgctgccgaggccccggccgcggacgccgagcaggcctga

SEQ ID NO: 30981 - protein, 308 aa, Streptomyces avermitilis
MAVVTMRELLESGVHFGHQTRRWNPKMKRFIFTERNGIYIIDLLQSLSYIDRAYEFVKETVAHGGTVMFVGTKKQAQEAIAEQATRVGMPYVNQRWLGGMLTNFSTVYKRLQRLKELEQIDFEDVAASGLTKKELLVLSREKAKLEKTLGGIREMQKVPSAVWIVDTKKEHIAVGEARKLNIPVVAILDTNCDPDEVDYKIPGNDDAIRSVTLLTRVIADAVAEGLIARSGAGKAEGDKAAGEPLAAWERDLLEGEKKADEAEAPAAAEAEKPAEAAAEAPAAEAPAAEAPAAEAPAAEAPAADAEQA

SEQ ID NO: 30982 - DNA, 933 bp, Streptomyces coelicolor
  CDS (1)..(933): transl_table=11
atggccgtcgtcacgatgcgggagctgctggaaagcggcgtccacttcggtcaccagacccgccgttggaacccgaagatgaagcgcttcatcttcacggagcgcaacggcatctacatcatcgacctgctccagtcgctgtcgtacatcgaccgcgcctacgagttcgtcaaggagaccgtcgcccacggcggcacggtcatgttcgtcggcacgaagaagcaggcgcaggaggccatcgccgagcaggccacccgcgtcggcatgccctacgtcaaccagcgctggctgggcggcatgctcaccaacttctcgaccgtctacaagcgcctgcagcgcctgaaggagctcgagcagatcgacttcgaggacgtggccgcctccggcctcaccaagaaagagctgctggtcctctcccgcgagaaggccaagctggagaagaccctcggcggtatccgcgagatgtccaaggtgcccagcgccgtctggatcgtggacaccaagaaggagcacatcgcggtcggcgaggcccggaagctcaacatcccggtcgtcgccatcctcgacaccaactgcgaccccgacgaggtcgatcacaagatcccgggcaacgacgacgcgatccgctccgtcaccctgctcacccgcgtgatcgccgacgccgtcgccgagggcctcatcgcccgctccggtgccgccggtggcgccaagggcgacaaggccgccggtgagccgctcgccgcctgggagcgcgacctgctcgagggcgagaaggccgagaagaaggacgacgccgaggccgccgagaagcccgccgaggcccccgctgccgaggcccccgcggctgaggccgccgaggcccccgctgccgaggccgctcccgccgaggagcccgccgccgaagccccggccgcggacgccgagcaggcctga

SEQ ID NO: 30983 - protein, 310 aa, Streptomyces coelicolor
MAVVTMRELLESGVHFGHQTRRWNPKMKRFIFTERNGIYIIDLLQSLSYIDRAYEFVKETVAHGGTVMFVGTKKQAQEAIAEQATRVGMPYVNQRWLGGMLTNFSTVYKRLQRLKELEQIDFEDVAASGLTKKELLVLSREKAKLEKTLGGIREMSKVPSAVWIVDTKKEHIAVGEARKLNIPVVAILDTNCDPDEVDHKIPGNDDAIRSVTLLTRVIADAVAEGLIARSGAAGGAKGDKAAGEPLAAWERDLLEGEKAEKKDDAEAAEKPAEAPAAEAPAAEAAEAPAAEAAPAEEPAAEAPAADAEQA

SEQ ID NO: 30984 - DNA, 786 bp, Streptococcus mutans
  CDS (1)..(786): transl_table=11
atggcagttatttcaatgaaacaactcctcgaggctggtgtgcactttggtcaccaaacgcgtcgttggaatcctaagatggctaagtacatcttcacagaacgtaatggaattcacgttattgaccttcaacaaactgtaaaattagctgatcaagcttacgacttcgttcgtgatgctgcagcaaatgatgctgttatcttgtttgttggtacgaaaaaacaagcttctgaagcgattaaagaagaggcagaacgtgctggtcaatactatatcaaccaccgctggttgggtgggactttgacaaactgggatacaattcaaaaacgtatcgcacgtttgaaagaaatcaaacaaatggaagttgatggtatttttgatgttcttcctaaaaaagaagttgctcttcttaataagcaacgtgcgcgtcttgaaaaattcttgggtggtatcgaagatatgcctcgtattccagatattatctacatcgttgatccgcacaaagaacaaattgcagttaaagaagctaagaaacttggtattccagttgtcgctatggttgatactaatgctgatccagacgatattgatgttattatcccagcaaatgacgatgcgatccgcgccgttaaattgattaccagcaaattagctgatgctgtgattgaaggtcgtcaaggtgaagacagtgttgaagctgttgaagcagaacttgcagctggagaaacacaagcagattcaattgaagaaattgttgaagttgttgaaggcgcaaacgaaaattaa

SEQ ID NO: 30985 - protein, 261 aa, Streptococcus mutans
MAVISMKQLLEAGVHFGHQTRRWNPKMAKYIFTERNGIHVIDLQQTVKLADQAYDFVRDAAANDAVILFVGTKKQASEAIKEEAERAGQYYINHRWLGGTLTNWDTIQKRIARLKEIKQMEVDGIFDVLPKKEVALLNKQRARLEKFLGGIEDMPRIPDIIYIVDPHKEQIAVKEAKKLGIPVVAMVDTNADPDDIDVIIPANDDAIRAVKLITSKLADAVIEGRQGEDSVEAVEAELAAGETQADSIEEIVEVVEGANEN

SEQ ID NO: 30986 - DNA, 780 bp, Streptococcus pneumoniae
  CDS (1)..(780): transl_table=11
atggcagtaatttcaatgaaacaacttcttgaggctggtgtacactttggtcaccaaactcgtcgctggaatcctaagatggctaagtacatctttactgaacgtaacggaatccacgttatcgacttgcaacaaactgtaaaatacgctgaccaagcatacgacttcatgcgtgatgcagcagctaacgatgcagttgtattgttcgttggtactaagaaacaagcagctgatgcagttgctgaagaagcagtacgttcaggtcaatacttcatcaaccaccgttggttgggtggaactcttacaaactggggaacaatccaaaaacgtatcgctcgtttgaaagaaattaaacgtatggaagaagatggaactttcgaagttcttcctaagaaagaagttgcacttcttaacaaacaacgtgcgcgtcttgaaaaattcttgggtggtatcgaagatatgcctcgtatcccagatgtgatgtacgtagttgacccacataaagagcaaatcgctgttaaagaagctaaaaaattgggaatcccagttgtagcgatggttgacaccaatactgatccagatgatatcgatgtaatcatcccagctaacgatgacgctatccgtgctgttaaattgatcacagctaaattggctgacgctattatcgaaggacgtcaaggtgaggatgcagtagcagttgaagcagaatttgcagcttcagaaactcaagcagattcaattgaagaaatcgttgaagttgtagaaggtgacaacaaatag

SEQ ID NO: 30987 - protein, 259 aa, Streptococcus pneumoniae
MAVISMKQLLEAGVHFGHQTRRWNPKMAKYIFTERNGIHVIDLQQTVKYADQAYDFMRDAAANDAVVLFVGTKKQAADAVAEEAVRSGQYFINHRWLGGTLTNWGTIQKRIARLKEIKRMEEDGTFEVLPKKEVALLNKQRARLEKFLGGIEDMPRIPDVMYVVDPHKEQIAVKEAKKLGIPVVAMVDTNTDPDDIDVIIPANDDAIRAVKLITAKLADAIIEGRQGEDAVAVEAEFAASETQADSIEEIVEVVEGDNK

SEQ ID NO: 30988 - DNA, 795 bp, Symbiobacterium thermophilum
  CDS (1)..(795): transl_table=11
gtgtctgtgatctccatgaagcagctcctcgaagcgggtgtccacttcgggcaccagacccgccggtggaacccgaagatgaaggagtacatcttcaccgaacggaatggcatctacatcatcgatctccagaagaccgtgcgcatggtcgagatcgcgtacaacgccgtgcgccagatggccgcggacggcggcaagatcctcttcatcggcaccaagaagcaggcgcaggacgcggtgcgggaagaggccgagcgctgcggcatgttctacgtcaaccagcggtggctgggcggcatgctgaccaacttcgagacgatcaagaagcgcatcgcccggctcaacgagctggaggagatcgagggcacggagtactggagcaagctgaccaagaaggagcaggcgcagcttctgcacgagaaggagaagctggagaagaacctgggcggcatcaagggcatgaagagcctgcccgacatggcgtttgtcatcgatccccgccgggagcgcatcgccgtgtccgagctgcgcaagctggggatccccatcgtcgccattgtcgacaccaactgcgatccggacgagatcgactacgtcatccccggcaacgacgacgccatccgtgcggtgaagctgctgaccagcaagatcgcggacgccgtcattgagggccgccagggcgtggacacctccgccaccgtcgacgaggaagaggccgaggtcgccgaggagaccgagtcgatggagtccgccgaggacctcgacgccgacctgatcgaggaagaggcggagtaa

SEQ ID NO: 30989 - protein, 264 aa, Symbiobacterium thermophilum
MSVISMKQLLEAGVHFGHQTRRWNPKMKEYIFTERNGIYIIDLQKTVRMVEIAYNAVRQMAADGGKILFIGTKKQAQDAVREEAERCGMFYVNQRWLGGMLTNFETIKKRIARLNELEEIEGTEYWSKLTKKEQAQLLHEKEKLEKNLGGIKGMKSLPDMAFVIDPRRERIAVSELRKLGIPIVAIVDTNCDPDEIDYVIPGNDDAIRAVKLLTSKIADAVIEGRQGVDTSATVDEEEAEVAEETESMESAEDLDADLIEEEAE

SEQ ID NO: 30990 - DNA, 789 bp, Thermotoga maritima
  CDS (1)..(789): transl_table=11
gtgcctgttgttacaatgaaacagcttctggaagcgggagttcactttggacacagaacgagaagatggaacccgaagatggctccctacatctacacggagaggaaaggtatctacatcatcgaccttcagaaaacccagcagttgctcgaagaggcttactacttcgtaagggagaaagccagcgaaggtgcgacgattctattcgtgggaacgaaaaagcaggcccaaggagtcataaaggccgaggcagaaaggtgcggagccttctacgtgaacaacagatggcttggaggacttttgacgaacttcaaaacgatcagatcgaggatagacaaactcatcgaactcgaagaaatggagcagagcggcaagctcgaagaacttccaaagaaagagcagagcagaatcagaagagttcttgaaaagctcagaaagaacctcggcgggctcaaagaaatgaggagacttccggacatcatctacattgttgatccgagaaaggaaaagatcgctgtggcagaggcgaacaaactgggaattcccatcgtggctattgtcgacacaaactgcgaccccgatcccatcgactacgtcatccctggaaacgacgacgcgatcagatccataaaactcatcacttccgtcatcgcagacgcgtacctcgagggaagagagggagctcctctcactgcggagaaagaagaaacagaaagtgcagaagaaacgagtgaagaagtaacggaggatataaatctggaagaactcgaagaggaagaagaagtgtaa

SEQ ID NO: 30991 - protein, 262 aa, Thermotoga maritima
MPVVTMKQLLEAGVHFGHRTRRWNPKMAPYIYTERKGIYIIDLQKTQQLLEEAYYFVREKASEGATILFVGTKKQAQGVIKAEAERCGAFYVNNRWLGGLLTNFKTIRSRIDKLIELEEMEQSGKLEELPKKEQSRIRRVLEKLRKNLGGLKEMRRLPDIIYIVDPRKEKIAVAEANKLGIPIVAIVDTNCDPDPIDYVIPGNDDAIRSIKLITSVIADAYLEGREGAPLTAEKEETESAEETSEEVTEDINLEELEEEEEV

SEQ ID NO: 30992 - DNA, 708 bp, Thermoanaerobacter tengcongensis
  CDS (1)..(708): transl_table=11
atgtcaatagtttcaatgaagcagttattggaagcaggagttcacttcggtcaccagacaagaagatggaaccccaaaatggccccttatatttttacggagagaaatggaatttatatcatcgacttacagcaaacagtagaaaaattggagcaggcttatgagtttgtgaaaaaactggtgatggacgggggtaccatactttttgtcgggactaaaaaacaggctcaggagtccataaaagaagaagcagaaagatgcggcatgttttatgtaaatcagagatggctgggcgggactttgactaacttcaaaacgattaaaacccgaattcagcgtttaaaagagctcaaaagaatggaggaagacggcacttttgaagtgcttcctaaaaaggaagtaatcaggcttagaaaagaaaaagagagattgcagaagtttttaggcggaattgaaaatatggagtctctgccttctgctttattcatcgtcgatccaaagaaggaagctatagcagtatctgaagctagagctcttgaaattcctatagttgccattgtggacaccaactgcgaccctgagcttatagactatccaataccaggaaacgatgatgctataagagcagtaaaattaattacttctaaaattgctgatgctgttttagaaggcaagcagggcgagcagtttgaagcagctgaagaataa

SEQ ID NO: 30993 - protein, 235 aa, Thermoanaerobacter tengcongensis
MSIVSMKQLLEAGVHFGHQTRRWNPKMAPYIFTERNGIYIIDLQQTVEKLEQAYEFVKKLVMDGGTILFVGTKKQAQESIKEEAERCGMFYVNQRWLGGTLTNFKTIKTRIQRLKELKRMEEDGTFEVLPKKEVIRLRKEKERLQKFLGGIENMESLPSALFIVDPKKEAIAVSEARALEIPIVAIVDTNCDPELIDYPIPGNDDAIRAVKLITSKIADAVLEGKQGEQFEAAEE

SEQ ID NO: 30994 - DNA, 876 bp, Treponema denticola
  CDS (1)..(876): transl_table=11
atggcagtagtaaccatgaaaaacttacttgaatcaggcgtacatttcggccatcaagtaaaacgctgggatccgagaatgaaaaaatacattttttcggaaagaaacggaattcatatcatcgatttacaaaaaacaatcgttgcaatccgtgaggcctatgaagctgttcgcaaaacaacttcggaaggaaagtcggttttgttcgtaggaacaaaaaaacaagcccagcagacaattcaaaaagaagctgaaagatgcggaatgttctatattaacaaccgctggctcggcggaatgctcacaaacttttcaacaatcaaaaagagcttggcccgtcttaagaaaatcgaaaaaatggaagttgacgggacattcgataaccttacaaaaaaagaaatcgcttccctacaaaaagaaaaatcaaagctcgaaaaaaacttaggcggtattaaggagatgaaggatcttcccggaatcctctttataatcgatacccgaaaagaagaaattgctatcagagaagcccgttccttaggtattcccatcatcgctgttgtagacaccaactgcaaccccgagggcatcgactatccgattcccggaaacgatgatgccatcagagctatttcgctttttacgggtgtaatcgccaatgccgttatcgaagccgataacgagcacggtcttaaaatcatcgaaaaccttcaagaagatgaagagtcaggtgattcaggtgttgatccctatcaggatagagaagaagaaattaccgattattcaaactacactcccaaagatgaagcttccggagatgatgaggatgaagaagataattctctcgtaaatgatgaggatttatacgacgacaaataa

SEQ ID NO: 30995 - protein, 291 aa, Treponema denticola
MAVVTMKNLLESGVHFGHQVKRWDPRMKKYIFSERNGIHIIDLQKTIVAIREAYEAVRKTTSEGKSVLFVGTKKQAQQTIQKEAERCGMFYINNRWLGGMLTNFSTIKKSLARLKKIEKMEVDGTFDNLTKKEIASLQKEKSKLEKNLGGIKEMKDLPGILFIIDTRKEEIAIREARSLGIPIIAVVDTNCNPEGIDYPIPGNDDAIRAISLFTGVIANAVIEADNEHGLKIIENLQEDEESGDSGVDPYQDREEEITDYSNYTPKDEASGDDEDEEDNSLVNDEDLYDDK

SEQ ID NO: 30996 - DNA, 876 bp, Treponema pallidum
  CDS (1)..(876): transl_table=11
atggcagtggtgactatcaaaaatctgcttgaatctggggttcattttggccatcaggtcaggcggtgggatccgcggatgaaaaagtatattttcgcggagcgtaacggcattcacatcattgatctgcaaaagacgattacggccatccgcgaggcgtacgacatggtgcgcaggactgtttcctcaggcaagtccgttttgtttgtgggcacaaagaagcagtcgcagcaaaccattgccaaggaagcgcagcgctgtgggatgttttatgtgactaaccgttggctcggcggcatgctcactaacttttccaccataaggaagagtctttcgcgtctcaagaagatagaacgcatggagatagacggtacgttcgagcatctctctaagaaggaggtggcgtctttacgcaaggagcacgcgaagctagaaaagaatttgggcggcataaaggaaatgaaggagctgccgggtgtagtgtttatcattgatacgcgtaaggagactatcgctatccgtgaggcgaggcgagttggtatcccgattgttgcggtggtggacaccaactgtaatcctgaaggtatcgattacccaatccccgggaatgacgatgcgatccgtgccatttccctttttacccaactcattgccaatgcggttatggaagcgggtaacgagcatggtttgaaaatcattgagaacttgcaggatgaggagagtggcgatgagcttgacgagtccgtttccttgcacgaggaagggcgcgaaattactgactatgaaaattatactcctcctgaggagcgtgagtattctgtgaacgatgaaggcgatgtgtttgatgaggatgagtcgctctacgaggggcgttag

SEQ ID NO: 30997 - protein, 291 aa, Treponema pallidum
MAVVTIKNLLESGVHFGHQVRRWDPRMKKYIFAERNGIHIIDLQKTITAIREAYDMVRRTVSSGKSVLFVGTKKQSQQTIAKEAQRCGMFYVTNRWLGGMLTNFSTIRKSLSRLKKIERMEIDGTFEHLSKKEVASLRKEHAKLEKNLGGIKEMKELPGVVFIIDTRKETIAIREARRVGIPIVAVVDTNCNPEGIDYPIPGNDDAIRAISLFTQLIANAVMEAGNEHGLKIIENLQDEESGDELDESVSLHEEGREITDYENYTPPEEREYSVNDEGDVFDEDESLYEGR

SEQ ID NO: 30998 - DNA, 729 bp, Vibrio cholerae
  CDS (1)..(729): transl_table=11
atggcatctgtatcaatgcgcgatatgctgacagcgggcgtacacttcggtcaccaaactcgttactggaacccaaaaatgaagcaattcattttcggcgcacgtaaccgcgttcacatcatcaacctagaaaaaactgtacctatgttcaacgaagctctagctgagctggcaaaagttggcgagaagaaaggtaaagttctattcgttggtactaagcgcgctgcatctgagtctgtgaaagaagcagctctagcaagcaaccaatactacgttaacaaccgctggttgggcggtatgctgactaactggaaaactgttcgtcagtcaatcaagcgtctgaaagagctggaagttcaatctactgacggtacttttgacaagctgactaagaaagaagctctaatgcgcactcgcgaaatggagaaactggaaaagtctcttggcggtatcaaagatatgggcggcctgcctgacgctctgttcgtaatcgacgcagatcacgagcacatcgctatcaaagaagcgaacaacctaggtattccagtatttgctgttgttgatactaactctagcccagacggcgtagactacatcatcccaggtaacgacgacgcgatccgcgctgttcaactgtacctgaatgctgctgctcaagcgatcaacgaaggtcgtaacaaagacgtagctgctgtagctgaaaaagacggtttcgtagaagcggaataa

SEQ ID NO: 30999 - protein, 242 aa, Vibrio cholerae
MASVSMRDMLTAGVHFGHQTRYWNPKMKQFIFGARNRVHIINLEKTVPMFNEALAELAKVGEKKGKVLFVGTKRAASESVKEAALASNQYYVNNRWLGGMLTNWKTVRQSIKRLKELEVQSTDGTFDKLTKKEALMRTREMEKLEKSLGGIKDMGGLPDALFVIDADHEHIAIKEANNLGIPVFAVVDTNSSPDGVDYIIPGNDDAIRAVQLYLNAAAQAINEGRNKDVAAVAEKDGFVEAE

SEQ ID NO: 31000 - DNA, 729 bp, Vibrio parahaemolyticus
  CDS (1)..(729): transl_table=11
atggcaactgtatcaatgcgcgatatgctgaaagctggtgttcacttcggtcaccaaactcgttactggaacccaaaaatgaagccattcatctttggtgctcgtaaccgcgttcacatcatcaacctagaaaaaactgtaccaatgttcaacgaagctctagctgaactagctaaagttggcgagaaaaaaggtaaagttctattcgtaggtactaagcgcgctgcatctgaagctgttaaagaagctgcaatcgctagcaaccagttctacgtgaacaaccgttggttgggcggtatgctaacgaactacaaaactgttcgtcagtcaatcaagcgtctaaaagaacttgagattcaatctcaagacggtactttcgacaaactaactaagaaagaagctctaatgcgcactcgtgaaatggagaagctagagaaatctcttggtggtatcaaagacatgggcggcctaccagacgctctattcgtaatcgacgctgatcacgaacacattgcaatcaaagaagctaacaacctaggtattccagtatacgctgtggtagatactaactctaacccagacggcgttgactacatcatcccaggtaacgacgacgcgatccgcgcagttcaactatacctaaacgctgctgcatctgcagtaactgaaggtcgcaacaaagacgttgcagtagttgctgaaaaagacggcttcgtagaagctgaataa

SEQ ID NO: 31001 - protein, 242 aa, Vibrio parahaemolyticus
MATVSMRDMLKAGVHFGHQTRYWNPKMKPFIFGARNRVHIINLEKTVPMFNEALAELAKVGEKKGKVLFVGTKRAASEAVKEAAIASNQFYVNNRWLGGMLTNYKTVRQSIKRLKELEIQSQDGTFDKLTKKEALMRTREMEKLEKSLGGIKDMGGLPDALFVIDADHEHIAIKEANNLGIPVYAVVDTNSNPDGVDYIIPGNDDAIRAVQLYLNAAASAVTEGRNKDVAVVAEKDGFVEAE

SEQ ID NO: 31002 - DNA, 762 bp, Vibrio vulnificus; identical to SEQ ID NO: 30492
  CDS (34)..(762): transl_table=11

SEQ ID NO: 31003 - protein, 242 aa, Vibrio vulnificus
MATVSMRDMLKAGVHFGHQTRYWNPKMKPFIFGARNRVHIINLEKTVPMFNEALAELVKVGEKKGKVLFVGTKRAASEAVKEAAIASNQYYVNNRWLGGMLTNYKTVRQSIKRLKELEVQSTDGTFDKLTKKEALMRTREMEKLEKSLGGIKDMGGLPDALFVIDADHEHIAIKEANNLGIPVFAVVDTNSNPDGVDYIIPGNDDAIRAVQLYLNAAASSLTEGRNKDVAAVAEKDGFVEAE

SEQ ID NO: 31004 - DNA, 723 bp, Wigglesworthia glossinidia brevipalpis
  CDS (1)..(723): transl_table=11
atgttaaatttatctatgaaagatatgatccaatctggagtccattttggacatcaaacaagatattggaatcctaatatgaagccttttattttttgtaaaaaaaataaagtgcatattattaatttagaaaaaacattaataatgtttgaaatagcaatgaatgaattatctaaaatatccaaaagagacggaaaaattttatttattggaacgaaaagagcagcttcagaagccattaaaaattctgcaataaattgcaatcaattttttgtaaattataggtggttaggaggaatgctaactaactggaaaacagtaagacaatctataaaaagattaaaagaactagaatcacaatcaaaagatggaacatttaaaaaattaacaaaaaaagaagccttaataagaactagaactctaaataaattagaaaatagtttaggtggaataaaaaacatgggtggattaccagatgctatatttgttattgatgtagaacacgaaaaaacatcaataaaagaagcaaataaactaggcattcctatttttgcaatagtagatactaattctaacccaaaagatattaaatttgtcataccgggaaatgatgattcaataagggctattgatttatatttaaaaactgtttcagaaacaattaaaaatagtaaaatatctaataaagaaataaataaaaaaataattataaagaataattaa

SEQ ID NO: 31005 - protein, 240 aa, Wigglesworthia glossinidia brevipalpis
MLNLSMKDMIQSGVHFGHQTRYWNPNMKPFIFCKKNKVHIINLEKTLIMFEIAMNELSKISKRDGKILFIGTKRAASEAIKNSAINCNQFFVNYRWLGGMLTNWKTVRQSIKRLKELESQSKDGTFKKLTKKEALIRTRTLNKLENSLGGIKNMGGLPDAIFVIDVEHEKTSIKEANKLGIPIFAIVDTNSNPKDIKFVIPGNDDSIRAIDLYLKTVSETIKNSKISNKEINKKIIIKNN

SEQ ID NO: 31006 - DNA, 816 bp, Wolinella succinogenes
  CDS (1)..(816): transl_table=11
atggttaccatgaaagacctactagagtgcggtgttcacttcggacaccagacaagacgatggaatcccaagatgaaaaaatacatcttcggcgttcgaaaaaacatccatattatcgacctacaaaagaccctacgatacttccgatacacctacaatgttgtccgtgatgccgcggctgagggcaaaaccgtcatgtttgttggcaccaaaaagcaagcgagcgaaaccatcaagcaatacgctgacaccatcaacgctccctatgtaaactaccgatggcttggcggtatgctcaccaacttctccaccatcaaaaaatccatccgcaagcttgaagtgatcgaagagatggaagctagcggccaaatcgagcttctcactaaaaaagagaagctcatgctcactcgcaaaaaagagaagcttgagaagtatcttggcggtgtgcgccacatgaaaaaagctcccgatatgctttttgtcgtggacgccgctaaagagaaaatcgccgtggctgaggcaagaagacttggaattcctgtcgttgccccccttgataccaactgcgatcccgatgttgtagatttccccattcccggaaacgatgatgcgattcgatccattcagcttttctgcaaagagatggccgaagcgattcaagagggtcgagccttagccggcagcgaagagggagaagccactgaagaggtcactcctgcaagcgaagccgaaaagcaagaggttctagctgaagcaatgagtgaagagggcgacgcgctccaagagagcgaagttgtcgaagaagaggagaaataa

SEQ ID NO: 31007 - protein, 271 aa, Wolinella succinogenes
MVTMKDLLECGVHFGHQTRRWNPKMKKYIFGVRKNIHIIDLQKTLRYFRYTYNVVRDAAAEGKTVMFVGTKKQASETIKQYADTINAPYVNYRWLGGMLTNFSTIKKSIRKLEVIEEMEASGQIELLTKKEKLMLTRKKEKLEKYLGGVRHMKKAPDMLFVVDAAKEKIAVAEARRLGIPVVAPLDTNCDPDVVDFPIPGNDDAIRSIQLFCKEMAEAIQEGRALAGSEEGEATEEVTPASEAEKQEVLAEAMSEEGDALQESEVVEEEEK

SEQ ID NO: 31008 - DNA, 798 bp, Xanthomonas axonopodis pv
  CDS (1)..(798): transl_table=11
atgccccaagtcaccatgcgtcagatgctggaagccggcgtccatttcggccaccagacccgctactggaaccccaagatggcgccgtacatcttcggcgcgcgcggcaagatccacatcatcaacctcgagaagaccgttccgctcttcaacgacgcgatgaacttcctctcctcggttgcgcagaagcgcggcaccgtgctgttcctgggcaccaagcgcagcgcgcgcgagtccatcaaggaagaagccgagcgttgcaacatgccgttcatgacccagcgctggctgggcggcacgctgaccaacttccgtaccgtcaagcagtcggttgcccgcctgaaggagctggaagcggcagagaccgacggcaccttcgacaagctggtcaagcatgaagtgctgggcctgcgtcgcgagcgcgagaagctggacgcctcgctcggcggcatcaaggaaatgaaccgtctgcccgacgcgatcttcgtgatcgatatcggccatgaagacatcgccatcaaggaagccaagaagctcggcattccggtgatcgccgtggtcgacaccaactacgatccggccctggtcgactacgccatcccgggcaacgacgacgccatccgcgccgtgcagctgtacgcacgcgccgctgccgatgccgtgctggaaggcaaggctgctgcgccgaactcggcgtcggtgcgcgaagaagagttctcggccgacgccgccgacgaaggcaagggccgtcgcgctccggccaagaagggcgacaagaaggctgacgccgccgagtaa

SEQ ID NO: 31009 - protein, 265 aa, Xanthomonas axonopodis pv
MPQVTMRQMLEAGVHFGHQTRYWNPKMAPYIFGARGKIHIINLEKTVPLFNDAMNFLSSVAQKRGTVLFLGTKRSARESIKEEAERCNMPFMTQRWLGGTLTNFRTVKQSVARLKELEAAETDGTFDKLVKHEVLGLRREREKLDASLGGIKEMNRLPDAIFVIDIGHEDIAIKEAKKLGIPVIAVVDTNYDPALVDYAIPGNDDAIRAVQLYARAAADAVLEGKAAAPNSASVREEEFSADAADEGKGRRAPAKKGDKKADAAE

SEQ ID NO: 31010 - DNA, 828 bp, Xanthomonas campestris pv
  CDS (1)..(828): transl_table=11
atgcctcaggtcaccatgcgtcagatgctggaagccggcgtccatttcggccaccagacccgctactggaaccccaagttggcgccgtacatcttcggcgcgcgcggcaagatccacatcatcaacctcgagaagaccgttccgctcttcaatgacgcgatgaacttcctctcctcgatcgcgcagaagcgcggcaccgtgctgttcctgggcaccaagcgcagcgcgcgcgagtccatcaaggaagaagccgagcgctgcaacatgccgttcatgacccagcgctggctgggcggcacgctgaccaacttccgcaccgtgaagcagtcggttgcccgcctgaaggaactggaagccgctgaaaccgacggcaccttcgaaaagctggtcaagcacgaagtgctgggcctgcgtcgcgagcgcgagaagctggacgcgtcgctgggcggcatcaaggaaatgaaccgtctgcccgacgcgatcttcgtgatcgatatcggccatgaagacatcgccatcaaggaagccaagaagctcggcatcccggtgatcgccgtggtcgataccaactacgatccggccctggtcgattacgccatcccgggcaacgacgacgccatccgcgccgtgcagctgtacgcacgcgccgctgccgacgccgtgctggaaggcaaggctgctgcgccgaattcggcgtcggttcgcgaagaagagttctcggctgaagccggcgacgaaggcaagggccgtcgcgctccggccaagaaggccaccgagaagaaggccgacgcaccggccgctgcacctgaggcaccggctgccgagtaa

SEQ ID NO: 31011 - protein, 275 aa, Xanthomonas campestris pv
MPQVTMRQMLEAGVHFGHQTRYWNPKLAPYIFGARGKIHIINLEKTVPLFNDAMNFLSSIAQKRGTVLFLGTKRSARESIKEEAERCNMPFMTQRWLGGTLTNFRTVKQSVARLKELEAAETDGTFEKLVKHEVLGLRREREKLDASLGGIKEMNRLPDAIFVIDIGHEDIAIKEAKKLGIPVIAVVDTNYDPALVDYAIPGNDDAIRAVQLYARAAADAVLEGKAAAPNSASVREEEFSAEAGDEGKGRRAPAKKATEKKADAPAAAPEAPAAE

SEQ ID NO: 31012 - DNA, 801 bp, Xylella fastidiosa
  CDS (1)..(801): transl_table=11
atgcctcaagtgacgatgcgtcagatgttggaagctggggtccattttggccaccagacccgttaccgtcatcccaagatgtcacctaacatcttcggtgcccgcggtaaaattcacatcatcaatctcgaaaaaaccgttcctctgttcaacgatgcgatgaacttcctttccgcagttgcacagaagcgcggaagcgttctgtttgtggggaccaagcgcagtgcgcgggatgcgatcaaggaagaggccgaacgttgtgggatgccctacatgatccagcgttggctcggtggcacgttgactaacttccgtacggtgaagcaatcggttgcccgtctgaaggagctcgagctagccgagacagacggcactttcagcaagctggtgaagcacgaagtgctgagactgcgccgtgagtccggtaaattgcaggcttcgctgggtggtattaaggatatgaaccgtattcctgatgcaatcttcgtgatcgatattggtcatgaggatattgcaatcaaggaggctaagaagctcggcattccagttgtggcagtggtggataccaattacgatccttcacttgtggattacccgattcctggcaatgacgatgctatccgtgccgtacagctctatgcgcgtgccgctgccgatgctgttttggaaggtaaggcggcgatgccaaatgctgctgctgtgcgcgaggaagagtttgcttctgccccagatgcgggcaagaagggccgtcaagctcagcccaagaagggtaaaagggctagcgacgctgcggctgagtaa

SEQ ID NO: 31013 - protein, 266 aa, Xylella fastidiosa
MPQVTMRQMLEAGVHFGHQTRYRHPKMSPNIFGARGKIHIINLEKTVPLFNDAMNFLSAVAQKRGSVLFVGTKRSARDAIKEEAERCGMPYMIQRWLGGTLTNFRTVKQSVARLKELELAETDGTFSKLVKHEVLRLRRESGKLQASLGGIKDMNRIPDAIFVIDIGHEDIAIKEAKKLGIPVVAVVDTNYDPSLVDYPIPGNDDAIRAVQLYARAAADAVLEGKAAMPNAAAVREEEFASAPDAGKKGRQAQPKKGKRASDAAAE

SEQ ID NO: 31014 - DNA, 726 bp, Yersinia pestis
  CDS (1)..(726): transl_table=11
atggcaactgtttccatgcgcgacatgctccaggctggtgttcactttggtcaccaaacccgttactggaacccgaaaatgaagcctttcatcttcggcgcacgtaacaaagttcacatcatcaacctggaaaaaactgtaccaatgttcaacgaagctctggctgagttgactaaaatttcttcccgtaaaggtaagatcctgtttgttggtactaaacgcgcagcaagcgaagcggtaaaagaagctgctaacaactgcgaccagttcttcgtgaaccatcgctggttgggcgggatgctgactaactggaaaactgttcgtcagtccatcaaacgtttgaaagatttggaaatccagtctcaagacggcacctttgataagctgaccaaaaaagaagcgctgatgcgtacccgtgaactgaacaagctggaaaacagcctgggtggtatcaaagacatgggcggcttaccagacgcactgtttgttgttgatgctgatcacgaacacatcgctatcaaagaagctaataacctgggtatcccggtattctctatcgttgatactaactccgatccagatggcgttgacttcatcatccctggtaacgatgacgcaatccgtgcagttaaactgtacctaggcgctgttgctaccgccgtccgtgaaggtcgttctcaagatctggccgttcaggcggaagaaagcttcgtagaagctgaataa

SEQ ID NO: 31015 - protein, 241 aa, Yersinia pestis
MATVSMRDMLQAGVHFGHQTRYWNPKMKPFIFGARNKVHIINLEKTVPMFNEALAELTKISSRKGKILFVGTKRAASEAVKEAANNCDQFFVNHRWLGGMLTNWKTVRQSIKRLKDLEIQSQDGTFDKLTKKEALMRTRELNKLENSLGGIKDMGGLPDALFVVDADHEHIAIKEANNLGIPVFSIVDTNSDPDGVDFIIPGNDDAIRAVKLYLGAVATAVREGRSQDLAVQAEESFVEAE

SEQ ID NO: 31016 - DNA, 753 bp, Zymomonas mobilis
  CDS (1)..(753): transl_table=11
atggcggtacctaccgttactatgcagtcattgttggatgttggcgcccattttggtcaccagacccatcgttggaacccgaaaatgaaaccttatattttcggtgatcgcaacggcatccatatcatggatctgtctcagactgtgcctttgttcacccgcgcccttgacttcatcagccagacggtcgctcacggtggtaaagttttatttgtaggcaccaagcgtcaggctcaggaaccgattgctgacgcagctcgtcgttctggccagttctttgtcaaccaccgttggttgggtggtatgttgaccaattggcgcacgatttctggttccatcaaacgtttgaagagcctcgaagaaaagctgtccggtgataccgctggtttcaccaagaaagaaattcttcagctgacccgggaacgcgacaagctcgaactgtctttgggcggtattcgcgatatgggcaccatccccgacatcatgtttgtcgttgatgccaataaagaagaattggctatcaaagaagccaacacgctgggtatcccggttgttgctatcctcgattccaacgtcagccccgatggtattgctttcccgattccggccaatgatgatgcagcccgcgctgtccgttattattgcgatgcgattgctgaagcggctacccgtggcgatcagcagaaccgtcaggaactgggcgaagatctgggcgcagctgtagaaccagcggctgaagaagctttagcttaa

SEQ ID NO: 31017 - protein, 250 aa, Zymomonas mobilis
MAVPTVTMQSLLDVGAHFGHQTHRWNPKMKPYIFGDRNGIHIMDLSQTVPLFTRALDFISQTVAHGGKVLFVGTKRQAQEPIADAARRSGQFFVNHRWLGGMLTNWRTISGSIKRLKSLEEKLSGDTAGFTKKEILQLTRERDKLELSLGGIRDMGTIPDIMFVVDANKEELAIKEANTLGIPVVAILDSNVSPDGIAFPIPANDDAARAVRYYCDAIAEAATRGDQQNRQELGEDLGAAVEPAAEEALA

SEQ ID NO: 31018 - DNA, 1185 bp, Saccharomyces cerevisiae
  CDS (1)..(1185)
atgcagagacacgtttttgcgaggaatttcagacgtctttccttattgaggaacccttcccttaccaaaaggtttcagtcgtcagcatccggtgcggccaacacccctaacaataacgatgaggtgatgctgttgcaacagaaacttttgtatgatgaaattagatcagaattgaagtctctatctcaggtaccagaagatgaaatattacctgagttgaaaaagtcattagagcaagacaaactctctgacaaagaacagcagctggaggctgaattgagtgactttttcagaaattatgctctgttgaacaagttgtttgacagcaagacattagatggacaatcttctacaacgacagcagcagccacgccaaccaagccttaccctaaccttataccttcggccaatgacaaaccatattcctctcaagaacttttcttgcgtcaactaaaccattccatgcgtaccgctaaattgggtgccactatttcgaaggtttactatcctcataaggacattttctatccgcccctcccagaaaacattactgttgagagcttaatgtctgctggtgttcacttgggccagtctacctcactttggaggtcttccacacaatcctacatatacggtgaatataaaggtattcacataatagatctaaaccaaactttgtcctatttgaagagagccgccaaggtagtagagggcgtttcggaatccggtggcattatcctatttctgggtacaagacaaggccagaaaagagggctcgaggaagctgctaagaagacacatggttattatgtgtctaccagatggatcccgggtactttgacgaattctacagaaatttcaggtatctgggagaagcaggaaatcgactctaatgacaatcccaccgaaagagcgttatcaccgaatgaaacatcaaagcaggttaagcctgacttgctggtcgtattaaatcccacagaaaatagaaacgctttgttagaagcaattaaatcaagggtcccaactatcgcaatcatcgatactgactccgaaccttctttggtgacctaccctatcccaggtaacgatgattcattgagatctgtcaatttcttactaggagtcttggcgagagctggccaaagaggcttgcaaaatcgcttggccagaaataacgaaaaatga

SEQ ID NO: 31019 - protein, 394 aa, Saccharomyces cerevisiae [sequence omitted]

SEQ ID NO: 31020 - DNA, 20 bp, Artificial sequence
  primer
atggggctggacttcagggc

SEQ ID NO: 31021 - DNA, 20 bp, Artificial sequence
  primer
tcagccttccgcggcctcgg

SEQ ID NO: 31022 - protein, 227 aa, Artificial sequence
  consensus sequence
  Variant (8)..(8): Xaa in position 8 is any amino acid
  Variant (10)..(11): Xaa in position 10 to 11 is any amino acid
  Variant (15)..(15): Xaa in position 15 is any amino acid
  Variant (17)..(19): Xaa in position 17 to 19 is any amino acid
  Variant (21)..(26): Xaa in position 21 to 26 is any amino acid
  Variant (27)..(28): Xaa in position 27 to 28 is any or no amino acid
  Variant (30)..(30): Xaa in position 30 is any amino acid
  Variant (32)..(33): Xaa in position 32 to 33 is any amino acid
  Variant (35)..(36): Xaa in position 35 to 36 is any amino acid
  Variant (38)..(43): Xaa in position 38 to 43 is any amino acid
  Variant (45)..(58): Xaa in position 45 to 58 is any amino acid
  Variant (60)..(60): Xaa in position 60 is any amino acid
  Variant (65)..(66): Xaa in position 65 to 66 is any amino acid
  Variant (67)..(69): Xaa in position 67 to 69 is any or no amino acid
  Variant (71)..(77): Xaa in position 71 to 77 is any amino acid
  Variant (79)..(85): Xaa in position 79 to 85 is any amino acid
  Variant (86)..(91): Xaa in position 86 to 91 is any or no amino acid
  Variant (93)..(95): Xaa in position 93 to 95 is any amino acid
  Variant (100)..(100): Xaa in position 100 is any amino acid
  Variant (104)..(105): Xaa in position 104 to 105 is any amino acid
  Variant (107)..(114): Xaa in position 107 to 114 is any amino acid
  Variant (115)..(132): Xaa in position 115 to 132 is any or no amino acid
  Variant (134)..(139): Xaa in position 134 to 139 is any amino acid
  Variant (140)..(145): Xaa in position 140 to 145 is any or no amino acid
  Variant (147)..(147): Xaa in position 147 is any amino acid
  Variant (148)..(149): Xaa in position 148 to 149 is any or no amino acid
  Variant (154)..(155): Xaa in position 154 to 155 is any amino acid
  Variant (157)..(159): Xaa in position 157 to 159 is any amino acid
  Variant (160)..(160): Xaa in position 160 is any or no amino acid
  Variant (163)..(167): Xaa in position 163 to 167 is any amino acid
  Variant (169)..(171): Xaa in position 169 to 171 is any amino acid
  Variant (173)..(174): Xaa in position 173 to 174 is any amino acid
  Variant (176)..(177): Xaa in position 176 to 177 is any amino acid
  Variant (179)..(181): Xaa in position 179 to 181 is any amino acid
  Variant (183)..(183): Xaa in position 183 is any amino acid
  Variant (186)..(190): Xaa in position 186 to 190 is any amino acid
  Variant (194)..(195): Xaa in position 194 to 195 is any amino acid
  Variant (197)..(199): Xaa in position 197 to 199 is any amino acid
  Variant (201)..(202): Xaa in position 201 to 202 is any amino acid
  Variant (205)..(205): Xaa in position 205 is any amino acid
  Variant (210)..(214): Xaa in position 210 to 214 is any amino acid
  Variant (216)..(222): Xaa in position 216 to 222 is any amino acid
  Variant (224)..(226): Xaa in position 224 to 226 is any amino acid
AGVHFGHXTXXWNPXMXXXIXXXXXXXXIXIXXLXXTXXXXXXAXXXXXXXXXXXXXXLXVGTKXXXXXAXXXXXXXAXXXXXXXXXXXXXVXXXWLGGXLTNXXTXXXXXXXXXXXXXXXXXXXXXXXXXXKXXXXXXXXXXXXLXXXLGGIXXMXXXXPDXXXXXDXXXEXXAXXEXXXLXIPXXXXXDTNXXPXXXDXXIPXNDDAXXXXXLXXXXXXXAXXXG

SEQ ID NO: 31023 - protein, 29 aa, Artificial sequence
  protein pattern
  Variant (2)..(2): Xaa in position 2 is any amino acid
  Variant (7)..(7): Xaa in position 7 is any amino acid
  Variant (9)..(9): Xaa in position 9 is any or no amino acid
  Variant (11)..(11): Xaa in position 11 is any or no amino acid
  Variant (13)..(13): Xaa in position 13 is Asp, Asn or Ser
  Variant (15)..(15): Xaa in position 15 is any amino acid
  Variant (17)..(18): Xaa in position 17 to 18 is any amino acid
  Variant (19)..(19): Xaa in position 19 is Phe, His or Tyr
  Variant (20)..(20): Xaa in position 20 is Ile, Leu or Val
  Variant (21)..(27): Xaa in position 21 to 27 is any amino acid
  Variant (28)..(28): Xaa in position 28 is His or Tyr
  Variant (29)..(29): Xaa in position 29 is Ile, Leu or Val
GXHFGHXTXRXWXPXMXXXXXXXXXXXXX

SEQ ID NO: 31024 - protein, 27 aa, Artificial sequence
  protein pattern
  Variant (2)..(8): Xaa in position 2 to 8 is any or no amino acid
  Variant (13)..(13): Xaa in position 13 is any amino acid
  Variant (17)..(17): Xaa in position 17 is Phe, Trp or Tyr
  Variant (18)..(18): Xaa in position 18 is any amino acid
  Variant (20)..(22): Xaa in position 20 to 22 is any amino acid
  Variant (23)..(23): Xaa in position 23 is Arg or Ser
  Variant (24)..(24): Xaa in position 24 is Ile, Leu or Val
  Variant (25)..(26): Xaa in position 25 to 26 is any amino acid
  Variant (27)..(27): Xaa in position 27 is Phe, Ile, Leu or Met
RXXXXXXXWLGGXLTNXXTXXXXXXXX

SEQ ID NO: 31025 - protein, 18 aa, Artificial sequence
  protein pattern
  Variant (2)..(3): Xaa in position 2 to 3 is any or no amino acid
  Variant (8)..(9): Xaa in position 8 to 9 is any amino acid
  Variant (11)..(13): Xaa in position 11 to 13 is any amino acid
  Variant (14)..(14): Xaa in position 14 is Ile or Val
  Variant (15)..(17): Xaa in position 15 to 17 is any amino acid
FXXVGTKXXAXXXXXXXA

SEQ ID NO: 31026 - DNA, 1632 bp, Azotobacter vinelandii
  CDS (1)..(1632): transl_table=11
atgacgcgctacatcttcgtcacgggcggtgttgtttcttcattggggaaaggcattgcatcggcatccttggcggccatcctggaggcgcggggactgaaggtcaccctgctcaaactggatccctacatcaacgtcgatccgggcaccatgagccccttccagcatggcgaagtgttcgtcacccacgacggggccgagaccgatctcgacctggggcactacgagcgcttcgtgcgcaccaccatgacccgcaacaacaacttcaccaccggccgcgtctacgaggacgtgctgcgccgcgagcgccgcggcgactacctgggcgctaccatccaggtcattccgcacatcaccgacgagatcaagcggcgcatcatcaagggtgccggcaacgccgacgtggccatggtggagatcggcggtaccgtcggcgacatcgaatcccagccgttcctcgaggcgatccgccagttgcgcctggaagtcggcgccaagcgcgcgatgctgatccacctgaccctggtgccctacatcgccaccgccggcgagaccaagaccaagccgacccagcactcggtgaaggaactgcgctcgatcggcctgcagcccgacgtgctgatctgccgttccgaccatccgatcgacatttcctcgcggcgcaagatcgccctcttcaccaacgtggaggagcgcgcggtgatcgccttggaggacgtcgacaccatctacaagattccttcggtgctgcatgcccagggtctcgacgatatcgtcgtcgagcgcttcggcctggcgtgcgggagcgccgacctttccgaatgggagcgcgtggtcgacgccaagctgcatccggagaaggaagtcaccatcgccatggtcggcaagtacatggagctgctggatgcctacaagtcgttgatcgaggccatggggcacgccggcatccagaaccgcacccgcgtcaatctgcgctacatcgactcggaagacatcgagaaccagggcaccgcgctgctggagggcgccgatgccatcctggtgccgggcggcttcggcctgcgcggagtggagggcaagatcgccgcggtcaggtatgcccgcgagaacaaggtcccttacctgggcatctgtctcggcatgcaggtggcggtgatcgagtatgcccgcgacgtgctgggctgggcggacgccaactccaccgagttcgacaagtcctgcggccatccggtggtcggcctgatcaccgagtggcaggacgccaccggtgccaccgaggtacgcagcgagtcttccgacctgggcggcaccatgcgcctcggggctcaggagtgccagttggaggcgaactcgcaagtgcgccagtgctacggcaaggacgaggtcgtcgagcgccaccgccatcgctacgaggtcaacaacaacctgctgccgcacctgatcgaggccggcctcaaggtcaccggccgttccggcgacggcgccctggtggaagtgatcgaggtggccgaccatccctggttcgtcgcctgccagttccacccggagttcacctccaccccgcgcgacggccatccgctgttcagcggtttcgtcaacgctgcgctcgcgcagaaagcccggaaggcctga

SEQ ID NO: 31027 - protein, 543 aa, Azotobacter vinelandii
MTRYIFVTGGVVSSLGKGIASASLAAILEARGLKVTLLKLDPYINVDPGTMSPFQHGEVFVTHDGAETDLDLGHYERFVRTTMTRNNNFTTGRVYEDVLRRERRGDYLGATIQVIPHITDEIKRRIIKGAGNADVAMVEIGGTVGDIESQPFLEAIRQLRLEVGAKRAMLIHLTLVPYIATAGETKTKPTQHSVKELRSIGLQPDVLICRSDHPIDISSRRKIALFTNVEERAVIALEDVDTIYKIPSVLHAQGLDDIVVERFGLACGSADLSEWERVVDAKLHPEKEVTIAMVGKYMELLDAYKSLIEAMGHAGIQNRTRVNLRYIDSEDIENQGTALLEGADAILVPGGFGLRGVEGKIAAVRYARENKVPYLGICLGMQVAVIEYARDVLGWADANSTEFDKSCGHPVVGLITEWQDATGATEVRSESSDLGGTMRLGAQECQLEANSQVRQCYGKDEVVERHRHRYEVNNNLLPHLIEAGLKVTGRSGDGALVEVIEVADHPWFVACQFHPEFTSTPRDGHPLFSGFVNAALAQKARKA

SEQ ID NO: 31028 - DNA, 2719 bp, Zea mays
  CDS (389)..(2200)
gaagacccatgaagctattctgaaagttttagatcttcagtagtacgtacttttgcatgatcacatcaattgttcatgttgtagtttgatcattcaaggagcactgctcatgagttcacttttattactgctacgtatgcagtgatggaaaagtacctcgggaacctttagggatgtggactaaaagagccaccaagttgccggccggcccgggaagcctaaactcttgccctccccccggcaccacactagcctagtgagaagtgcagcagcagcaccagcggcagaagtgttacttagttgctcctcctacctgtgctgctgcgcaggagcagagcctgaaaggacgacggccgtcggcgtaaggggagcgagcgagcgagcggccatgaagtacgtgctggtgaccggaggggtggtgagcgggctcggcaagggcgtgacggccagcagcatcggcgtcgtgctcaaggcctgcggcctccgcgtcaccaccatcaagatcgatccatacctcaacaccgatgctggaaccatgtcgccgttcgagcacggggaggttttcgttttggacgatggcggagaggtggacttggaccttggaaactacgaacgttttctggacatcaaattgacccgcgacaacaatataaccacgggaaagatcttccaggctgtcattaacaaggagaggagaggcgactacctagggaagaccgtccaggtagtgccgcacatcacggatgagatacaggactggatcgaacgcgtcgcggtggtcccagtggacggcaaggaagggcctcctgacgtctgcgtcatcgagctcgggggcactataggggatatcgagtcaatgcctttcattgaagcgttaggtcaattctcgtaccgtgttggacctggaaacttctgtctcgttcatgtcagtcttgttccggttctaaatgtagtcggtgaacagaaaactaagcctacacagcacagtgttcgagggcttagagggcttgggttagcgccggatgttttagcatgtcgcagtactgagccactggaggaacatgtgaagatcaagctttcacaattttgtcatgttccgatctcaaatatagtgaacctccatgacgtgacaaacatttggcacatccccttgctgctaagggaccagaaggcccatgaagcgattctgaaggttttagatcttcagtatgatggaaaggtgcctcgggaacctgagctagggatgtggactaaaagagccaccaagtttgacaagttgaagactccggtcaagattgccatggttggaaaatacactggcctgtcggattcctacctgtctgtcataaaggctcttttgcatgcatcggttgctatggaaagaaaacttgtagtcgagtgggttccttcctgcgacctggaagattcttcagctaaagagacccctgaagcccataaaaaagcatggaaattgctgaagggcgcagatggcgtactcgtccctggagggtttggggacaggggagtccagggcaaaatcctcgccgcgaaatacgcacgcgagaacaacgttccttatcttggcatctgcctgggaatgcaaatcgcggtgatcgagtttgcccgctcggtgatgaagctacgaggtgccaatagcacggagttcgatccagctacgacgtcaccctgtgtcatcttcatgccagagggctcaaaaacccaaatgggagccacgatgaggcttgggtcgaggaggacctatttccatgtcagtggctgcaaatctgcgaagctgtacggcaacgccagctctgtagatgaaagacatcgccacagatacgaggtgaaccctgacatggtcccagactttgagaaggccgggcttcagttcgtgggcaaagatgagagtgggaaacgcatggggatcgttgagcttccctctcacaagttcttcatcggtgcacagttccatcctgaattcaagtcgagaccagggaagccatctccgcttttcttagggctgatagccgcggcgtctgggcagctagaaccattgcttcagcgcagcaacccgacaacgaaagcatgttcgatcagtaaagtcccgaaactgaaactgtaccccactgggcctgtgaataatccactgaacagcttggtgaacgggtactacccaaatggcactgggatccacacctagaagcgtagcgcttagcgatggtttggttggtatttgctgctatggtttttttgcttgtacccctcctttttcatgtgttcctttttttcagtttgttatttgtctctgatcaactgagagaagagaaggctaagattcagcaagcccccagctccagcgacacatggttccgacatttttaacgaggaacgccttccagtccgttgaagcgagctagccatagggtggtgaggtctagtgtgatgttgttgttgtttttttctctttccttttttttttggcctggaactaaggcgcgaagtgttttgagtagcgctagtagagcctggaagaagttatctaaactatttgtacattatggaagaacttatctaaggactgaatacacaaatgcttggccatgattgctttaataccacacccctagaaaaaggacgatagtttccatgcatcatcagtaactaaaaaaacaaaaaaaaaaaaaaaaaaaaaaagcactctcgcgttgttaccactgct

SEQ ID NO: 31029 - protein, 603 aa, Zea mays
MKYVLVTGGVVSGLGKGVTASSIGVVLKACGLRVTTIKIDPYLNTDAGTMSPFEHGEVFVLDDGGEVDLDLGNYERFLDIKLTRDNNITTGKIFQAVINKERRGDYLGKTVQVVPHITDEIQDWIERVAVVPVDGKEGPPDVCVIELGGTIGDIESMPFIEALGQFSYRVGPGNFCLVHVSLVPVLNVVGEQKTKPTQHSVRGLRGLGLAPDVLACRSTEPLEEHVKIKLSQFCHVPISNIVNLHDVTNIWHIPLLLRDQKAHEAILKVLDLQYDGKVPREPELGMWTKRATKFDKLKTPVKIAMVGKYTGLSDSYLSVIKALLHASVAMERKLVVEWVPSCDLEDSSAKETPEAHKKAWKLLKGADGVLVPGGFGDRGVQGKILAAKYARENNVPYLGICLGMQIAVIEFARSVMKLRGANSTEFDPATTSPCVIFMPEGSKTQMGATMRLGSRRTYFHVSGCKSAKLYGNASSVDERHRHRYEVNPDMVPDFEKAGLQFVGKDESGKRMGIVELPSHKFFIGAQFHPEFKSRPGKPSPLFLGLIAAASGQLEPLLQRSNPTTKACSISKVPKLKLYPTGPVNNPLNSLVNGYYPNGTGIHT

SEQ ID NO: 31030 - DNA, 2770 bp, Zea mays
  CDS (471)..(2300)
aacctcccttgctttgactggcggctatcccctaatctaaaaaaatgaaatacaaccaactctcccattcggccatttgcccatttcccatctcgccttcgcttcccacgcccctccgtcccgcctcgccgcggtaaggcaccgccgccaaccgccctcgtccctcttcgactcgaccgcgtgagtgagacgaccgcgcgcgcccctcgcccgcccgccaggaggagatcgacccccgaacgcattgggcacctcgggcccggccgggaaccaaccctccttggctggactggacccccaacccaacaacagcagcaggaacaggaaaaagaaaaaactctctcccattcccatctcgcctcccacctcctccgcctcgccgccgcggcaggcaccgccaccaatcttctcttccgccccctcgttcgttcgctcgctcgctcgccaggagatcgactcgaggcgaggccatgaagtacgtgctggtgaccggcggcgtggtgagcgggctcgggaagggcgtgacggccagcagcatcggcgtcgtgctcaaggcctgcggcctccgcgtcacgtctatcaagatcgatccatacctcaacaccgatgccggaaccatgtccccattcgagcacggcgaagtgtttgttttggacgatggtggtgaggtggacttggaccttggaaactatgagagatttctggacatcaagttgactcgtgacaacaacataaccacggggaagatataccagtctgttattgacaaggaacgtagaggagattacctaggaaaaactgttcaggtcgtgccacacatcacagatgaaatacaagattggattcaacgtgtggcaatgaatccagttgatgacaccgaagagccagctgatgtttgtgtcatagaacttggtgggactataggggacattgaatcaatgcctttcatagaagcactaggccaattttcataccgtgtagggcctggaaacttttgcttggtgcatgttagtcttgtaccagttctaaatgtagttggtgagcagaaaacaaagcccacccaacatagtgttcgcggacttcgaggacttggactcatgcctgatattttggcatgtcgcagtacacagccacttgaagaacacgtgaaagtgaagctcgcacaattttgtcatgtcccgatatcaaatatcattaatctccatgatgtcaccaacatttggcacattcctttgttgctcagagatcagaaggcccatgaagctattttgaaggtgttagaccttcagtgcgcgagtaaagttgctcgagaaccccaattgtctgaatggactgaaagagtcagcagatgtgacagattgaaatctccggttaggattgcaatggttggaaagtatactggcctgtcagactcctacctatctgttataaaggctcttttgcatgcgtcggttgctttggacaggaaacttgtggtggactgggttccttcctgtgatcttgaagattctacagcaaaagagactcctgacgcctatgaaaaggcatgggagtcgttgaagggtgcagatggtgtgttggtgccaggaggttttggagacagaggagtccaagggaaaattctggctgcaaaatacgcgcgagaaaacaacgttccatatcttggcatttgcttgggcatgcaaattgcagtgattgagtttgcacgctctgtcatgaagttgcacggtgcaaacagcacagagttcgatccaaccacaaaaacaccatgtgttattttcatgccagaggggtccaaaactcatatgggagcaacaatgcgccttggttcaaggaggacctttttccaggtcactaactgcaaatctgctaaactgtacggcaatgcttgctacgttgatgaaagacaccgccacagatacgaggtgaatcctgacatggtcccagaatttgagaaggcagggctttctttcgttggcagggatgagagtggcgaacgcatggagattatcgaactaccaactcataggtttttcgtcggagcacagtttcaccctgaattcaagtcaaggcccggcaagccatctccgcttttcttaggattggtagcagcgtcatcaggccagcttgaccacttgctccaacgtggccttaccagttcagcaggcagagacatctgcggcaaagggggagcgcagaaaccaaaagcttgccagaacgggcatgtcatgaagccactgaatggcctggtgcacgggcactattcagcgactcgctgcaatggcgtcattcccatctagcagggctgttttcgcttgttctttttctttccgttctacctacctgcagggcaaccaggaagagaagggctgtttgctctagcgacacggcagccgtttccgatgttttaacgaggaagcaattggcatgcaaagctgtcgcgcgcattaagaggcaaatctagcagcttattagctagggttcgattagtagtagtagtaatccgatgttgctggtttatttgttagtttgtttgctaagaaagattacaagggttagtgatgtgcagctagctccagtgtagcctgccgtctcgccccatttgtacattgtaaaaccactgctactctccatgattgactgaatggatgagtataaacgtattggaccaacatgctcggtgttataaaaatctaagttgcaaaacaaaaaaaaaaaaaaaaaaaaaaaaaaaaaaaaaaaaaaaaactcgagggggggcgccggtacc

SEQ ID NO: 31031 - protein, 609 aa, Zea mays
MKYVLVTGGVVSGLGKGVTASSIGVVLKACGLRVTSIKIDPYLNTDAGTMSPFEHGEVFVLDDGGEVDLDLGNYERFLDIKLTRDNNITTGKIYQSVIDKERRGDYLGKTVQVVPHITDEIQDWIQRVAMNPVDDTEEPADVCVIELGGTIGDIESMPFIEALGQFSYRVGPGNFCLVHVSLVPVLNVVGEQKTKPTQHSVRGLRGLGLMPDILACRSTQPLEEHVKVKLAQFCHVPISNIINLHDVTNIWHIPLLLRDQKAHEAILKVLDLQCASKVAREPQLSEWTERVSRCDRLKSPVRIAMVGKYTGLSDSYLSVIKALLHASVALDRKLVVDWVPSCDLEDSTAKETPDAYEKAWESLKGADGVLVPGGFGDRGVQGKILAAKYARENNVPYLGICLGMQIAVIEFARSVMKLHGANSTEFDPTTKTPCVIFMPEGSKTHMGATMRLGSRRTFFQVTNCKSAKLYGNACYVDERHRHRYEVNPDMVPEFEKAGLSFVGRDESGERMEIIELPTHRFFVGAQFHPEFKSRPGKPSPLFLGLVAASSGQLDHLLQRGLTSSAGRDICGKGGAQKPKACQNGHVMKPLNGLVHGHYSATRCNGVIPI

SEQ ID NO: 31032 - DNA, 1638 bp, Klebsiella pneumoniae subsp. pneumoniae MGH 78578
  CDS (1)..(1638): transl_table=11
atgacaacgaactatatttttgtgaccggcggggtcgtatcctctctgggtaaaggcattgccgcagcctccctggcagccattcttgaagcccgtggtctcaacgtgaccatcatgaaactggatccgtatatcaacgtcgatccgggcaccatgagcccaatccagcatggggaagtgttcgttactgaagacggcgcagaaaccgatctggacctgggccactatgagcgttttatccgcaccaagatgacgcgccgcaataacttcaccaccggccgtatctactccgacgtgctgcgcaaagagcgccgtggcgactacctgggcgcgaccgttcaggttatcccgcacatcaccaacgctatcaaagagcgcgtactggcgggcggcgaaggccatgacgtcgtgctggtggaaatcggcggtaccgtaggcgatatcgaatccctgccgttcctcgaagcgattcgtcagatggcggtagagatcggccgcgagcataccctgttcatgcacctgactctggtgccgtacatggccgccgcgggcgaagtcaaaaccaagccgacccagcactccgtaaaagagctgctctccatcggtattcagcctgatattctgatctgccgctccgatcgcgcggttccggccaacgaacgagccaaaattgctttgttctgtaacgttccggaaaaggctgtgatttctctgaaagacgtcgattccatttataaaattccgggcctgttgaaatctcaggggctggacgattatatttgtaaacgattcagcttaacttgtccggaagcaaacctggccgaatgggaacaggtaatctatgaagaagctaatccggcaggcgaagtcaccatcggtatggtcggtaagtacattgaactgccggatgcctacaagtcggtgattgaagcgctgaaacacggcggtctgaaaaatcgcgttaccgtcaacatcaagctgatcgattcgcaggatgtggaaacgcgcggcgtcgaaatcctcaaggatttagacgctatcctgatcccgggcggcttcggctaccgcggcgttgaaggcaagatcgccaccgcgcgctatgcgcgtgaaaacaatattccttatctgggcatctgcctgggtatgcaggttgcgctgattgagttcgcgcgtaacgtagcgggtatggaaaacgccaactcgacggaatttgtgccagactgtaaatacccggtcgtggccctgattaccgaatggcgtgacgaagatggcaacgttgaagtccgctctgagaagagcgatctgggcggcaccatgcgcctgggcgcgcagcagtgccagctgagtgatgattctctggtacgccagctttacggcgagccgaccatcaccgagcgtcatcgtcaccgctacgaagtcaacaacatgttgttgaaaccgattgaagctgctggtctgcgcgttgcgggccgttccggggatgatcagttggtcgagatcatcgaagtgccgaaccatccgtggtttgtggcctgccagttccacccggagtttacttcgacgccgcgtgatggacacccgctgtttgccggctttgtgaaagccgcgagcgagtaccagaaacgccaggcgaagtaa

SEQ ID NO: 31033 - protein, 545 aa, Klebsiella pneumoniae subsp. pneumoniae MGH 78578
MTTNYIFVTGGVVSSLGKGIAAASLAAILEARGLNVTIMKLDPYINVDPGTMSPIQHGEVFVTEDGAETDLDLGHYERFIRTKMTRRNNFTTGRIYSDVLRKERRGDYLGATVQVIPHITNAIKERVLAGGEGHDVVLVEIGGTVGDIESLPFLEAIRQMAVEIGREHTLFMHLTLVPYMAAAGEVKTKPTQHSVKELLSIGIQPDILICRSDRAVPANERAKIALFCNVPEKAVISLKDVDSIYKIPGLLKSQGLDDYICKRFSLTCPEANLAEWEQVIYEEANPAGEVTIGMVGKYIELPDAYKSVIEALKHGGLKNRVTVNIKLIDSQDVETRGVEILKDLDAILIPGGFGYRGVEGKIATARYARENNIPYLGICLGMQVALIEFARNVAGMENANSTEFVPDCKYPVVALITEWRDEDGNVEVRSEKSDLGGTMRLGAQQCQLSDDSLVRQLYGEPTITERHRHRYEVNNMLLKPIEAAGLRVAGRSGDDQLVEIIEVPNHPWFVACQFHPEFTSTPRDGHPLFAGFVKAASEYQKRQAK

SEQ ID NO: 31034 - DNA, 1629 bp, Xanthobacter autotrophicus Py2
  CDS (1)..(1629): transl_table=11
atggcgcgctatatcttcatcaccggcggcgtcgtgtcttccctgggcaagggcctcgccgccgcggctctcggcgcgcttctccaggcgcgcggctataccgtccggctgcgcaagctggacccctacctcaacgtcgatccgggcaccatgagcccgtaccagcacggcgaggtgttcgtgactgacgacggggccgagaccgatctcgacctcggccattacgagcgcttcaccggtcatccggcgacgaagcaggacaacatcaccaccggccgcatctatcaggacatcctgaccaaggagcgccgcggcgactatctcggcgccaccatccaggtcatcccccacgtcaccaatgcgatcaaggacttcgtcctggaaggcaacgagggcttcgacttcgtgctgatcgaggtgggcggcacggtgggcgacatcgagggcctgcccttcttcgaagccacccgccagctgaagaacgagctgccgcgcggccacgccatcttcatccacctcaccttgatgccctatatcccgtccgcgggcgaactaaagaccaagccgacccagcattcggtgaaggagttgcgctccatcggcatccagcccgacatcctgctctgccgcacggatcgcgagattccgcgcgaggagcggcgcaagctctcgctgttctgcaacgtgcgcgagacggcggtgatcgaggcgcgggacgtggacaacatctatgccgtcccctccgcctaccacgcggaaggcctcgacaaggaagtgctggccgccttcaacatcgagccggcaccggcgcccaacctcaagcgctggaccgacatcgaggggcgcgtgcgcaacccggagggcgaggtcaccatcgccatcgtgggcaaatataccggcctgaaggacgcctataagtcgctgatcgaggcgcttgcccatggcggcatcgcccacaaggtgaaggtcaatctcgactggatcgagagcgagaccttcgagcgcgaggaccccgcgccgttcctggagcacgtgcacggcatcctggtgcccggcggcttcggccagcgtggcgcggaaggcaagatccgcgcggcccgcttcgcccgcgagcgcaaggtgccctatctcggcatctgcttcggcatgcagatggcggtgatcgaggcggcgcgcaaccttgcgggcatccctgacgccaattccacggagttcggacccaccagcgagccggtggtgggcctgctcaccgaatggctgaagggcaacgagctggagcgccgcagcgctgccggggatctgggcggcaccatgcgcctcggcgcctatgccgcgcatctggagcccggcagccgggtggaggcggtctatggcgggcgcgacatcttcgagcgccaccgccaccgctatgaggtgaataccgcctatcgccaacgccttgagcagcatggcctgcgcttctccggcatgtcgccggacggcctcctgccggagatcgtggaatatggcgaccacccctggttcatcggggtgcagttccatccggagctgaagtcgcggccgttccagccccacccgctgttcgcctcgttcgtgggtgcggccatggagcagagccggctggtgtga

SEQ ID NO: 31035 - protein, 542 aa, Xanthobacter autotrophicus Py2
MARYIFITGGVVSSLGKGLAAAALGALLQARGYTVRLRKLDPYLNVDPGTMSPYQHGEVFVTDDGAETDLDLGHYERFTGHPATKQDNITTGRIYQDILTKERRGDYLGATIQVIPHVTNAIKDFVLEGNEGFDFVLIEVGGTVGDIEGLPFFEATRQLKNELPRGHAIFIHLTLMPYIPSAGELKTKPTQHSVKELRSIGIQPDILLCRTDREIPREERRKLSLFCNVRETAVIEARDVDNIYAVPSAYHAEGLDKEVLAAFNIEPAPAPNLKRWTDIEGRVRNPEGEVTIAIVGKYTGLKDAYKSLIEALAHGGIAHKVKVNLDWIESETFEREDPAPFLEHVHGILVPGGFGQRGAEGKIRAARFARERKVPYLGICFGMQMAVIEAARNLAGIPDANSTEFGPTSEPVVGLLTEWLKGNELERRSAAGDLGGTMRLGAYAAHLEPGSRVEAVYGGRDIFERHRHRYEVNTAYRQRLEQHGLRFSGMSPDGLLPEIVEYGDHPWFIGVQFHPELKSRPFQPHPLFASFVGAAMEQSRLV

SEQ ID NO: 31036 - DNA, 1794 bp, Arabidopsis thaliana
  CDS (1)..(1794)
atgaagtatgtggttgtttcaggaggagtagtgagtggactcggcaaaggagtcacggcaagtagcatcggactcatcctcaaatcctgtggcttccgagtcaccgccattaaaatcgatccttacttaaacattgatgctgggaccatgtcacctattgaacatggtgaagtttacgtcttggatgatggtggcgaggttgatctggatcttgggaactatgagaggttcatggatattaagctgactagtgaaaacaacataactactggaaaagtttataagcatgtgcttgagaaagagaggagaggagattatcttgggaagactgttcaggttgttcctcatattactgatgctattcaaaaatggattgagcgtgcagctaggattccagtggatggacagtcaggtccagctgatgtttgtgtcatagaacttggaggaactataggagatatagagtccatgccttttattgaagctcttgggcagttctcatatcgcgtgggcactgacaatttttgcttgatccatgtcagtcttgtgcctgtattgaatgttgttggtgaacagaagactaaaccaactcaacatagcgttagagacttaagaggccttggcttgagccctaatatcttggcttgccggagcacaaagccacttgaagataatgtgaaggccaaactctctcagttttgccatgtcccgatggaaaacgttgtcactctctacgattgtcccaacatttggcacataccattgcttctcaaagaacaaaaggcacacgaggctattttccgtgtcttgaaccttgaaggagttgcaaaggagcctgcattagaggaatggtctttgatggctaaaatgaccgacaaattgcatgttccggtaagaattgctgtggttgggaaatacactgagctcttggattcgtatctttccattcacaaggctctcttgcacgcttctgtggctaggcgcaagaaacttatcatagattggatttcagctagtgatcttgagcaaggtgcaaaaaaggagaatccggatgcatataaggccgcctggaagttactcaagggtgctgatggcgttcttgtgccgggaggttttggcagtagaggtgtagaaggaaagatgctggcagcgaaatacgccagagaaaacagaattccataccttggtatctgtctaggtatgcaactcgctgtgatcgagtatgcaagaaccatactcggtttggcagatgcaaatagcactgaacttgatcccaacaccaaaaacccctgtgttattttcatgcctgaggggtcgaaaacgcatatgggaggcactatgaggttaggctcaagaagaacttattttcattctaaggactccaaatcagcaagactatatgggaacaaaagttttgtagatgaaagacaccgacacagatatgaggtgaatccagccatggttccacgttttgagagctctggactcacattcacaggaaaagacgagacagggcagcgaatggagatcattgaactgcctaaccatccgttttacgtcggagctcagttccatcccgagtacaaatcaagacccggaaaaccatctcctctgtttctaggactaattggagcagctagtggagaactagacactgttctgctacaaagctaccaagaaaccgtcgttccacgttctctacccaacggaaaactagagagagtttactggaaaggtgcagcgaagaagccagtcagtgttgtgtacagtttatgtgatcgtgtctactcgtga

SEQ ID NO: 31037 - protein, 597 aa, Arabidopsis thaliana
MKYVVVSGGVVSGLGKGVTASSIGLILKSCGFRVTAIKIDPYLNIDAGTMSPIEHGEVYVLDDGGEVDLDLGNYERFMDIKLTSENNITTGKVYKHVLEKERRGDYLGKTVQVVPHITDAIQKWIERAARIPVDGQSGPADVCVIELGGTIGDIESMPFIEALGQFSYRVGTDNFCLIHVSLVPVLNVVGEQKTKPTQHSVRDLRGLGLSPNILACRSTKPLEDNVKAKLSQFCHVPMENVVTLYDCPNIWHIPLLLKEQKAHEAIFRVLNLEGVAKEPALEEWSLMAKMTDKLHVPVRIAVVGKYTELLDSYLSIHKALLHASVARRKKLIIDWISASDLEQGAKKENPDAYKAAWKLLKGADGVLVPGGFGSRGVEGKMLAAKYARENRIPYLGICLGMQLAVIEYARTILGLADANSTELDPNTKNPCVIFMPEGSKTHMGGTMRLGSRRTYFHSKDSKSARLYGNKSFVDERHRHRYEVNPAMVPRFESSGLTFTGKDETGQRMEIIELPNHPFYVGAQFHPEYKSRPGKPSPLFLGLIGAASGELDTVLLQSYQETVVPRSLPNGKLERVYWKGAAKKPVSVVYSLCDRVYS

SEQ ID NO: 31038 - DNA, 1695 bp, Saccharomyces cerevisiae
  CDS (1)..(1695)
atgaaatacgttgttgtttctggtggtgttatctcaggtattggtaagggtgttttagcgtcctctacagggatgctactgaaaaccctcggcctaaaggttacttccatcaagattgacccatatatgaatattgacgccgggacgatgtctcccttggaacatggtgagtgttttgtacttgatgatggtggggaaacggacttggatctcggtaattacgagcggtacctcggtattaccttaagcagggaccacaacatcaccaccggtaagatatactcccacgtaatttccagagaaaggagaggtgattatttaggtaagacagttcaaattgttcctcatttgactaacgcaattcaggattggattcaacgtgtttcaaaaattccagtggatgacacaggattagaaccagacgtctgtatcatcgagttaggtggtacggtcggtgacattgagagtgcgcccttcgtggaagcattacgacaatttcagttcgaagttggaagagagaatttcgccctgatccatgtttcacttgtgcccgtcattcatggtgaacagaagacgaaacccacccaagcagcaatcaaagatttaaggtcattagggcttattcccgatatgattgcctgcagatgcagcgaagaacttaacaggagcactattgacaagattgccatgttttgccatgtggggccggagcaagtggtcaacgttcatgatgttaactccacgtaccacgttcccttattgctgctaaagcaacatatgatcgactacctccattcaaggttgaaattaggtgaagtgcctctaaccttggaagacaaggaaagagggtctcaattattgactaactgggaaaacatgaccaaaaacctagatgattctgatgatgttgtcaagattgctcttgtgggaaaatacactaatttgaaggattcctacctatctgtgaccaaatccttagaacacgcaagcatgaagtgccgtcgtcagctagaaatcctctgggtagaggcaagtaacctagagcccgaaactcaagaggtggacaagaacaagttccacgattcatggaataagctcagttccgccgacggaattttggttcctggtggatttggcacgagaggtattgaaggtatgattcttgctgccaaatgggcccgtgaatccggtgttccctttcttggtgtctgtcttggattacaagttgccgctatcgagttcgcccgcaatgtgataggccgcccaaacagcagttctacagaatttttggacgagacactactagctcctgaagaccaagtagtcatatacatgcccgagatcgacaaggaacacatgggtggcacgatgagattgggtttgaggcctaccattttccaaccgaactcagaatggagcaacataaggaagctttatggtgaagttaatgaggtgcatgagagacatcgtcatcgctatgagataaacccgaaaatagtgaatgatatggagtctcgtggctttatttttgttggtaaggacgagacgggccagcgttgcgaaatattcgaattgaaaggccatccatactacgtgggcactcaataccatccagagtatacatcgaaggtgctggaaccatcaagaccgttttgggggcttgtggccgcagctccggcacacttggtgaagtga

SEQ ID NO: 31039 - protein, 564 aa, Saccharomyces cerevisiae
MKYVVVSGGVISGIGKGVLASSTGMLLKTLGLKVTSIKIDPYMNIDAGTMSPLEHGECFVLDDGGETDLDLGNYERYLGITLSRDHNITTGKIYSHVISRERRGDYLGKTVQIVPHLTNAIQDWIQRVSKIPVDDTGLEPDVCIIELGGTVGDIESAPFVEALRQFQFEVGRENFALIHVSLVPVIHGEQKTKPTQAAIKDLRSLGLIPDMIACRCSEELNRSTIDKIAMFCHVGPEQVVNVHDVNSTYHVPLLLLKQHMIDYLHSRLKLGEVPLTLEDKERGSQLLTNWENMTKNLDDSDDVVKIALVGKYTNLKDSYLSVTKSLEHASMKCRRQLEILWVEASNLEPETQEVDKNKFHDSWNKLSSADGILVPGGFGTRGIEGMILAAKWARESGVPFLGVCLGLQVAAIEFARNVIGRPNSSSTEFLDETLLAPEDQVVIYMPEIDKEHMGGTMRLGLRPTIFQPNSEWSNIRKLYGEVNEVHERHRHRYEINPKIVNDMESRGFIFVGKDETGQRCEIFELKGHPYYVGTQYHPEYTSKVLEPSRPFWGLVAAAPAHLVK

SEQ ID NO: 31040 - DNA, 1803 bp, Arabidopsis thaliana
  CDS (1)..(1803)
atgaagtacgtgcttgtaacaggaggtgttgtgagtggattagggaaaggagtaacagcaagtagtattggtgttctccttaaagcttgtggtcttcgagttacttctatcaaaatcgatccttatctgaacactgatgctggaactatgtctccatttgaacacggtgaagtttttgtcttggacgatggtggtgaggtggatcttgatcttggaaactacgaaaggtttctagatatcaaattaacaagagacaataacatcactactgggaaaatttatcagcatgttattgctaaagagaggaaaggagattatttgggaaagactgttcaggttgttcctcatgtcactgatgcaattcaagattggatcgagagagttgcggttattcctgttgatggagaagaggatcctgctgatgtttgcgttattgaattaggtggaacaataggtgatattgaatccgcgccttttatcgaggcgcttggtcaattctcttaccgtgtaggcccagggaatttctgtctggtccatgtcagcctcgtgcctgtgcttaatgttgttggtgaacagaaaactaagccgacacagcatagtgtcaaggggctacgaggattgggcttgacgccggatatcttagcttgtaggagcacaaagccacttgaagataatgtgaaagaaaaactagctcagttttgccatgtcccgcttgagtatatcttcactctctatgatgttcccaacatttggcgtattcctttgttgctaaaggatcagaaagctcatctggcaatctcaaaagtgctcaatcttgctagtattcttaatgagccttctctaggggaatggacttccagagctgaattatgtgacaatttacatgtgccggtgagaatcgctgttgtggggaaatatacaggcctctctgatgcttatctctctgtcttaaaggctctcttacatgcttctgtggcttgtcgcaaaaagctcgtagttgattgggttccagcttgtgatctcgaaaaagaaactgagaaagagaatccagatgcgtataaagctgcttggaagttgctaaagggtgtagatggaattcttgtacctggaggttttggtgatagaggagtggaagggaagattcttgctgcaaagtatgcacgtgaaaacaaaatcccgttcctcggtatttgtcttggaatgcagattgctgtcatcgagtttgcacgatcagttctaagcttgcaagacgcaaacagcacagaatttaaccctgaaaccaaacatccttgcatcattttcatgcccgagggttctaaaactcatatgggaggcactatgcgcttaggatcaagaaaatccatcttcaatgtcaaagacagcaaatctgcaaaactatacgagaacaaaagctttgtagatgagaggcatcgtcacagatacgaggtgaatccggacatggttgaacgccttgagaaggccggtctttctttcgctgcgaaagatgaaactggcaaacgcatggagatcattgaacttccaaaccatcctttctttatcggtgctcaattccaccccgagttcaaatccagacccgggaaagcttctcctctgtttttagggctcattgcagcatcgtgtggcgagttagacacagtcctgaatccagcttctgctcatcaacattcgattagtaacggtccaacaaacattttcatcaatggaacttccaagaaatctcccaatggcttggctgatgtaagatataataacggctactgcaatggcctctacactagatag

SEQ ID NO: 31041 - protein, 600 aa, Arabidopsis thaliana
MKYVLVTGGVVSGLGKGVTASSIGVLLKACGLRVTSIKIDPYLNTDAGTMSPFEHGEVFVLDDGGEVDLDLGNYERFLDIKLTRDNNITTGKIYQHVIAKERKGDYLGKTVQVVPHVTDAIQDWIERVAVIPVDGEEDPADVCVIELGGTIGDIESAPFIEALGQFSYRVGPGNFCLVHVSLVPVLNVVGEQKTKPTQHSVKGLRGLGLTPDILACRSTKPLEDNVKEKLAQFCHVPLEYIFTLYDVPNIWRIPLLLKDQKAHLAISKVLNLASILNEPSLGEWTSRAELCDNLHVPVRIAVVGKYTGLSDAYLSVLKALLHASVACRKKLVVDWVPACDLEKETEKENPDAYKAAWKLLKGVDGILVPGGFGDRGVEGKILAAKYARENKIPFLGICLGMQIAVIEFARSVLSLQDANSTEFNPETKHPCIIFMPEGSKTHMGGTMRLGSRKSIFNVKDSKSAKLYENKSFVDERHRHRYEVNPDMVERLEKAGLSFAAKDETGKRMEIIELPNHPFFIGAQFHPEFKSRPGKASPLFLGLIAASCGELDTVLNPASAHQHSISNGPTNIFINGTSKKSPNGLADVRYNNGYCNGLYTR

SEQ ID NO: 31042 - DNA, 1794 bp, Arabidopsis thaliana
  CDS (1)..(1794)
atgaagtacgtacttgtaacaggaggtgttgtgagtggattagggaaaggaatcactgcaagcagtgttggtgtccttcttcagtcttgtggtcttcgcgttacttgtatcaaaatcgatccgtatttgaactatgatgctggaaccatatccccttacgaacatggagaagtgtttgtcttggacgatggtagtgaggtggatcttgatcttggaaactacgagaggtttctagatacaacattaactcgagataacaatatcacttacgggaagattcagcggtatgtgatggagaaagagaggaaaggagattacttaggggaaactgttcagattgttcctcacgtcactgatacaatccgagaatgggtggagagagttgcaatgattcctgtcgatggaaaagaaggtcctcctgatgtttgcatcattgagttaggtggaactataggagataatgaatccaggccttttgctgacgcacttagccaattatcatacagtgtaggccgtgagaatttctgtctgatccatgtcaccctcgtgcctgtgctcagtgttgttggtgaacagaaaacaaaaccaacacagcacagtattaaagatctacgaggctttggtttgacacctaatatcatagcttgtcggagcacaaaggcacttgaagagaatgtaaaagcaaagctatctcggttttgctatgttccgattcagaacatcttctctctctgtgatgttcccaacatctggcacattcctctgttgctcaaggagcagaaggctcatgaagcaatttcaaaagtcctgaacctttctggtattgctaaagaaccttctttagagaaatgggcatcaatggtagaaattagtgacggtttaaatgtacccgtgagaatcgctatcgtggggaaatatacagatctatcagatgcctatctctctgtcttgaaggccctcctccatgcttctgtggcttttcacaaaaagcttgaagttgatatggttccatcgtgtgatctcgaaaagaccaagaagcaagaggattcacgcgcatatgaggctgcttggaagttactgaaggacgcaaatggagttcttctccctggagggtttggtgataggggagtggaggggatgattcttgcagcaaaatatgcccgagaaaacaatatccctttcctcggtatctgtctcgggatgcagatcgctgtcatcgagtttgcacgctcacttctctgcttgcctgatgcaaatagcacagagtttgaacctgaaaccaaacatccatgcatcatattcatgcctgagggctccataactcatatgggaggcacaatgcgattaggttcgagaagagcctatttccatgacaaggaaagcaaatctgcaagactatatgggaacaaagagtttgtcgatgaaaggcatcgccatagatatgaggtgaatcctgatatggttgcaagccttgaacaggctggtctctcttttgctgcaaaagatgaaactggggagcgcatggagattgttgaacttccaagccaccctttcttcatcggtgctcaatttcatcccgagtacaaatcgagacccaggaaagtatctcctctgttcttaggactaatagcagcatcctgtggtgagctagatgcagtcctgaatccagtttccattcaccaacacaaccaaacaatgttcttggaaaagaaacaacacataggttggtccaaaaaatgttttggtgataaaaaccaacaagaagaaatctcagaaacatcttttcctatgtga

SEQ ID NO: 31043 - protein, 597 aa, Arabidopsis thaliana
MKYVLVTGGVVSGLGKGITASSVGVLLQSCGLRVTCIKIDPYLNYDAGTISPYEHGEVFVLDDGSEVDLDLGNYERFLDTTLTRDNNITYGKIQRYVMEKERKGDYLGETVQIVPHVTDTIREWVERVAMIPVDGKEGPPDVCIIELGGTIGDNESRPFADALSQLSYSVGRENFCLIHVTLVPVLSVVGEQKTKPTQHSIKDLRGFGLTPNIIACRSTKALEENVKAKLSRFCYVPIQNIFSLCDVPNIWHIPLLLKEQKAHEAISKVLNLSGIAKEPSLEKWASMVEISDGLNVPVRIAIVGKYTDLSDAYLSVLKALLHASVAFHKKLEVDMVPSCDLEKTKKQEDSRAYEAAWKLLKDANGVLLPGGFGDRGVEGMILAAKYARENNIPFLGICLGMQIAVIEFARSLLCLPDANSTEFEPETKHPCIIFMPEGSITHMGGTMRLGSRRAYFHDKESKSARLYGNKEFVDERHRHRYEVNPDMVASLEQAGLSFAAKDETGERMEIVELPSHPFFIGAQFHPEYKSRPRKVSPLFLGLIAASCGELDAVLNPVSIHQHNQTMFLEKKQHIGWSKKCFGDKNQQEEISETSFPM

SEQ ID NO: 31044 - DNA, 1776 bp, Arabidopsis thaliana
  CDS (1)..(1776)
atgaagtacgttttggtgacaggaggagtggtgagtggtcttggcaaaggtgtcactgctagtagcattggacttctccttcaagcatgtggtcttcgtgtcacttccattaaaattgatccttatcttaacactgatgctggaacaatgtctccgtttgagcatggagaagtatttgtattggatgatggtggagaggtggatttggaccttggaaactatgaacgatttttagacagtacattgacccgtgacaacaatataactactggaaagatataccagtcagttattgacaaggaaaggaagggggactacctcggaagaactgtacaggttgttcctcatgttactgacgcaatccaagagtggattgagcgtgtagctaatgttcctgtggatggaaaggaaggtcctcctgatgtttgtgtcatcgaattaggcgggactataggtgatattgaatctatgccctttattgaggcccttggtcaattctcgtataaagttggacctggtaatttctgcttggttcatgtcagccttgtgcctgttctcagtgttgttggtgaacagaagacgaagccaacccagcatagtgtgcgaggcctcaggagccttggtttgacaccaaatatcctagcatgtcgcagcacgaaggcacttgaagaaaatgtcaagacaaaactatctcaattttgccatgtgccggaagtgaatatagtaacgctctatgatgttccaaatatttggcacgttcctctgcttttaagggatcaaaaagctcatgaagcgatcctaagagagttaaatcttagtaatgctataaagcctgacttgacagaatggactgcaaggactaaaatttatgacacactgcaagaccctgtgagaatagctatggttggaaagtacactggccttactgattcttacctttccgtgttgaaggcccttttgcatgcttctgttgcatgtcacaagaagcttgtcatagagtgggttgcagctagtgaccttgaagagataactgcacaagagacgccagatgtccataaggctgcatgggatcttttgaagggtgctgatggtatcctagtaccaggagggtttggtgatagaggagtgcaagggaagatacttgctacaaagtacgcccgtgaaaatcaagtccctttccttggcatatgcctgggaatgcagctggctgttgttgaatttgcccgctccattcttggttttcacgatgcaaacagcacagagtttgaaccagaaacttcaagcccttgcatcatatttatgccagaaggatccacaactcatatggggggcacaatgcgcttagggtcaaggaagacttacttccaggttgctgattgcaagtctgccaagctgtacggtaatgcaaagtttgtagatgagcgacacaggcacagatatgaggtaaatccagatatgatatcagaaattgagaaggctggcctctcctttgttgggaaagatgagactgggcgtcgtatggagattgttgaactaccaagtcatccatactttgtgggtgctcagttccatcctgaattcaagtccagacctgggaaaccttctgcattgtttctaggtcttatcgcagcagcgtctgggtgtctagaatcagtattgcaaacaggtggcaaggtgaacatagtttcgaaaaatggagtagccaatggatctgcaatggggaaagttcatcagaacggcaatgtctatagcaatggaaacgggcttcaccactga

SEQ ID NO: 31045 - protein, 591 aa, Arabidopsis thaliana
MKYVLVTGGVVSGLGKGVTASSIGLLLQACGLRVTSIKIDPYLNTDAGTMSPFEHGEVFVLDDGGEVDLDLGNYERFLDSTLTRDNNITTGKIYQSVIDKERKGDYLGRTVQVVPHVTDAIQEWIERVANVPVDGKEGPPDVCVIELGGTIGDIESMPFIEALGQFSYKVGPGNFCLVHVSLVPVLSVVGEQKTKPTQHSVRGLRSLGLTPNILACRSTKALEENVKTKLSQFCHVPEVNIVTLYDVPNIWHVPLLLRDQKAHEAILRELNLSNAIKPDLTEWTARTKIYDTLQDPVRIAMVGKYTGLTDSYLSVLKALLHASVACHKKLVIEWVAASDLEEITAQETPDVHKAAWDLLKGADGILVPGGFGDRGVQGKILATKYARENQVPFLGICLGMQLAVVEFARSILGFHDANSTEFEPETSSPCIIFMPEGSTTHMGGTMRLGSRKTYFQVADCKSAKLYGNAKFVDERHRHRYEVNPDMISEIEKAGLSFVGKDETGRRMEIVELPSHPYFVGAQFHPEFKSRPGKPSALFLGLIAAASGCLESVLQTGGKVNIVSKNGVANGSAMGKVHQNGNVYSNGNGLHH

SEQ ID NO: 31046 - DNA, 1671 bp, Arabidopsis thaliana
  CDS (1)..(1671)
atgaagtacgtattggtgactggaggagtggtgagtgggcttggcaaaggcgttacggcgagtagtatcggcgtggtgcttaaagcttgtggccttggagttacctccattaaaattgatccatatctgaacactgatgctggtacaatgtccccttttgagcatggagaggtttttgtactcgatgatggtggagaggttgatcttgatttgggaaactacgaaagatttctcgatgtgacactaaccaaagacaacaacataaccactgggaagatatatcagtctgttcttgacaaggaacggaaaggcgactaccttgggaagactgttcaggttgttccacacattactgatgcaatcaaggattggattgagtcagtctctctgattcctgtggatggaaaggaaggccaagctgatgtttgtgttattgagttgggagggactgttggtgacatcgagtcaatgccttttatcgaggccttgagacaattgtcattctctgttggaccggataatttctgcctgattcacgtgagcttgattcccgttcttggtgttgttggggagcagaaaacaaagccaacccaacacactgtccgagaactaagagctttgggattgactcctcactttttggcatgtcgctctgctcagccactgctggaaagtaccaaggctaaattgtctcagttctgtcatgtggcggcagctaatattctcaatatccatgatgttccaaacatttggcatgttcctctcctactccgtaatcaaaacgctcatcactcgattctcaaacaactgaatctaactaacgttgcgacagcacctgatctggatagctggaataagatggctgaaacttttgataacttgacaaatcatgtccaaattgctatggttggaaagtacattggtctaacggattcttatctctcggttgtgaaggcccttcttcatgcctgcattgcatgttcattgaagccacatatcgaatggatcgcagcttcagatcttgaagacgaaagtgagaaatcgactccggaggcgcatgctgctgcttggaagatcttgaagagcgcagaatgcattctggttcctggtggttttggagatcgtggtgtgagtggaatggttttagcagccaaatacgctagagagaacaaaattccttatcttgggatctgcttggggatgcaaattgcagtaattgagtttgcaagatctgttttgggtttggaaagagcaaatagcactgagttcgatgctcagacatctgaccctgttgttatatttatgccagaaggctcaagaacacatatgggaagcacaatgagacttggatcccgaagaacacatttacacaaccgagactctctcacttcaaaactatacggccaagtttcttatgtagacgaaaggcataggcaccgttacgaggtgaatccagaagtagctcaagcacttgaagaagctggtttaagatttgtgggtaaagatgatacagggaaacgtgttgaggtgattgagtttcaagatcatccattctatgttggagttcagtttcatccagaatttaagtcaagacccactagaccttctcctctgtttttagggtttatattggctgcgaggaagcttcttcaagcccatttaagcaattga

SEQ ID NO: 31047 - protein, 556 aa, Arabidopsis thaliana
MKYVLVTGGVVSGLGKGVTASSIGVVLKACGLGVTSIKIDPYLNTDAGTMSPFEHGEVFVLDDGGEVDLDLGNYERFLDVTLTKDNNITTGKIYQSVLDKERKGDYLGKTVQVVPHITDAIKDWIESVSLIPVDGKEGQADVCVIELGGTVGDIESMPFIEALRQLSFSVGPDNFCLIHVSLIPVLGVVGEQKTKPTQHTVRELRALGLTPHFLACRSAQPLLESTKAKLSQFCHVAAANILNIHDVPNIWHVPLLLRNQNAHHSILKQLNLTNVATAPDLDSWNKMAETFDNLTNHVQIAMVGKYIGLTDSYLSVVKALLHACIACSLKPHIEWIAASDLEDESEKSTPEAHAAAWKILKSAECILVPGGFGDRGVSGMVLAAKYARENKIPYLGICLGMQIAVIEFARSVLGLERANSTEFDAQTSDPVVIFMPEGSRTHMGSTMRLGSRRTHLHNRDSLTSKLYGQVSYVDERHRHRYEVNPEVAQALEEAGLRFVGKDDTGKRVEVIEFQDHPFYVGVQFHPEFKSRPTRPSPLFLGFILAARKLLQAHLSN

SEQ ID NO: 31048 - DNA, 1761 bp, Mycobacterium tuberculosis CDC1551
  CDS (1)..(1761): transl_table=11
gtgcgaaagcacccgcaaaccgctaccaagcacctcttcgtcagcggcggcgttgcttcctcgctcggcaagggactgaccgccagcagcctaggacaattgttgacggttcgtgggttacacgtcacgatgcaaaagctcgacccgtacctcaacgtcgacccgggtaccatgaacccgttccagcacggcgaggtcttcgtgaccgaggacggtgccgaaaccgatctcgacgtcggccactacgaacggttcctcgatcgcaatttgcccggctcagcgaatgtgactaccgggcaggtgtattcaacggtgatcgcgaaggagcgccgcggcgaatacctgggcgacaccgtgcaggtgatcccccatatcaccgacgagataaaacggcgcatcctggcgatggcccaaccggacgccgacggtaaccgcccggacgtggtcatcaccgaaatcgggggcactgtcggcgatatcgagtcacagcccttcctggaggcagcgcggcaagtccggcactatctcggccgggaggacgtgttttttctgcacgtgtcgctggtgccctacctggcgccgtcgggtgagctcaaaaccaagccaacacagcactcggtggccgcactgcgcagcattgggattaccccggacgcgttgatcctgcgctgcgaccgcgacgttcccgaagcgctgaaaaacaagattgcgttgatgtgtgacgtcgatatcgacggcgttatctccaccccggacgcgccctccatctacgacatacccaaggtattgcaccgcgaggagctcgatgcgttcgtggtgcgccgactcaatctgccgttccgcgacgtcgattggaccgaatgggacgacctggtgcgccgggttcacgaaccacatgagacagtgcgaattgctttggtgggcaagtacgtcgaattatccgacgcttacctctcggttgccgaggcattgcgtgccggcggattcaagcaccgggccaaggtcgagatctgttgggtggcatccgacggttgtgaaacgaccagtggtgccgcggcggcgctcggcgatgtgcatggggtgctcattccgggcggattcggcatcaggggcatcgagggcaagatcggtgccattgcatacgcgcgggcgcgcgggttgccggtgttggggctgtgcctcggtttgcagtgcattgtgatcgaggccgcgcgatcggtcggtctcaccaacgccaattcggccgaatttgatcccgacacaccagatcccgttatcgccacgatgcccgatcaagaagaaatcgtggccggcgaggcggatctgggcggtaccatgcgtctcgggtcctaccccgccgtgttggagccggattcggttgttgcccaggcataccaaactacccaggtgtccgagcggcatcgccaccggtacgaggtcaacaacgcgtaccgagacaagatcgccgaaagcggcctgaggttttccgggacgtcacctgacggacacttggtagagttcgtcgagtatccgccggatcggcatccgttcgttgtcggcacccaggcccaccccgagttgaagagccgacccacccggccgcacccactgtttgtcgcattcgtcggggcagccatcgattacaaggcgggtgagttgctgcctgtcgagatccccgagatccccgagcacacacccaacggtagctcccatcgggacggcgtgggccagccgctaccggaacctgcgtctcgtggctga

SEQ ID NO: 31049 - protein, 586 aa, Mycobacterium tuberculosis CDC1551
MRKHPQTATKHLFVSGGVASSLGKGLTASSLGQLLTVRGLHVTMQKLDPYLNVDPGTMNPFQHGEVFVTEDGAETDLDVGHYERFLDRNLPGSANVTTGQVYSTVIAKERRGEYLGDTVQVIPHITDEIKRRILAMAQPDADGNRPDVVITEIGGTVGDIESQPFLEAARQVRHYLGREDVFFLHVSLVPYLAPSGELKTKPTQHSVAALRSIGITPDALILRCDRDVPEALKNKIALMCDVDIDGVISTPDAPSIYDIPKVLHREELDAFVVRRLNLPFRDVDWTEWDDLVRRVHEPHETVRIALVGKYVELSDAYLSVAEALRAGGFKHRAKVEICWVASDGCETTSGAAAALGDVHGVLIPGGFGIRGIEGKIGAIAYARARGLPVLGLCLGLQCIVIEAARSVGLTNANSAEFDPDTPDPVIATMPDQEEIVAGEADLGGTMRLGSYPAVLEPDSVVAQAYQTTQVSERHRHRYEVNNAYRDKIAESGLRFSGTSPDGHLVEFVEYPPDRHPFVVGTQAHPELKSRPTRPHPLFVAFVGAAIDYKAGELLPVEIPEIPEHTPNGSSHRDGVGQPLPEPASRG

SEQ ID NO: 31050 - DNA, 1737 bp, Agrobacterium tumefaciens str. C58
  CDS (1)..(1737): transl_table=11
ttgttcgcattccggctcgccccatcgcagattcgtcaacagcgaattttcgaaacaatgaaatttgggctggcggaatcagaggtaaaaaggtatccggtgaatcccatggcgcgatatgtattcatcacaggcggcgtggtctcctctctcggtaagggcatcgcagctgcggcactcggagctttgctgcaatcccgtggttatcgggtgcggcttcgcaaactcgacccttatctgaacgttgatcccggcaccatgagcccgacacagcacggcgaagtgttcgtgacggatgacggtgccgagacggacctcgaccttggccactatgaacgctttaccgggcgttcggccaccaagaccgacaacatcaccaccggtcgcatttacaagaacatcatcgacaaggaacgccgcggcgactatctcggcgcgacggtacaggtcattccgcatgtcaccaacgagatcaaggatttcgtgaccgaaggcaatgacgattacgacttcgtcatctgcgaaatcggcggcacggtgggtgatatcgaggcgatgccgttcatggaggcgatccgccagctcggtaacgacctgccgcgcggcaccgcaatctatgttcatctgacgctgatgccttacattccggcggccggcgaattgaagacaaagccgacccagcattccgtgaaggaactgcaggcgcttggcattcatcccgacatcctgctggtgcgcgccgaccgggaaatcccggaagcggaacgccgcaagctctcgctgttctgcaacgtgcgtccgtccgccgttattcaggcgctggatgttgccaacatctatgacgttccgatcgcctaccacaatgaaggtctcgattcggaagtgctggccgccttcggcatcgaaccggcgccgaagccgcgtctggaacagtgggaagaggtctgcaaccgcatccgcacgccggaaggcgaggtaacgattgcgatcgtcggcaaatataccggcctcaaggatgcctacaagtcgctgatcgaggcgctgcatcacggtggcttcgccaaccgcgtcaaggttaagctggagtggatcgagtcggaagtcttcgaaaaggaagatccgacgccttatctcgaaaaggtcaacggcattctggtgccgggcggtttcggcgagcgcggttccgaaggcaagatcatggcggcgcagttcgcccgtgagcgcaacgtgccctatttcggcatctgcttcggcatgcagatggcggtcgtggaagcggcccgacatctcgccggcatcgaaaatgcctcgtccaccgaattcggtcccacggcggaacccgtcgttggcctgatgaccgaatgggtgaagggcaacgagctggagaagcgctccaccaagggcgatctcggcggcaccatgcgtctcggcgcctacaaggcggcgctgaagaaagacaccaagatcgccgaaatctatggcaccactgatatttccgagcgccaccgccaccgctacgaggtgaatgtggactacaaggaccggctggaagagtgcggcttggtcttctcgggcatgtctcccgatggtgtcctgccggagacggtggaatatcctgaccatccgtggtttatcggcgtgcaataccacccggaactgaagagccgcccgctcgacccgcatccgcttttcgccagcttcgtcgaagcggcggtggagcagagccggctggtttga

SEQ ID NO: 31051 - protein, 578 aa, Agrobacterium tumefaciens str. C58
MFAFRLAPSQIRQQRIFETMKFGLAESEVKRYPVNPMARYVFITGGVVSSLGKGIAAAALGALLQSRGYRVRLRKLDPYLNVDPGTMSPTQHGEVFVTDDGAETDLDLGHYERFTGRSATKTDNITTGRIYKNIIDKERRGDYLGATVQVIPHVTNEIKDFVTEGNDDYDFVICEIGGTVGDIEAMPFMEAIRQLGNDLPRGTAIYVHLTLMPYIPAAGELKTKPTQHSVKELQALGIHPDILLVRADREIPEAERRKLSLFCNVRPSAVIQALDVANIYDVPIAYHNEGLDSEVLAAFGIEPAPKPRLEQWEEVCNRIRTPEGEVTIAIVGKYTGLKDAYKSLIEALHHGGFANRVKVKLEWIESEVFEKEDPTPYLEKVNGILVPGGFGERGSEGKIMAAQFARERNVPYFGICFGMQMAVVEAARHLAGIENASSTEFGPTAEPVVGLMTEWVKGNELEKRSTKGDLGGTMRLGAYKAALKKDTKIAEIYGTTDISERHRHRYEVNVDYKDRLEECGLVFSGMSPDGVLPETVEYPDHPWFIGVQYHPELKSRPLDPHPLFASFVEAAVEQSRLV

SEQ ID NO: 31052 - DNA, 1638 bp, Pyrococcus furiosus DSM 3638
  CDS (1)..(1638): transl_table=11
atgcccctattcaacctcacaatcatgacgaagtacatatttgttactggaggagttgtgagtgggcttggaaagggaatcacaagcgcttcaatagggcttctcatgaaagctagaggctacaaaacaaccaacatcaaaattgatccttacatcaactatgatgctggaactatgaacccctatcagcacggagaagtcttcgttcttgacgatggtggagaagtggatcttgatttaggaaattatgaaagattcttagacacagaattgacttttgaccataacataacaactggaaaggtatattctactgtaatagaaaaggagagaagaggagaatatctcggagccactgtccaagttattcctcacatcacagatgaaataaagaggagaataagagagatagctaaggattacgaagtcgttgtagtggagataggaggcaccgtgggagatatagaaagcatgcctttcctcgaggcagcgagacaaatgcagctagaagaaggaagagacaacgtggcattcgttcatgtaacatacgttccaaaactcaaggtagttggagaacagaagacaaagccaacccaacacagcgtcaaagagctccgctccctgggaatacaaccagatgcaattgttgccagaagtgaagatccccttgaagaggccgcaagaaagaaaataagcctatttaccaacgttccagaggaagccgttatcagcgcgtatgacgttgaagatacatatgaagttcccctcctactggagagagaaggactcggaaaatatctaacaaaaaggctcaagcttgaagatagggaaccagacctaaaagattgggaaaagatggttgcaaaatacaaggccctaactgaaactgttgagattgcaatagttggaaagtacgtcaaattgcaagattcttaccttagcattaaagaagcattaaaacatgccagcgttagtaatgaagtcaaggtaaagataagatggattgaggccgaggacgttgaaactcatggaacgaagcttcttgaaggagttgatggtattataatcccaggaggatttggggcaaggggagctgaaggaaagatacaggcaataagatatgcaagagaaaatgacatccccttcctaggcatatgctttggcttccaactaacagttgttgagtttgcaagaaatgttttaggaatgaagggagcccattcaactgaaatagatccccaaactccatatccagttgttgacctaatgccagagcagcgaaacctagacaggcttggaggaactatgagacttggagcttacccagtaaagataaagaaaggaaccttagcatattccctttacaataaggaactcgtatatgagagacataggcacaggtgggaggtcaatcctaattacattgaagctcttgagaaagctggattagtgtttagtggagttgcgggggacgatgaaagaagaatggaaattctagaattgccagataagagatacttcatagcaactcagttccacccagaatttaagtcgaggccaatgagaccagctccagtctttcacggactcgttagagcagcaaaagaatacaaacaggagaaaaatgttactcactaa

SEQ ID NO: 31053 - protein, 545 aa, Pyrococcus furiosus DSM 3638
MPLFNLTIMTKYIFVTGGVVSGLGKGITSASIGLLMKARGYKTTNIKIDPYINYDAGTMNPYQHGEVFVLDDGGEVDLDLGNYERFLDTELTFDHNITTGKVYSTVIEKERRGEYLGATVQVIPHITDEIKRRIREIAKDYEVVVVEIGGTVGDIESMPFLEAARQMQLEEGRDNVAFVHVTYVPKLKVVGEQKTKPTQHSVKELRSLGIQPDAIVARSEDPLEEAARKKISLFTNVPEEAVISAYDVEDTYEVPLLLEREGLGKYLTKRLKLEDREPDLKDWEKMVAKYKALTETVEIAIVGKYVKLQDSYLSIKEALKHASVSNEVKVKIRWIEAEDVETHGTKLLEGVDGIIIPGGFGARGAEGKIQAIRYARENDIPFLGICFGFQLTVVEFARNVLGMKGAHSTEIDPQTPYPVVDLMPEQRNLDRLGGTMRLGAYPVKIKKGTLAYSLYNKELVYERHRHRWEVNPNYIEALEKAGLVFSGVAGDDERRMEILELPDKRYFIATQFHPEFKSRPMRPAPVFHGLVRAAKEYKQEKNVTH

SEQ ID NO: 31054 - DNA, 1692 bp, Xanthomonas campestris pv. campestris str. ATCC 33913
  CDS (1)..(1692): transl_table=11
atggctttccgggaggccttgagccccatgactcccctgatttttgtaacaggcggtgtagtgtcctcgctaggcaagggcatcgccgctgcttcgcttgcgtccattcttgaggcgcgtggcctcaaggtcacgatgatgaagctggatccgtacatcaatgtggacccgggcacgatgagcccgttccagcatggtgaggtctacgtcaccgatgacggcgccgaaaccgatctggacctgggccactacgagcgctacgtgcgcacgcggctgtcgcgcaagaattcggtcaccaccggccgtatctacgaaaacgtgatccgcaaggagcgccgcggcgactacctgggcgcgaccgtgcaggtcatcccgcatatcaccgatgaaatccgtcgctgcatcgacgaggccacggctggattcgacgtggcgttgatcgagatcggcggcaccgtgggcgatatcgagtcgttgccgttcctggaggccatccgccaggtgcgcaccgagcgcggcgccgagaaggccatgttcatgcacctcaccctggtgccgtacattgctgcggccggcgagttgaagaccaagccgacccagcattcggtcaaggagctgcgctcgatcggtatccagccggacgtgctgctgtgccgctccgaacaggcggtgccggattcggagcgccgcaagatcgcgttgttcaccaacgtctccgagcgtgcggtgatcagctgccccgacatcgatgtgctgtacggcatgccgctggaactgcgccgccagggcctggacgaactggtcatcgatcaattcaagctgcgcgacaaggtcgccgcggccgacctgtccgagtgggaagcggtggtcgatgcggtcaagcatccgctcgatgaggtgaccatcgcggtggtcggtaagtacgtcgatcaccaggacgcctacaagtcggtggccgaggcgctcaagcacggtggcctgcgtcagcgcaccaaggtcaacctgacctggctggaagcgcaggatctggaaggcagcgacatggccgcattgcagggcatcgacggcattctggtgccgggcggcttcggcgatcgcggcttcgaaggcaaggtgcagacctccaagtacgcccgcgagcacaaggtgccgtatttcggcatctgctacggcatgcaggcggcggtggtggactatgcccgccacgtggccgatctggatgctgccaacagcaccgagaacgatcgccagtcgccgcacccggtgatcggcctgatcaccgagtggcgcaccgccaccggcgaggtggaaaagcgcgatgaaaaatccgacctgggcggcaccatgcgtctgggcctgcaggagcagcgcctgaagccgggcacgctggcgcgcgaggtgtacggcaaggacgtggtggccgagcggcatcgccatcgctacgagttcaacaaccgctaccgtacccagctggaagatgccggcctggtgatttgcggcaagtcgatggacgacacgctggtggaaatggtggagctgccgcgcgatacgcatccgtggttcctggcctgccaggcgcatccggaatttttgtccactccgcgcgacgggcatccgctgtttattggtttcgtgcgcgccgcgcgcgagaagaaggccggcggcaagctgttgaaggaagcgcgtgcgtga

SEQ ID NO: 31055 - protein, 563 aa, Xanthomonas campestris pv. campestris str. ATCC 33913
MAFREALSPMTPLIFVTGGVVSSLGKGIAAASLASILEARGLKVTMMKLDPYINVDPGTMSPFQHGEVYVTDDGAETDLDLGHYERYVRTRLSRKNSVTTGRIYENVIRKERRGDYLGATVQVIPHITDEIRRCIDEATAGFDVALIEIGGTVGDIESLPFLEAIRQVRTERGAEKAMFMHLTLVPYIAAAGELKTKPTQHSVKELRSIGIQPDVLLCRSEQAVPDSERRKIALFTNVSERAVISCPDIDVLYGMPLELRRQGLDELVIDQFKLRDKVAAADLSEWEAVVDAVKHPLDEVTIAVVGKYVDHQDAYKSVAEALKHGGLRQRTKVNLTWLEAQDLEGSDMAALQGIDGILVPGGFGDRGFEGKVQTSKYAREHKVPYFGICYGMQAAVVDYARHVADLDAANSTENDRQSPHPVIGLITEWRTATGEVEKRDEKSDLGGTMRLGLQEQRLKPGTLAREVYGKDVVAERHRHRYEFNNRYRTQLEDAGLVICGKSMDDTLVEMVELPRDTHPWFLACQAHPEFLSTPRDGHPLFIGFVRAAREKKAGGKLLKEARA

SEQ ID NO: 31056 - DNA, 1608 bp, Mycoplasma penetrans HF-2
  CDS (1)..(1608): transl_table=4
ttgaatgataaaacaaaaattttaattgttacaggtggtgtattttcaagccttggtaaaggtgttgcttgttcaagtttaggtgcaatgcttaaatgttttggtcaagaagtattaattatgaagtttgatccttatctaaatgtggatgcaggaactatggcaccaggtcaacatggtgaagtttttgtaacatttgatggtagagaaacagatttagatattggtaattatgaaagatttttaaatattaacttacccaaagaatccaatgtaactgctggaagagtttattatgaaactatagctaaagaaagagatggtaaattcttgggtgcaactattcaagttgtgcctcatattactgaagctattagtcaaaaaataattttattatctaataaataccaaccagattttttaatagttgaagttggtggaactgttggagatattgaatctattccatttttagaagcaactagacaattgcaagcaaaatatcgttctcaagtaatgtttattcatactgttcctttaattgaattattaacaggaagtgatttgaaaactaaaccattacaacattcagtaaaagatttaatgtcagctggaattttcccaaatttattattagtaagatctaaagatgcagtatcaaataaattaaaagagaaaataagtttaacaacaggtattgagaatgaaaacatttattcattaatcaatttaaaacatatttatttattgcctgagtctttagaaaaccaaaaagttcaaaattctatttttaatttctttaaaatggaagttccaaacagaattggatacaaacactgagatactttcacttctttaattaaagaacctaaaaaatacaaagcaagaattgcagttgttggaaaatactctgattctccagatgcttatttatcaattatttcaagtttagaaatttcttcattctatttaaaaacagatctttctattgaatttattaactcttcttcattaaatgaaaataatatctctgaattaagtgagtttgatgcaattttagtaccaggtggatttggtaaaagagatatagaaggtaaaattttagctattcaatatgctagagaaaacaatattccattctttggaatttgtttaggaatgcaattagcttctattgagtttgctagaaatgttttaaaaatgcatgatgctgatagcactgagttcaatgaaaatacagcaaaccctattattactatccttgaagggaaaaatagagaaactaacttaggtggtactttaagattgggtaactataactgtgaattaaaagatggttctaaaatattggaaatatacaaaagaaaatcaattgttgaaagacaccgtcacagatatgaattcaatcctaaatatatggatatttttgaaaaacatggatttgttttttcgggaatcaataaagaaaataatttagttgaaattattgagctagaaaatcataaattctttatagctgttcaatttcacccagaatttacatctaaaattttaagtccaaaccctattttttatagttttttaaatgtttctaaaaaaccaatttaa

SEQ ID NO: 31057 - protein, 535 aa, Mycoplasma penetrans HF-2
MNDKTKILIVTGGVFSSLGKGVACSSLGAMLKCFGQEVLIMKFDPYLNVDAGTMAPGQHGEVFVTFDGRETDLDIGNYERFLNINLPKESNVTAGRVYYETIAKERDGKFLGATIQVVPHITEAISQKIILLSNKYQPDFLIVEVGGTVGDIESIPFLEATRQLQAKYRSQVMFIHTVPLIELLTGSDLKTKPLQHSVKDLMSAGIFPNLLLVRSKDAVSNKLKEKISLTTGIENENIYSLINLKHIYLLPESLENQKVQNSIFNFFKMEVPNRIGYKHWDTFTSLIKEPKKYKARIAVVGKYSDSPDAYLSIISSLEISSFYLKTDLSIEFINSSSLNENNISELSEFDAILVPGGFGKRDIEGKILAIQYARENNIPFFGICLGMQLASIEFARNVLKMHDADSTEFNENTANPIITILEGKNRETNLGGTLRLGNYNCELKDGSKILEIYKRKSIVERHRHRYEFNPKYMDIFEKHGFVFSGINKENNLVEIIELENHKFFIAVQFHPEFTSKILSPNPIFYSFLNVSKKPI

SEQ ID NO: 31058 - DNA, 1623 bp, Mycoplasma gallisepticum R
  CDS (1)..(1623): transl_table=4
atgactagtaaaaagactaaatatatctttgtttctggaggagtttattcttcagtgggcaaggggttgatcgttgcttcgattgcaagtattttcaaacaccagaactttaagatcaatatcttaaagcttgatccctatcttaatgtcgattcgggaacaatgtcaccatatgaacatggtgaggtgtttgttacttcagatggaacagagactgatttagatcttggttattacgaacgtttcttagttcaagatctaaatgaacgttcatcaatcacatcaggtaaagtttattttagtgtgattaataaagaacgcaagggtgagtatttgggtaaaacagtccaattaatcccccatgttactaacgaaattaaaagacggattgctctagcagccactgatgagaacaatcaaccttacgatttagttttttgtgagatcggtgggacgattggtgatttagaatcattgccttttattgaagcaatcaagcagatcattcgcgaaaatgataagcacgacacagctttcatccatgtcgtgcccatcattagtttatttaacggcgaacagaaaaccaaaccattacaacactctttaaaagagttaaacaaccttgggattaaccctgattttttagtaattagatctaaagaaagtttagatttaaaaaccaagcataagattgctagtgcaacctatctagataaagatcatatctttaactctgttgatttaaataatacttacttcttaccagattatttaaatcaacaaaagatccatgaaaagattgctaacaaattacagatcacgatcgatcctaagatcaaattatcagcttgagatgatctagctaagaagattaataatcaaaataacttagtaagaaagatcgcgattattgggaaatatacccaatttaaagatgcatatctgtctttaattgaatcgcttaatttagctggttatcataaccacgttaagttagagatcgattggatcgaatcatcattatatgatgatgcatctttagaagaagttaatcataaactcaaagatgttcacgggatcattgtccctggtgggtttggttctaggggtgttgaaggtaagattaagtttattcaggttgctagaactaaaaagattccattccttgggatctgtttggggatgcaattagcttgtgttgagtatgctagaaatgtgttggggatgactgatgctaactcaagtgagtttaattcacaaactacttatccgatctttaagataatgaacccagatgatcttaattatggtgggagtttgagattgggtgattatttagttagtttaaaagatcaaactttaactaaagctatttatcagcaagatagtattaaaagaaggcatcgtcatcgttatgagtttaataacgattatctaaaccagtttaatgacggtgaattcattgtttcagggatctatcttcaagaaaacttagtcgaaacaatcgaactaaaaaaccatccgttttttattggttgtcagtatcacccagagttttcatcaaagattacagcggctgaaacgttgtttgattcactagttaaaaaaatcaaaatgttataa

SEQ ID NO: 31059 - protein, 540 aa, Mycoplasma gallisepticum R
MTSKKTKYIFVSGGVYSSVGKGLIVASIASIFKHQNFKINILKLDPYLNVDSGTMSPYEHGEVFVTSDGTETDLDLGYYERFLVQDLNERSSITSGKVYFSVINKERKGEYLGKTVQLIPHVTNEIKRRIALAATDENNQPYDLVFCEIGGTIGDLESLPFIEAIKQIIRENDKHDTAFIHVVPIISLFNGEQKTKPLQHSLKELNNLGINPDFLVIRSKESLDLKTKHKIASATYLDKDHIFNSVDLNNTYFLPDYLNQQKIHEKIANKLQITIDPKIKLSAWDDLAKKINNQNNLVRKIAIIGKYTQFKDAYLSLIESLNLAGYHNHVKLEIDWIESSLYDDASLEEVNHKLKDVHGIIVPGGFGSRGVEGKIKFIQVARTKKIPFLGICLGMQLACVEYARNVLGMTDANSSEFNSQTTYPIFKIMNPDDLNYGGSLRLGDYLVSLKDQTLTKAIYQQDSIKRRHRHRYEFNNDYLNQFNDGEFIVSGIYLQENLVETIELKNHPFFIGCQYHPEFSSKITAAETLFDSLVKKIKML

SEQ ID NO: 31060 - DNA, 1659 bp, Wigglesworthia glossinidia endosymbiont of Glossina brevipalpis
  CDS (1)..(1659): transl_table=11
atgatttttaatataaaaatggcaaaatattatatatttattactggaggtgttgtttcatcactaggtaaaggaattacagcagcttctttaggatctgtgttagaatctagaaacttaaaagttacattgatgaaattagatccttatattaacgtaaatcccggaactataagtccaatccaacacggagaagtgtttgttacagaagatggagcagaaacagatttagatttaggtcattatgaacgttttattaaaacaaaaatgtctaaaaaaaatagctttacttctggtaaaatttattctgaagttttaaaaaatgaaagaaaaggtttttatttaggatctacaatacaagtaataccacatattactaatgaaataaaaaaatgtattataaatgcaggaaaagggttcgatatattattagttgaaattggaggaacagtaggagacattgagtcattgccatttttagaaagcattagacaaatgtcaatagagattggaaaaaataagattttatatattcatcttacattagttccatatttaaaaatttcaaaagaggttaaaacaaagcctacacaacattctgtaaaagaacttctttctatagggatacaaccagatattttaatatgtagatctgaaaaaaatgtttcaaaatatgaaaaatcaaaaattgctctattttgcaacgttccaaaacaagcagttttttctttaaaaaatactaattcaatttataaaatacctattttgataaaaaaacaaggattagatagttatgtatgtgatcgcttttgcattaaacgtccagaggcagatttatcaaaatggaaagaagtaatttataaacaaaaaaatccattaggaaatgtaaatattggaataataggaaaatatacagaattgccagattcatatagatctttaatatctgctttagaacatgctggtctaaaaaatagattaatgataaatattcaattaattaattcaaaaaaaatagaatctttaggaatttcttgtctaaaaaatttacatgcaattttgattccaggtggttttggatacagaggagtagagggtaagataattgcagctaaatattcaagagaaaaaaaaattccttattttggaatttgtttaggaatgcaagttgcattaatagaatttgctagaaatgtaactggattgtcagaagcaaactctacagaatttattaataattgcaagcatcctgtaatagcaaaaatatctgaatggaataaaagcataaattatttaaataaaagtaatatatctagcaataattactctactatgaggcttggaaatcaaaagtgtcatttaacaaaaggaagtttagcctttaaaatatataataattctattattttagagcgtcacagacatagatacgaggtaaacaatatatttatagaaaaaataaagttttctggattgtcagtatctggatgggcctattatgataatcacaaattggttgagataattgaatattcaaaccatccttggtttgttggaagtcaatttcatccagaatttaattctaccccaagaaacagccatcctttattcattagcttcgtaaaagctgcttttgattttaaaaataaaaatatttaa

SEQ ID NO: 31061 - protein, 552 aa, Wigglesworthia glossinidia endosymbiont of Glossina brevipalpis
MIFNIKMAKYYIFITGGVVSSLGKGITAASLGSVLESRNLKVTLMKLDPYINVNPGTISPIQHGEVFVTEDGAETDLDLGHYERFIKTKMSKKNSFTSGKIYSEVLKNERKGFYLGSTIQVIPHITNEIKKCIINAGKGFDILLVEIGGTVGDIESLPFLESIRQMSIEIGKNKILYIHLTLVPYLKISKEVKTKPTQHSVKELLSIGIQPDILICRSEKNVSKYEKSKIALFCNVPKQAVFSLKNTNSIYKIPILIKKQGLDSYVCDRFCIKRPEADLSKWKEVIYKQKNPLGNVNIGIIGKYTELPDSYRSLISALEHAGLKNRLMINIQLINSKKIESLGISCLKNLHAILIPGGFGYRGVEGKIIAAKYSREKKIPYFGICLGMQVALIEFARNVTGLSEANSTEFINNCKHPVIAKISEWNKSINYLNKSNISSNNYSTMRLGNQKCHLTKGSLAFKIYNNSIILERHRHRYEVNNIFIEKIKFSGLSVSGWAYYDNHKLVEIIEYSNHPWFVGSQFHPEFNSTPRNSHPLFISFVKAAFDFKNKNI

SEQ ID NO: 31062 - DNA, 1614 bp, Chlamydophila pneumoniae TW-183
  CDS (1)..(1614): transl_table=11
atgcctttcaaatgcatatttttaacaggaggagttgtctcctctttaggaaaagggttaacagcagcatccctagccctaattttagaacgtcaacggcttaacgttgctatgttaaaattggatccatatctaaatgtagatccaggaactatgaatccctttgagcatggagaaatctatgttacagatgatggggttgagacagatcttgatctcggtcactatcatagattctcttctgctgcactttctagacattcaagtgccacttcaggtcaaatttatgctcgtgtcattaaaagagagcgtgagggtgattatctaggaagcacggtacaagtcatcccacacattaccaatgaaatcattcaagtcattttagacgcagctaaagagcactctccagatgttcttattgtcgagattggagggaccataggagatattgaatctcttcccttcctagaagcaattcgacaatttcggtatgaccattccgaagattgtctaaatattcatatgacttatgtcccctatttacaggctgctgacgaagttaaaagtaagccaacgcaacactccgtacaaactctacgtggtattggcatcattcccgacgcgattctatgtcgttctgaaaaacctttaactcaagaagttaaatctaaaatcagtctcttttgcaatgttcccaaccgggcagtgtttaacgttatagatgtaaaacataccatttatgaaatgcctttgatgcttgctcaagagaaaattgccaatttcataggggaaaagttaaagttagctacggttccagaaaatcttgatgactggaaggtactggtaaatcagctatctcaagatcttccgaaggtaaaaattggagtcgttgggaagtatgttcaacaccgagatgcctataagtccatattcgaagcactcactcatgcagctttaagattaggtcatgctgctgaaattatccctattgatgctgaagatgaaaatcttactatggaactctctcaatgcgacgcatgtttagttcctggaggcttcggcgttcgtggttgggaaggaaaaatcgctgcagctaaattctgtcgagaacaaggcattccttattttggtatttgcctaggaatgcaagtgcttgttgtagagtatgctcgcaatgtcttaaatctggatcaggcaaattccctagaaatggaccccaacacccctcatcctattgtatatgtcatggaggggcaagatcccttagtagctacgggaggcaccatgcgcttaggagcgtatccttgtctattaaagccagggagcaaagcccataaagcatataacgaatcttctctgattcaggagcgccaccgccatcgctatgaagtaaatccggattacatacagagtttagaagaccacggcttacggatcgttgggacttgtcctccacaagggctttgtgaaattattgaagtttcggatcatccttggatgattggtgtgcaattccatccagaatttgtatctaaactcatctctccccatcctctatttatcgcatttatagaagcagctctagtctattctaaggatgcaagccatgtctaa

SEQ ID NO: 31063 - protein, 537 aa, Chlamydophila pneumoniae TW-183
MPFKCIFLTGGVVSSLGKGLTAASLALILERQRLNVAMLKLDPYLNVDPGTMNPFEHGEIYVTDDGVETDLDLGHYHRFSSAALSRHSSATSGQIYARVIKREREGDYLGSTVQVIPHITNEIIQVILDAAKEHSPDVLIVEIGGTIGDIESLPFLEAIRQFRYDHSEDCLNIHMTYVPYLQAADEVKSKPTQHSVQTLRGIGIIPDAILCRSEKPLTQEVKSKISLFCNVPNRAVFNVIDVKHTIYEMPLMLAQEKIANFIGEKLKLATVPENLDDWKVLVNQLSQDLPKVKIGVVGKYVQHRDAYKSIFEALTHAALRLGHAAEIIPIDAEDENLTMELSQCDACLVPGGFGVRGWEGKIAAAKFCREQGIPYFGICLGMQVLVVEYARNVLNLDQANSLEMDPNTPHPIVYVMEGQDPLVATGGTMRLGAYPCLLKPGSKAHKAYNESSLIQERHRHRYEVNPDYIQSLEDHGLRIVGTCPPQGLCEIIEVSDHPWMIGVQFHPEFVSKLISPHPLFIAFIEAALVYSKDASHV

SEQ ID NO: 31064 - DNA, 1785 bp, Vibrio vulnificus YJ016
  CDS (1)..(1785): transl_table=11
ttggtgtttatccactttgatttgaagcaaaaaataaaaaattggcgtgtgatagatttcacgttgtggcggttagggtcttctggtatattttcgtcccgtccagaagaaatccgtttccctcattcaaccaatttcaggttaaacatgacgacaaattacatttttgttactggcggggttgtatcctctctaggtaaaggtattgcagcagcatctcttgcagcgattttagaagctcgtggtcttaaagtgactatgatgaagcttgacccttacatcaacgttgatccaggcacaatgagcccaactcaacatggtgaagtgttcgttacagaagatggcgccgaaacagacctagaccttggtcactacgagcgtttcatccgcactaagatgactaagcgcaacaacttcactgcaggtcgtgtttactcagacgttcttgcgaaagagcgtcgcggtgactacctaggtgcaactatccaagttatccctcatatcacaaacgatatcaaagaccgcgtgatcaatggttctcaaggccatgacgttgcgatcgttgaagtgggtggtactgttggtgatatcgaatctctaccatttatggaagcgattcgtcagctagccgttgaaatcggccgtgaacgcgctatgttcatgcacctaacacttgttccttaccttgcagctgcaggcgaagtgaaaacaaaaccgactcagcactctgttaaagagctgctatcaatcggtatccaaccagatatcctagtttgccgctcagatcgcatgatcccagcgaacgagcgtaagaagattgcgctattctgtaacgttcctgagaaagcggtaatctccatgaaggacgtagactctatctacaagatccctcaactgatcaaatctcaaggtcttgatgatctcgtttgtgcacgttttggcattaatgcgccagaagcggatctgtctgaatgggaacaggtgatttacgaagaagcgaacccaactggtgaagttactatcggtatggtgggtaaatacatcgaactacctgatgcgtataaatcagtaaacgaagcgcttaaacatgcaggtttgaaaaatcgcttgagcgttaacattaaatatgtagactctcaggacgtagaaaccaaaggcgttgaagttctgcaaggacttgacgcaatccttgtacctggtggctttggcgaccgtggtatcgaaggcaagattcttgcggcgaaatacgctcgtgagaacaaggttccttacctaggtatttgcttaggtatgcaggtggcactgattgaatacgcgcgcaacgttgcgggtatggaaggtgcacattcaacagaatttaacaaagacaccaagtaccctgtggtaggtttgatcacggaatgggtggacagtgaaggtaacgttgaagaacgtactgaatcgtcaaatcttggtggtacgatgcgtctaggttcgcaactatgtcacctagcgaaaggcactaaagctcgtgagctatacggtagcgatacgatccatgaacgtcaccgccaccgttacgaagtgaacaacaatcttcgtccacaaattgaaaaagcaggcctaaaagtatccggtctgtctgcggacaagaaactggttgagatgatcgaaaacccgaaccacccatggtttgtggcagctcagttccacccagagttcacttctacgccacgtgacggtcacccactgttctctggctttattaaagcagcgggtgaaaacgcgcgcggcgaactgaagtaa

SEQ ID NO: 31065 - protein, 594 aa, Vibrio vulnificus YJ016
MVFIHFDLKQKIKNWRVIDFTLWRLGSSGIFSSRPEEIRFPHSTNFRLNMTTNYIFVTGGVVSSLGKGIAAASLAAILEARGLKVTMMKLDPYINVDPGTMSPTQHGEVFVTEDGAETDLDLGHYERFIRTKMTKRNNFTAGRVYSDVLAKERRGDYLGATIQVIPHITNDIKDRVINGSQGHDVAIVEVGGTVGDIESLPFMEAIRQLAVEIGRERAMFMHLTLVPYLAAAGEVKTKPTQHSVKELLSIGIQPDILVCRSDRMIPANERKKIALFCNVPEKAVISMKDVDSIYKIPQLIKSQGLDDLVCARFGINAPEADLSEWEQVIYEEANPTGEVTIGMVGKYIELPDAYKSVNEALKHAGLKNRLSVNIKYVDSQDVETKGVEVLQGLDAILVPGGFGDRGIEGKILAAKYARENKVPYLGICLGMQVALIEYARNVAGMEGAHSTEFNKDTKYPVVGLITEWVDSEGNVEERTESSNLGGTMRLGSQLCHLAKGTKARELYGSDTIHERHRHRYEVNNNLRPQIEKAGLKVSGLSADKKLVEMIENPNHPWFVAAQFHPEFTSTPRDGHPLFSGFIKAAGENARGELK

SEQ ID NO: 31066 - DNA, 1665 bp, Bdellovibrio bacteriovorus HD100
  CDS (1)..(1665): transl_table=11
atggcaaagagaaagaccaccacaaagaaggtgtcgacagcgaagtcgaccaagaaaacgttgaagcaaaaatttatttttgtcaccgggggcgttgtttcctcgattggcaaaggactgacagcagccagccttggtgctttgctggaaggccgcggtcacaaagtgaccatcatgaaatttgatccttatttgaacgtggatcctggcacaatgtcgccattgcagcacggtgaagtttatgtgactgaagatggggcggaaaccgatctggatctggggcactatgagcgtttcacatccgctttgatgaaccgctcaaactctgtttccaccggtcagatctatgacacggttttgaaccgcgagcgtcgcggggactacctgggtggcactgtgcaggtcattccgcacatcacggaagaaatcaaagctcgtatctatgaagccgctcagggcagtgaaatcattctggttgaaatcggcgggacagtcggggatatcgaaagtcagccgttcctggaagccattcgtcagatgcgtatcgatgtgggtcaggaaaactctgtgctggtgcatgtgacttatgtgccgtacatcgcggcggcgggtgaattgaaatccaagccgactcagcactcagtgaaagagctgcgtgaaatcggtttgcaacccgacttcctggtctgccgcagtgaaaaagtcattgatgacaatctgaaggccaaaatcggtctgttctgttccgtgaaaccggaaaatgttatcgccgctcaggacagtcgttttatctatgaagtccctctggctttgcacagagaaaagctggatgaactgatcgtggcacgtctgggcctttctgctggcaagttgaacatgaaaggctggcagaatctggtgaagattctggggaacccaagtcatactgtgaaaatcggcgtggttggcaagtatgtcgatttgaaggaatcctacaaatccctgcatgaagccttggttcacggtggcgttgccaacaatgcccgcgtggaaatcatttacgtggattccgaaaaggtcaccgacaagactgtgcactctttattgggcaaggtcgacggcattctggtgccggggggcttcggcacccgtggtgtggaaggcaagatcactgccatcaagtatgcccgtgaaaagcgggttccattcttcggtatctgttttggtatgcaattgtcggcgattgagtttgcgcgcaacgtgtgtggtatcaaagatgccaccagccgtgaattccatgctgaaaacaaacgcactggcaacttcgtgattgattccatggccgagcagcgcggagtgatcaacaagggtggcaccatgcgcctgggcgctttcccatgcgctattgcctccggctcgcgcgcctatcaggtgtacaaggcgtcgtccattatggaacgtcaccgtcaccgttttgagttcaacaacaagtataaagacttgtttgaaaagaacggcatgatggcttccggtatctgcaaagaacgtgacctggtcgagattgtggaacttcctgatcacccatggtttgtcggcgtgcagttccatccggaattcaaatcaaagcccttggctccgcaccctctcttcgtgcattttgttaaagcaagcctgaagaagaagtaa

SEQ ID NO: 31067 - protein, 554 aa, Bdellovibrio bacteriovorus HD100
MAKRKTTTKKVSTAKSTKKTLKQKFIFVTGGVVSSIGKGLTAASLGALLEGRGHKVTIMKFDPYLNVDPGTMSPLQHGEVYVTEDGAETDLDLGHYERFTSALMNRSNSVSTGQIYDTVLNRERRGDYLGGTVQVIPHITEEIKARIYEAAQGSEIILVEIGGTVGDIESQPFLEAIRQMRIDVGQENSVLVHVTYVPYIAAAGELKSKPTQHSVKELREIGLQPDFLVCRSEKVIDDNLKAKIGLFCSVKPENVIAAQDSRFIYEVPLALHREKLDELIVARLGLSAGKLNMKGWQNLVKILGNPSHTVKIGVVGKYVDLKESYKSLHEALVHGGVANNARVEIIYVDSEKVTDKTVHSLLGKVDGILVPGGFGTRGVEGKITAIKYAREKRVPFFGICFGMQLSAIEFARNVCGIKDATSREFHAENKRTGNFVIDSMAEQRGVINKGGTMRLGAFPCAIASGSRAYQVYKASSIMERHRHRFEFNNKYKDLFEKNGMMASGICKERDLVEIVELPDHPWFVGVQFHPEFKSKPLAPHPLFVHFVKASLKKK

SEQ ID NO: 31068 - DNA, 1743 bp, Magnaporthe grisea 70-15
  CDS (1)..(1743)
atgaagtatatcgtggtcaatggaggtgtcattagcggagtgggcaagggcattattgcctcgtccactggcctgcttttgaagtctgtcggcctcaaggtcacagccatcaagattgatccttatctcaatgttgatgcgggcaccatgaacccattggagcatggagaatgcttcgtcctgtccgacggcggcgaggtcgatctcgacatgggcaactacgagaggtatctcaacgtgaccttcactcgcggccacaacatcacaaccggtcagatctacaaggaggtcatcgacaaggagcgcagaggcgacttccttggcaagaccgtccaaatagtaccacacattaccgatgccatccaggagcggatcgagcgcgtcgcgcgcattccggtcgataactcgggccaggagccggacgtctgcatcatcgagctcggaggtaccgtcggtgacatcgagtccatgcccttcgtcgaggcactcacccagctgcgccacaagtacggccgcagcggcttcttcagcattcacgtatcatttgtccccgccattcacggagagcaaaagactaagcccacacagcactcggttaagacggtccgaagtgcaggcctgatccctgacttgctgtgttcccgctgtaacaaagggttggaacagagcacggtgaacaagatcgcccagatgtgccagctcgagcctgagcaggttcttgtagtttatgacatgccctccatctaccaagtgcccatgctgctcgaccagcaaggtttggtcactcagctgaaggcgtcgctcggccttgacagcatcccacgggacccagctcgcttgcagcatggatcggagatgtggaacgtgtggaaggacacagtcggcgccatggacagcgagggcaaggtcaccattgccttggtaggcaagtacacagagctgcacgactcgtatctttccgtcatcaaggcactggagcactcgtccatgaagtgcaggcgcaagcttgacttgcaatgggtcgactcggagcatcttgagcctaaaactgacaaggaacaatttgacgccgcttgggagaaggtcaagtcggctgatggaattcttgttcccggtggcttcggaaaccgaggcactgagggtatgattgcggcagccaagtgggctcgtgagcagagcaagccttacctcggagtctgccttggcatgcagcttgctgttgtggagattgcccgcaacatctgcaagcttgagggcgcgacgtcagaggagtttaatggcctggcggagcacaaggtgatcattttcatgccagagattgacaagaccacaatgggaggtactatgcgtcttggtctgcacgacacccattttcagcctggcagcgagggcagcaagatccgcgccctttatggcaatggtcccgttgccagggaacgccacaggcaccgttatgaggtcaacccgcagtacattgaccagcttcagaaggaggctggcctccagttcctgggcaaggacgacaagggtgagagaatggagatcatagagctgaagggtcacccttactttgttggcgttcagtaccaccccgagtatctcagcagggtgttggacccgagtaagccgttcctcggtctcgttgccgccgcttcgggatgcttagaaaaggtcacgaccgacgtgctggcggagcacaagaatggtgtcaatggcgtcaacggcaacggaaggcacttttaa

SEQ ID NO: 31069 - protein, 580 aa, Magnaporthe grisea 70-15
MKYIVVNGGVISGVGKGIIASSTGLLLKSVGLKVTAIKIDPYLNVDAGTMNPLEHGECFVLSDGGEVDLDMGNYERYLNVTFTRGHNITTGQIYKEVIDKERRGDFLGKTVQIVPHITDAIQERIERVARIPVDNSGQEPDVCIIELGGTVGDIESMPFVEALTQLRHKYGRSGFFSIHVSFVPAIHGEQKTKPTQHSVKTVRSAGLIPDLLCSRCNKGLEQSTVNKIAQMCQLEPEQVLVVYDMPSIYQVPMLLDQQGLVTQLKASLGLDSIPRDPARLQHGSEMWNVWKDTVGAMDSEGKVTIALVGKYTELHDSYLSVIKALEHSSMKCRRKLDLQWVDSEHLEPKTDKEQFDAAWEKVKSADGILVPGGFGNRGTEGMIAAAKWAREQSKPYLGVCLGMQLAVVEIARNICKLEGATSEEFNGLAEHKVIIFMPEIDKTTMGGTMRLGLHDTHFQPGSEGSKIRALYGNGPVARERHRHRYEVNPQYIDQLQKEAGLQFLGKDDKGERMEIIELKGHPYFVGVQYHPEYLSRVLDPSKPFLGLVAAASGCLEKVTTDVLAEHKNGVNGVNGNGRHF

SEQ ID NO: 31070 - DNA, 1737 bp, Kluyveromyces lactis NRRL Y-1140
  CDS (1)..(1737)
atgaagtacgtcgttgtatctggtggtgtcatttcaggtattggtaagggggtgttagcctcgagcaccggtatgttgttgaaaaccctaggtttgaaagtaacatccatcaaaatcgatccatacatgaacttggatgctggtacaatgtctccattggagcacggtgaatgctttgttttgaacgatggtggtgagaccgatttagatttgggtaactatgaacgttacctaaatgtgactttaactaaggaccataatatcactactggtaagatctattcccatgtcatcgctaaggaacgtaaaggtgattatttgggtaagacagttcaagttgtgcctcatttgactaatgctatccaagattggattgagcgtgtttctaaaatcccagttgacaacactggtttagaaccagacgtttgtatcattgaattaggtggtactgtcggtgatattgaatctgcgccattcgtcgaggctttaagacaattccaattcagagttggaagggaaaactttgccttgattcatgtgtctttagttccagttattcatggtgaacaaaagactaagccaactcaagctgctatcaaagacctgagatctttgggtttaactccagatatgattgcatgtcgttgtaccgaaaagctagatcagccaaccattgacaaaatcgctatgttctgtcatgttggtcctgaacaagtggttaatgtccatgatgttaactcgacatatcacgtcccacttttgttgttagaacagaagatgattcactacttagctgaaagattaagtatatcgaagattgaactatccattgaagacactcaaagaggtgatgatctattgcaaagatggaagaatctaacttctaacattgacgaatctcttgaaactgtaaagattgctttggttggaaaatacacaaacttgaaagattcatatctttctaccattaaagcattggaacactcctctatgagatgtaaacgtaagttagaaatcatttgggttgaagcatcagatttggaaccagaaactaatgaaaatgtggaaaataaggccaagttccatcacgcatggaactgtatttctatagcagatggtattctagtcccaggtgggttcggtagtagaggtaccgaaggtatggttcttgcagccaaatgggctagagaaaacaacattccatatttgggtgtttgtttaggtctacaaattgctaccattgaatttgtaagaaacgtcttgggtaacaaaaacggtacatctgctgaattcttccctgaatctaacgaagaagatcatgtcgttgtatacatgcctgaaatagacaaggaaaacatgggtggtactatgagacttggattaagaccaactatctttgagcacgacacagaatggagcaagattagaaagctatacggtggcggatcacaggtcgaggagagacaccgtcatcgttacgaaatcaaccctaaactaatcgaatctttagaaaaccatggattgaaatttgtcggtagagacgaaacgggtcaaagatgcgaaattttagaacttgaaaaccatccatatttcgttgctactcaataccatccagaatacatgtccaaggttttggacccatctacgccattcttgggtttagttgccgctgcttctgatatgttaaacgaggtcattgaagccagaacctctgaaacaggtaaggctgatttctaa

SEQ ID NO: 31071 - protein, 578 aa, Kluyveromyces lactis NRRL Y-1140
MKYVVVSGGVISGIGKGVLASSTGMLLKTLGLKVTSIKIDPYMNLDAGTMSPLEHGECFVLNDGGETDLDLGNYERYLNVTLTKDHNITTGKIYSHVIAKERKGDYLGKTVQVVPHLTNAIQDWIERVSKIPVDNTGLEPDVCIIELGGTVGDIESAPFVEALRQFQFRVGRENFALIHVSLVPVIHGEQKTKPTQAAIKDLRSLGLTPDMIACRCTEKLDQPTIDKIAMFCHVGPEQVVNVHDVNSTYHVPLLLLEQKMIHYLAERLSISKIELSIEDTQRGDDLLQRWKNLTSNIDESLETVKIALVGKYTNLKDSYLSTIKALEHSSMRCKRKLEIIWVEASDLEPETNENVENKAKFHHAWNCISIADGILVPGGFGSRGTEGMVLAAKWARENNIPYLGVCLGLQIATIEFVRNVLGNKNGTSAEFFPESNEEDHVVVYMPEIDKENMGGTMRLGLRPTIFEHDTEWSKIRKLYGGGSQVEERHRHRYEINPKLIESLENHGLKFVGRDETGQRCEILELENHPYFVATQYHPEYMSKVLDPSTPFLGLVAAASDMLNEVIEARTSETGKADF

SEQ ID NO: 31072 - DNA, 1728 bp, Debaryomyces hansenii CBS767
  CDS (1)..(1728)
atgaaatacgtcgttgtctctggtggtgtcatttctggtattggtaaaggtgttttagcatcttccaccgggttattatttaaaaccttaggttacagagtgacctctatcaaaattgatccatatatgaacattgatgctggtactatgtccccattagaacatggagagtgttttgttttgaatgacggtggagaagtcgatttagatttaggtaattatgaaagatacttaaatactactttaactaaagaccataacatcactactggtaaaatctattctcatgtcatcgaaagagaaagaagaggagattacttgggtaaaaccgttcaagtcgttcctcatgtcaccggttcaattcaagactggattgaaagagttgcagttgttccagttgatgattcaggatcagaacctgatatttgtattattgaattaggtggtactgttggagatattgaaagtgctccgttcgttgaagctttgagacaatttcagttcagagttggtgtcgaaaacttcgctttaatccacgtttctttagttcctgttattcatggagaacaaaagacaaagccaactcaagctgccattaaagatttaagatctttaggtttgactcctgatatgattgcttgtagatgtcaagaacaattagaaattgctactattgaaaagattggaatgttttgtcatgttggtcctgaacaagtgattgctgttcatgatgttaactcaacttaccacgttccattattgttaaaagaactgagaatgatgaaattcttagaaaagaaattgaatttagatgcaaataaattatccaaggaagctttgtctaagggtgaacatttattaactagatggagaacattaacatctcaacatgataactcttttgaaaccactactattgcattagttggtaaatatactaatttgaaagattcttacttgtcagttattaaagctttagaacattcgtctatgagttgcaagagaaagttgaaaattgaatgggttgaatctactgacttagaagaagcctcgaaagaaaataatttggccgattatcacaaggcatggcactcaatctgccaagccgatggtatattggttccaggtggttttggtaatcgtggtattgaagggatggttgctgccgctaaatatgcaagagaaaacaatgttccatacttgggtgtttgtttgggtttgcaaattgcggtcattgaattcgttagaaatgttttaggttattctaattccacttcaatggaatttgatgctactgtcgaagaaaagactgcatccgttgtttatatgcctgatgttgatcaggttaaattaggtggtactatgagattaggtatccacagcaccaaatttactgacggctcggaatggtcaaaattaagaaaattgtatggtggtgctgattctgtcttggaaagacacagacacagatacgaagtcaatcctcaattaatagacgaaatagaaaccaagggcttaaatttcatcggtaaggatgaaactgagaagagaatggaattattcgaattgaaggatcacaaatttttctgtggcacgcaatatcatccagaatatttatccaaggtattggatccttccagacctttcttaggattagtggctgcagcctctggtatgttagatgaagtcttatccagaaaagacttgaactataaaggtgaattctaa

SEQ ID NO: 31073 - protein, 575 aa, Debaryomyces hansenii CBS767
MKYVVVSGGVISGIGKGVLASSTGLLFKTLGYRVTSIKIDPYMNIDAGTMSPLEHGECFVLNDGGEVDLDLGNYERYLNTTLTKDHNITTGKIYSHVIERERRGDYLGKTVQVVPHVTGSIQDWIERVAVVPVDDSGSEPDICIIELGGTVGDIESAPFVEALRQFQFRVGVENFALIHVSLVPVIHGEQKTKPTQAAIKDLRSLGLTPDMIACRCQEQLEIATIEKIGMFCHVGPEQVIAVHDVNSTYHVPLLLKELRMMKFLEKKLNLDANKLSKEALSKGEHLLTRWRTLTSQHDNSFETTTIALVGKYTNLKDSYLSVIKALEHSSMSCKRKLKIEWVESTDLEEASKENNLADYHKAWHSICQADGILVPGGFGNRGIEGMVAAAKYARENNVPYLGVCLGLQIAVIEFVRNVLGYSNSTSMEFDATVEEKTASVVYMPDVDQVKLGGTMRLGIHSTKFTDGSEWSKLRKLYGGADSVLERHRHRYEVNPQLIDEIETKGLNFIGKDETEKRMELFELKDHKFFCGTQYHPEYLSKVLDPSRPFLGLVAAASGMLDEVLSRKDLNYKGEF

SEQ ID NO: 31074 - DNA, 1719 bp, Yarrowia lipolytica CLIB122
  CDS (1)..(1719)
atgaaatacgtggttgtctctggaggtgtcatttccggcattggtaagggtgtcttggcctcttccactggccttttgctcaagaccaagggtctcaaggtcacatccatcaaaattgatccctacatgaacattgacgccggaacgatgtctcctctggagcacggtgaggtttttgttctcaacgatggtggtgaagctgatttggatctcggtaactacgagcggtacatcaacgtcacccttactcgggaccacaacattaccaccggtaagatctaccagcacgtgattgagcgagagagacgaggtgagtatcttggaaagactgtgcagattgttcctcatctcaccaacgccattcaagactggattgagcgtgtggccaagattcccgtcgatgacactgacgaggagcctgacgtctgcatcatcgaactcggaggtactgttggtgacattgagtccgctccttttgttgaggctcttcggcagttccagttccgtgtcggtcctgacaatttcgcactcatccacgtgtctctcgtgcccttcattcacggtgagcagaaaaccaagcctacccaggccgccatcaaggacttgcgatcgctgggtctgacccccgacattattgcatgccgatgtcaggctgagcttgaggctagtacaatcaacaagattgccatgttctgcaaccttggtcccaagcaggtgcttgatgtgtacgacgtcaactctacctaccatgttcctcttcttctgcagaagcaaggaattatcgacttgctcacccgaaaattggctctcgaccaaatctcgatctcaggaagattccgagatcgtggtaatggtctgctcggaaaatggcgacagctaactactcagcatgaccggtcgttcgagactgtttccattgcaatggttggaaagtacacacatcttcaggattcttacctatctgtcattaaggccctggagcactccgccatgaagtgccaccgaagactcgagattctgtggattgagtcgtccgacttggagtctgagtcagatgagaaggcaaagtaccaccaggcttggactaagttgtgccgggcagatggtatccttgttcctggtggttttggcactcgaggaactgagggtatgatcaaggccgcaaactgggcccgagaaaacaagaagccttaccttggtatctgtctgggtcttcagattgccgtcatcgagtttgcacgaaatgtctgtgagcttgatggggccaactcggaagagctggaccctgagaccgagaccaaggctgtggttttcatgcctgagggagaccgagaaaagctcggaggtactatgcgacttggcgctcgaactactgtattccagcccggctctgagaagtctaagattcgaaagctgtacggctctgccgacagtgtcgaggagcgacaccgacaccgatacgaggttaaccctgagctggtggagacctttgaggctgccggtctcaagtttgttggcagagacaccgctggccaacgaatgcaggtgcttgagcttgataaccacccttactacgtggctactcagtaccaccccgagtacctttcccgagtgctggatccttctagacctatcttgggtctcgtggctgctgcctgtggtaagcttgatgagatcaccaagggccagtctgccgaaattgccagcggtgagttttaa

SEQ ID NO: 31075 - protein, 572 aa, Yarrowia lipolytica CLIB122
MKYVVVSGGVISGIGKGVLASSTGLLLKTKGLKVTSIKIDPYMNIDAGTMSPLEHGEVFVLNDGGEADLDLGNYERYINVTLTRDHNITTGKIYQHVIERERRGEYLGKTVQIVPHLTNAIQDWIERVAKIPVDDTDEEPDVCIIELGGTVGDIESAPFVEALRQFQFRVGPDNFALIHVSLVPFIHGEQKTKPTQAAIKDLRSLGLTPDIIACRCQAELEASTINKIAMFCNLGPKQVLDVYDVNSTYHVPLLLQKQGIIDLLTRKLALDQISISGRFRDRGNGLLGKWRQLTTQHDRSFETVSIAMVGKYTHLQDSYLSVIKALEHSAMKCHRRLEILWIESSDLESESDEKAKYHQAWTKLCRADGILVPGGFGTRGTEGMIKAANWARENKKPYLGICLGLQIAVIEFARNVCELDGANSEELDPETETKAVVFMPEGDREKLGGTMRLGARTTVFQPGSEKSKIRKLYGSADSVEERHRHRYEVNPELVETFEAAGLKFVGRDTAGQRMQVLELDNHPYYVATQYHPEYLSRVLDPSRPILGLVAAACGKLDEITKGQSAEIASGEF

SEQ ID NO: 31076 - DNA, 1815 bp, Apis mellifera
  CDS (1)..(1815)
atgaaatatattttagtaactggtggtgtaattagtggagtcggcaaaggtgttattgcgagttcatttggaactatacttaaacattgcggtattcatgtgacatctattaagatagatccttatataaatattgatgccggtactttttctccttacgagcatggagaagtatatgtattagatgatggtggagaagtagatcttgatttaggaaattatgagcgttttttagatattactttacatagagataataatatcacaacaggaaaaatttatcaacatgtaatatcaaaagaaagacatggtgattatttgggaaaaactgttcaagtaatacctcatataacagatgctattcaagaatgggttgaaagagttgcaaagcaatcagtaacaaaagatggtgataaaccagatgtttgcattgttgaattaggtggaactataggagatattgaaggaatgccatttgtagaagcttttagacaatttcagtttagagtaaaaaaagaaaatttttgctgtgcacatgtatctttagtgccacaaccaagatctacaggagaaccgaaaacaaaaccaactcaatctagtgtaagagaattacgtggattaggtttgtctcctgatcttatagtttgcagatctgaacaaccaataggcgattctgtaaaagaaaaaatttcgaatttttgtcatgttgctccagaacaagtcataactatacatgatttgtcatctatatatcgtgttcctttattgatggaatctcaaggtgtaattgaatttttaaatgataggctacaattaaatatcggaatgccacgccctcgatattttatgcgaaaatggagagatttggcagatcgtattgatcatttacgaaaagaagtaaatattgcattagtaggaaaatatacaaaattagaagattcttatgcatcagttacaaaagcattacaacatgcttgtattcaagttggttataaacttaaattaacatatatagaagctgataatttagaacaaagtacgaaaacaatagatcctgtattatatcatgaagcttggcaacaactttgtaaaagcaatggtgttgttgtaccaggtggttttggtaaaagaggtatgcaaggaaaaatggaagcatgtaaatggtgtagaacaaacgataaaccattcctaggtatttgtttgggattacaagtagcagtagttgaattcgcaaggaatgttttaaatatagaatctgcaaatagcatggaaattgatccagaaacagatcatcctctcgttatagatatgcctgaatataatccaaaacaaatgggtggaactatgagacttggaaaaagatatactcggtttacagaaaataattctgttataaaacaattgtatggtaataaggattgcatagaagaaagacatagacatcgttatgaaatcaatccaaattatattaatgatttagaagaagctggattgaagttcgtaggtcatgatgaagaaaatttacgcatggaaatagctgaattagaaggacatagttattatgttgcaacacaatttcatccagaatatttgtctagaccgctgaaaccttcaccaccatttttaggactaattttagctagtgtcggtaaattaaagcaatacttagttaaaggttgtaaactttcacctcaagcaatcagtgataatgaatcagataacgaatgtcttgttgattcaatagcaaagcaacaaacagtaagcgaaactagtatgagtggtagtactacatcttacaatgatttgattgaatag

SEQ ID NO: 31077 - protein, 604 aa, Apis mellifera
MKYILVTGGVISGVGKGVIASSFGTILKHCGIHVTSIKIDPYINIDAGTFSPYEHGEVYVLDDGGEVDLDLGNYERFLDITLHRDNNITTGKIYQHVISKERHGDYLGKTVQVIPHITDAIQEWVERVAKQSVTKDGDKPDVCIVELGGTIGDIEGMPFVEAFRQFQFRVKKENFCCAHVSLVPQPRSTGEPKTKPTQSSVRELRGLGLSPDLIVCRSEQPIGDSVKEKISNFCHVAPEQVITIHDLSSIYRVPLLMESQGVIEFLNDRLQLNIGMPRPRYFMRKWRDLADRIDHLRKEVNIALVGKYTKLEDSYASVTKALQHACIQVGYKLKLTYIEADNLEQSTKTIDPVLYHEAWQQLCKSNGVVVPGGFGKRGMQGKMEACKWCRTNDKPFLGICLGLQVAVVEFARNVLNIESANSMEIDPETDHPLVIDMPEYNPKQMGGTMRLGKRYTRFTENNSVIKQLYGNKDCIEERHRHRYEINPNYINDLEEAGLKFVGHDEENLRMEIAELEGHSYYVATQFHPEYLSRPLKPSPPFLGLILASVGKLKQYLVKGCKLSPQAISDNESDNECLVDSIAKQQTVSETSMSGSTTSYNDLIE

SEQ ID NO: 31078 - DNA, 1650 bp, Aspergillus nidulans FGSC A4
  CDS (1)..(1650)
atgaagtatgttctggtttccggtggcgttatatccggtgtcggaaagggtattatcgcaagcagtaccgggctgctgctgaaaactgctggtttgtccgtctcgagcatcaagattgatccctacttgaatcccgatgctgggcttatgaaccccttggagcacggagaatgcttcgtcttggacgatggaggtgaagccgacttggacttggggaactacgagcggtaccttggtgtcacactcgggcgggacaacaatatcactaccggcaagatttaccaacatgtgattgagaaggagcgccggggtgactacttgggaaagacggtcgagttgggaggaactgtcggagatatcgagagcgcacccttcgttgaggcaatgagccaacttcaacgccgcgttggaaaggccaacttccttcagatccacgtcagctacgtgcctttaattggctcagagcagaagacgaagccgacacaacgagcgattagcgatgtgcgaagtggtggtctcaggccagacctgatcgcctgccgttgcgagactccccttgaggagatgaccatccgcaagatcgccggtacctgtcaggtggagcgtgatcaagttgtcggtgtccacaacgtgccctctacttaccaggtgcctatccttctggaaaaccaagggttcctcaacaccatcaaggatcttcttgaaattcggaacttgcacattgagcccaagtacgtggagctcggcaagtccatgtggcacaaatggcacggtttggccatgagccaagaccatgtctttgacacggtctcgatcgtgcttgttggcaagtacacaagtctgcatgactcatatctgagtgtaacaaaagcgttggaacacgcctctatgcactgccagaagaaacttaacctcatctgggtggagtcgtctcatctggaagaggaccaccagtctataaatcctgccgagtattacaaagcttggcacgccgtttccaccgcggacggcattcttgttccgggtggttttggccagcgcggtactgaaggcatggtcaagtgtgccgaatgggcgcgtacaaagaacgtccctttcctcggaatctgcttgggtctgcaggtcgccgtcattgagtacgcccgcaacgtctgcggtatgaccaaggccgacagtgccgagttcaacgaggaatgtgagcagccggccatcgtctacatgccggaaattgacaagaccaagatgggtggcacgatgcgtcttggaaagcgccctaccatcttccaggagggcaccgagtggtcaaaattccgcaagctctacggcaacaagaaggagatctgggagcgccaccgccaccgctacgaggtcaaccccgatctcgtggagaaactcgaggcggctggcctgtcgtttattggcaaggacgagaccggcaagcggatggaggtcattgagcttaaggaccaccggtggtatgttggtgtccagttccacccggagtacctgagccgcgtcatcacgcccagcaagagtttcctgggtttcttcgcggcggctgctggttgtcttgacgagatcaccgagactttccagggagcacatgaccttagccatctacaggtgcggcccaagattgaatcaatttag

SEQ ID NO: 31079 - protein, 549 aa, Aspergillus nidulans FGSC A4
MKYVLVSGGVISGVGKGIIASSTGLLLKTAGLSVSSIKIDPYLNPDAGLMNPLEHGECFVLDDGGEADLDLGNYERYLGVTLGRDNNITTGKIYQHVIEKERRGDYLGKTVELGGTVGDIESAPFVEAMSQLQRRVGKANFLQIHVSYVPLIGSEQKTKPTQRAISDVRSGGLRPDLIACRCETPLEEMTIRKIAGTCQVERDQVVGVHNVPSTYQVPILLENQGFLNTIKDLLEIRNLHIEPKYVELGKSMWHKWHGLAMSQDHVFDTVSIVLVGKYTSLHDSYLSVTKALEHASMHCQKKLNLIWVESSHLEEDHQSINPAEYYKAWHAVSTADGILVPGGFGQRGTEGMVKCAEWARTKNVPFLGICLGLQVAVIEYARNVCGMTKADSAEFNEECEQPAIVYMPEIDKTKMGGTMRLGKRPTIFQEGTEWSKFRKLYGNKKEIWERHRHRYEVNPDLVEKLEAAGLSFIGKDETGKRMEVIELKDHRWYVGVQFHPEYLSRVITPSKSFLGFFAAAAGCLDEITETFQGAHDLSHLQVRPKIESI

SEQ ID NO: 31080 - DNA, 1722 bp, Candida albicans SC5314
  CDS (1)..(1722): transl_table=12
atgaaatacgtcgttgtctcaggtggtgttatttccggtattggtaaaggtgttttagcttcttcaactgggttgttattcaaaactttagggttgagagttacttcaatcaaaattgacccttatatgaacatcgatgctggtaccatgtctccattagaacatggggaatgttttgttttagatgatggtggtgaagttgatttggatttgggtaattatgaacgttatttaaacattaccttgacaagaaaccacaacattaccactggtaaaatctattcgcatgttattgaaaaggaaagaaatggtgattacttgggtaaaaccgttcaagtagtccctcatatcaccaatgcaattcaagattggattgaaagagtggcacgtatccctgtcgatgatactggattggaaccagaagtttgtattgttgaacttggtggtaccgtcggtgacattgaaagtgctccttttgttgaagcattgagacaattccaattcagagtaggtaacgaaaattttgcattaatccatgtttctttggttcctgtcattcatggtgaacaaaagacaaaaccaacacaagcagcaatcaaagatttgagatcattggggttgactccagatatgattgcttgtagatgtcaagaagaattggaacatgctacaatcgagaagataggtatgttctgtcatgttggtccagaacaagttattgccgttcatgatgtcaactcaacttatcatgtcccattattattgaaacaacaaaaagtcatgaattacttaactaagagattagcaattggtgaaattgacaaacaatctttggctaagggtgaggcattgttgagcaaatggagacatttaacaagtagccatgacaagtcttttgaaactgtcactattgcattagttggaaagtatactcatttacacgattcatacttatcagttatcaagtcgttagaacacgcctccatgagatgtaacagaagattgaaaatcgaatgggtcgaatcttccgacttggaagaagacaccaaaaaagaaaacttatccaagtaccacaaggcatggcactttgtttgtcaagcagatggtattttagtacctggtggatttggttcaagaggtattgaaggtatggttgctgctgccaaatacgcaagagaaaacaatgttccttatttgggtgtttgtttaggtttacaaattgccgttattgagtttgtcagaagtgtattaggtgtttcccattctacttccatggaatttgatagtaatattgaagaaaaagatgcttccgtagtctacatgccagatgttgaccaagtcaaattaggaggaactatgagattgggaatccatcaaaccaaattcgtccaagactcagaatggtccaacttgagaaaattatatggtggcgctgatgcagtttacgaaagacacagacatagatacgaagtgaaccctctattgattgatgatattgaaaaacgaggcttaaaattcattggtaaagatgaaactgggaagagaatggagatgatcgaattaaaagatcataaattttttgttgggactcaatatcacccagaatacttgtcgaaagtattggatccatcacgaccattccttggtttggttgccgctgctgccggtatattagaagatgtcttgtctagagacgacttgaactacaaaggggaattttag

SEQ ID NO: 31081 - protein, 573 aa, Candida albicans SC5314
MKYVVVSGGVISGIGKGVLASSTGLLFKTLGLRVTSIKIDPYMNIDAGTMSPLEHGECFVLDDGGEVDLDLGNYERYLNITLTRNHNITTGKIYSHVIEKERNGDYLGKTVQVVPHITNAIQDWIERVARIPVDDTGLEPEVCIVELGGTVGDIESAPFVEALRQFQFRVGNENFALIHVSLVPVIHGEQKTKPTQAAIKDLRSLGLTPDMIACRCQEELEHATIEKIGMFCHVGPEQVIAVHDVNSTYHVPLLLKQQKVMNYLTKRLAIGEIDKQSLAKGEALLSKWRHLTSSHDKSFETVTIALVGKYTHLHDSYLSVIKSLEHASMRCNRRLKIEWVESSDLEEDTKKENLSKYHKAWHFVCQADGILVPGGFGSRGIEGMVAAAKYARENNVPYLGVCLGLQIAVIEFVRSVLGVSHSTSMEFDSNIEEKDASVVYMPDVDQVKLGGTMRLGIHQTKFVQDSEWSNLRKLYGGADAVYERHRHRYEVNPLLIDDIEKRGLKFIGKDETGKRMEMIELKDHKFFVGTQYHPEYLSKVLDPSRPFLGLVAAAAGILEDVLSRDDLNYKGEF

SEQ ID NO: 31082 - DNA, 1878 bp, Cryptococcus neoformans var. neoformans B-3501A
  CDS (1)..(1878)
atggtcaaatacattctcgtttgtggtggtgtcatctcgggtattggcaagggtgtcattgcttctagtaccggcttgatccttaagaccgctggcttaaaggtcacttctatcaagattgacccttatatgaacattgatgccggtactatggcccctaccgagcacggcgaagtctacgtcctcaatgatggtggtgagaccgatcttgacctcggtaactacgagcgatacctcgacgtttccctcaacaaagacaataatgtgactaccgggaaggtataccagcatgttattgaccgtgagcgacggggagattacctgggaaaaactgttcagattgtccctcatttgaccaacgccatccaggactgggtcgagcgagtttccaaggtccctgtggacgagaccggagaggagcctgacgtctgtatcatcgagctcggtggtaccgttggtgatattgaatctatgcctttcatcgaggccatgcgtcaatttcaattccgagtcggccacgaaaactttgctcttgtctacgtctccctcatccccgtcgtcggcggcgaacaaaagacaaagcctacccaggccggtgtgagagacctccgaggtttgggccttctccccgacttaattgcctgtcgatgcacagagaagcttcttacagccactatggagaaagtctccatgttctgccatgtttctccccgtcaagtccttggtgtccacaatgtttcttccacttaccatgttccgctgctccttcaggaacagggtatgctgaagttcctttgggagaggctcagtttgtcttccatcaacatgaggcctgagttgaaggccaggggtgagaagataatggagaagtggcaggtgttgactactggtttggagagatgtttcgagactgtggagattgttttggtcggcaagtacattactttggaagactcgtacatgagcgttgtcaagtctcttgaacacgctgctatgcgatgtggtcgaaagcttatccttcactgggttgactcttccgaccttgagcttactatgcagactgaaaaccctatcaagttccataacgcctggcaagctgtttgctccgctaggggtattatcgttcccggtggtttcggtcttcgaggtaccgagggtatgatcgcggctgccaaatgggcgcgtgaacaaaacattccctacctcggtatctgtctcggtttccaagtcgccgttatcgaatgggctcgacacgtctgcggtctcgagaaggccaactctgccgagctcgttcccgactctcctcaccctgtcatctgtttcatgcctgaaatctccaagacccatatgggcggaaccatgcgtctcggtcttagaccgaccatctttgagcctaacacggagaagagcaagcttaggaggttgtacgggagcaggaacattgcttgggagaggcataggcataggtacgaggttgagccgaagtatgtcgagcagctcgaggcccctgggggtatgaggtttattggtaaggatgaaagaggagagcgaatgcaaatgctcgagttggatgatcacccctactttgtcggtctccaagcccaccctgagttctgctctcgaccactcaacccttctcctcctttcgttggtctcatcgccgccgcttgcggtctcgacgttcttgaagaacaactcgccaataacgagaagaactatgtggatcctcaccctgagagcgataaggtcatccctgagtcagaggcggctacgcaggccggtaaggggaagagccagtctgtggaaggtgttagagtaaagcatgaggatgtggtggatgctttgggtaagaagttggatgaggttgcggagatctag

SEQ ID NO: 31083 - protein, 625 aa, Cryptococcus neoformans var. neoformans B-3501A
MVKYILVCGGVISGIGKGVIASSTGLILKTAGLKVTSIKIDPYMNIDAGTMAPTEHGEVYVLNDGGETDLDLGNYERYLDVSLNKDNNVTTGKVYQHVIDRERRGDYLGKTVQIVPHLTNAIQDWVERVSKVPVDETGEEPDVCIIELGGTVGDIESMPFIEAMRQFQFRVGHENFALVYVSLIPVVGGEQKTKPTQAGVRDLRGLGLLPDLIACRCTEKLLTATMEKVSMFCHVSPRQVLGVHNVSSTYHVPLLLQEQGMLKFLWERLSLSSINMRPELKARGEKIMEKWQVLTTGLERCFETVEIVLVGKYITLEDSYMSVVKSLEHAAMRCGRKLILHWVDSSDLELTMQTENPIKFHNAWQAVCSARGIIVPGGFGLRGTEGMIAAAKWAREQNIPYLGICLGFQVAVIEWARHVCGLEKANSAELVPDSPHPVICFMPEISKTHMGGTMRLGLRPTIFEPNTEKSKLRRLYGSRNIAWERHRHRYEVEPKYVEQLEAPGGMRFIGKDERGERMQMLELDDHPYFVGLQAHPEFCSRPLNPSPPFVGLIAAACGLDVLEEQLANNEKNYVDPHPESDKVIPESEAATQAGKGKSQSVEGVRVKHEDVVDALGKKLDEVAEI

SEQ ID NO: 31084 - DNA, 1611 bp, Prochlorococcus marinus str. AS9601
  CDS (1)..(1611): transl_table=11
atgtcaaaatttgtatttgtcactggaggagtagtttctagcattggtaaagggattgtagctgcaagcttaggaagattattaaaatctagaggatatagtgtttcaatattaaaactagatccatatctaaatgttgatccaggaacaatgagcccttttcaacatggagaagtatttgtaaccgaagatggggctgaaaccgatctagatttaggtcactacgaaagatttactgatactgcaatgactaggttaaatagtgtgactactggatctatttatcaagcagttattaataaagaaagaagaggcaattataacggtggaactgtgcaagtaatacctcacataacgggagaaattagagaaaggattcatagagtagccgctaacagcaatgcagatattattattactgaaattggtggaacagttggtgatattgaatctctaccttttttagaggcaataagagaattcaaaaatgatgtcaataggaacgatgttgcatacatacacgtaacattacttccttacatcaaaacctctggcgaaataaaaactaaaccaacacaacattcagtgaaagaattaagatcaattggaattcagccagatttacttgtatgccgaagtgataaatctatcaatgaagctcttaaaaaaaagcttagtggtttttgcggtgtcaatatcaactctgtaattgaagctttagacgcagacagtatatattctgtacctctttctttaaaaaaagaaggtttatgcaaagaaaccttgaagtatttagaccttgaagataaaaaatgtgatttgaaaaattgggagcaactaatacacaacctaagaaatcctggagatccaataaaagttgcacttgtaggcaaatatattgaacttggagatgcatatttatccgttgttgaagctttaagacatgcatgcattgaacaaagggctttattagatttacattgggtaagtgctgaaatgatagaaaacaattcagcagaaacttacttaaatgaagttgatgcaattgttgtacccgggggatttggtaatagaggagtaaatggaaaaatttcggctataaaattcgcaagagaaaataaaattccctttttaggtttgtgccttggcatgcaatgtgcagttattgaatgggccaggaatgtagctaatcttccagatgcatctagttcagaactagacccaaacactccaaatccagtgatacatttattaccagaacaggaagatgtagttgatttaggtgggacaatgagacttggagtttatccatgtagactgacaaaaaatacaactggaaaaaacttatatgatgaggatgttatttatgagagacatcggcatagatacgaatttaataattactacaaacaaagttttttagattctggatacaaaattagtggtacatcaccagatggcagattagttgagttaattgagttagaaaatcatccatacttcttagcctgtcaatatcatcctgagtttttatcaagacctggcaaacctcatcctttatttaaaggattaataaaagcctctcaagataagttaactcaatcaaattaa

SEQ ID NO: 31085 - protein, 536 aa, Prochlorococcus marinus str. AS9601
MSKFVFVTGGVVSSIGKGIVAASLGRLLKSRGYSVSILKLDPYLNVDPGTMSPFQHGEVFVTEDGAETDLDLGHYERFTDTAMTRLNSVTTGSIYQAVINKERRGNYNGGTVQVIPHITGEIRERIHRVAANSNADIIITEIGGTVGDIESLPFLEAIREFKNDVNRNDVAYIHVTLLPYIKTSGEIKTKPTQHSVKELRSIGIQPDLLVCRSDKSINEALKKKLSGFCGVNINSVIEALDADSIYSVPLSLKKEGLCKETLKYLDLEDKKCDLKNWEQLIHNLRNPGDPIKVALVGKYIELGDAYLSVVEALRHACIEQRALLDLHWVSAEMIENNSAETYLNEVDAIVVPGGFGNRGVNGKISAIKFARENKIPFLGLCLGMQCAVIEWARNVANLPDASSSELDPNTPNPVIHLLPEQEDVVDLGGTMRLGVYPCRLTKNTTGKNLYDEDVIYERHRHRYEFNNYYKQSFLDSGYKISGTSPDGRLVELIELENHPYFLACQYHPEFLSRPGKPHPLFKGLIKASQDKLTQSN

SEQ ID NO: 31086 - DNA, 1611 bp, Prochlorococcus marinus str. MIT 9515
  CDS (1)..(1611): transl_table=11
atgtcaaaatttgtttttgttactgggggagttgtttctagcattggtaaaggtattgttgccgcaagcttaggaagattattaaagtcaagaggatatagcgtttcaatactcaaattagatccttatctcaatgttgaccctggaacaatgagcccttttcagcatggtgaagttttcgtgacagaagatggggctgaaacagatttagatttaggacactatgaaagatttactgacactgcaatgactcgcttaaatagtgtcacaacaggatctatatatcaagcagtcattaataaagaaagaagaggtagttacaatgggggcacagtgcaagttattcctcacataacaggtgaaataagagaaaggattcatagagtagcatctaacagcaatgctgatattgttatcactgaaattggtggaacagtaggagatattgaatctctgccatttttagaggcaataagagaatttaaaaatgacgttaataaaaatgatgttacgtatatccatgtaactttactcccatatatcaaaacttcaggtgaaataaaaactaaacctactcaacattctgttaaagaattaagatcaatcggcatacaaccagatttacttgtatgcagaagtgataaagaaattaacgacagtcttaaaagaaaacttagtggtttctgcggagttaatcttaattgtgtaattgaagcattggatgctgacagtatttattctgtcccactttcattaaaaaaagagggtttatgtaaagagactttgagatgtctagatctagaggataaggaatgtgatttagaaagttgggaaaaaataattcataatcttagaaatcctggtaaccctataaaagttgctttagttggaaaatatatagaacttggtgacgcatatctttcagtagtggaagcattaagacatgcttgcattgaacaaaaggctttcttagatttgcattgggtcagtgctgaaatgatcgaagagaaatcagccgaagagtatttacatgatgttgatgcaattgttgtaccgggaggatttggaaatagaggagtaaatggaaagattgcatcaataaaatttgcaagagaaaaaaaaattcctttcctaggtttatgtttaggtatgcaatgtgcagtaatagagtgggccagaaatgtggtccaattaccgggcgcatctagctcggaattagacccagagtctgagaatcctgttatacatttattaccagaacaagaagatattgttgatctaggaggcactatgagattaggagtttatccttgcagacttcaaaaaaatacaactggtaaggaactttataatgaagatgttatatatgagagacatagacatagatacgaatttaataatttctacaaacaaatttttgtagattctggatacaaaatcagtggtacatcacctgatggcagattagtagagttgattgagttagttaatcatccatattttttagcatgccaataccatcctgaattcttatcgagaccaggaaagccccatcctttatttaaaggcttgataaaagcatctcgagaaaaattagagcaatcaaaataa

SEQ ID NO: 31087 - protein, 536 aa, Prochlorococcus marinus str. MIT 9515
MSKFVFVTGGVVSSIGKGIVAASLGRLLKSRGYSVSILKLDPYLNVDPGTMSPFQHGEVFVTEDGAETDLDLGHYERFTDTAMTRLNSVTTGSIYQAVINKERRGSYNGGTVQVIPHITGEIRERIHRVASNSNADIVITEIGGTVGDIESLPFLEAIREFKNDVNKNDVTYIHVTLLPYIKTSGEIKTKPTQHSVKELRSIGIQPDLLVCRSDKEINDSLKRKLSGFCGVNLNCVIEALDADSIYSVPLSLKKEGLCKETLRCLDLEDKECDLESWEKIIHNLRNPGNPIKVALVGKYIELGDAYLSVVEALRHACIEQKAFLDLHWVSAEMIEEKSAEEYLHDVDAIVVPGGFGNRGVNGKIASIKFAREKKIPFLGLCLGMQCAVIEWARNVVQLPGASSSELDPESENPVIHLLPEQEDIVDLGGTMRLGVYPCRLQKNTTGKELYNEDVIYERHRHRYEFNNFYKQIFVDSGYKISGTSPDGRLVELIELVNHPYFLACQYHPEFLSRPGKPHPLFKGLIKASREKLEQSK

SEQ ID NO: 31088 - DNA, 1668 bp, Prochlorococcus marinus str. NATL1A
  CDS (1)..(1668): transl_table=11
atggcaaaatttgttttcgtcactggtggtgtagtttcaagcattggcaaaggaattgttgccgcaagtcttggcagactacttaaatcaaaagggtacagtgtttcgattttgaagcttgacccatatttaaatgttgatcctgggacgatgagcccatttcaacatggagaagtttttgtaactgaagacggggctgaaactgatttggaccttgggcattatgagcgctttacagacactgcaatgtcaagactaaacagtgtcacgacaggttccatttatcaagctgttattaataaagaaagaagaggtgactatgacggaaggacggttcaagtaatcccccacatcactcgtgaaattcgcgaaagaattaaacgtgtagcaaacaatagtggtgcagatgtagtgatatcagaaattggaggaacagttggagatattgaatctctaccttttcttgaagcaataagagaatttaaaggagatgtaaaaagaaacgatgttgtttatgttcacgtcacattattgccttacataggtacatctggagaaattaaaaccaagccaacacagcactcagtaaaagaattgcgttctataggtattcagccagatattttagtttgtcgcagtgataggcctattaatgatgaattaaaaaataaaatagggggtttctgtggagttaactctgaagcggtcatagcatccttagatgctgacagtatttactcagtaccattagcgctcaaagatgagggactttgcaaggaagtattagattgcttggatctaaatgatcatgaaagtgatttaaaagactgggaacgattagtccataaattgcgcaatccaggtccttctgtcaaagttgcattagttggcaaatatgtacaattaaatgatgcctacttatcagtagtcgaagcattacgtcacgcatgtatctcgcatgatgcgtctttagatcttcactggatcaatgcggaaaacatagaatccgagggagctgaaaaactactgcagggaatggacgcaattgtcgttccaggaggttttggtaaccgtggcgtcaatgggaaaatagctgctattagatgggcaagggagcaaagagtaccttttttagggctttgcttaggtatgcaatgtgctgtcattgaatgggctcgcaatatcgctggtttagaagatgcatctagtgccgaactaaatccgaattcaaaacacccagtaattcacttacttccagaacaacaagacgtcgttgatctaggaggaacaatgagattaggcgtatatccttgtagacttcaagcaaacacaacaggacaaagtttatacaacgaagaagttgtttacgaaaggcatagacatcgttatgaattcaataattcatacagaactctactaatggaatctgggtatgtaattagtggtacttcacctgatggtcgattagtagagttaatagaattaaaaaatcacccattttttattgcatgtcaatatcatccagaattcctctctagaccaggaaaaccacaccctttatttggtggtttgattcaagccgcacaaatacgtgtaccatcctcaccgagtgaggcatttaatcctcaatcaaaaattattgaaaaaaaatcactagaacagcaatag

SEQ ID NO: 31089 - protein, 555 aa, Prochlorococcus marinus str. NATL1A
MAKFVFVTGGVVSSIGKGIVAASLGRLLKSKGYSVSILKLDPYLNVDPGTMSPFQHGEVFVTEDGAETDLDLGHYERFTDTAMSRLNSVTTGSIYQAVINKERRGDYDGRTVQVIPHITREIRERIKRVANNSGADVVISEIGGTVGDIESLPFLEAIREFKGDVKRNDVVYVHVTLLPYIGTSGEIKTKPTQHSVKELRSIGIQPDILVCRSDRPINDELKNKIGGFCGVNSEAVIASLDADSIYSVPLALKDEGLCKEVLDCLDLNDHESDLKDWERLVHKLRNPGPSVKVALVGKYVQLNDAYLSVVEALRHACISHDASLDLHWINAENIESEGAEKLLQGMDAIVVPGGFGNRGVNGKIAAIRWAREQRVPFLGLCLGMQCAVIEWARNIAGLEDASSAELNPNSKHPVIHLLPEQQDVVDLGGTMRLGVYPCRLQANTTGQSLYNEEVVYERHRHRYEFNNSYRTLLMESGYVISGTSPDGRLVELIELKNHPFFIACQYHPEFLSRPGKPHPLFGGLIQAAQIRVPSSPSEAFNPQSKIIEKKSLEQQ

SEQ ID NO: 31090 - DNA, 1677 bp, Prochlorococcus marinus str. MIT 9303
  CDS (1)..(1677): transl_table=11
atggccaagttcgtctttgttaccggtggagtcgtatcaagcatcggcaagggaattgtggcagcgagccttggtcgcctactcaagtcacgtggctacagcgtctcgatcctgaagctggatccctacctcaatgtggacccaggcaccatgagtccatttcaacatggtgaagtgttcgtcaccgaagacggcgccgaaaccgacttggatcttgggcactacgagcgctttactgacacagccatgtcacgcctcaatagcgtaaccactggctcgatctatcaagcagtcatcaataaggaacggcgcggcgactacaacggcggcactgtgcaagtgatcccccacatcactggcgagattcgcgaacgcatccaccgagtagcagccaatagtggcgcagatgtcgtgatcacagaaatcggcggcactgtcggagacatcgaatctctgcccttcctcgaagcaatccgtgaattccgtggtgacgtaggacgcaacgacctcgcctacatccatgtgaccctactgccgttcatcggcacatccggtgaactcaaaaccaagcccacacagcactccgttaaggagctgcgcgcaatcggcatacaaccagatgtactggtttgccgcagcgaccgcccaatcaatgaagacctaaagcgcaagatcgggggcttctgcggggtaccaaaccgggctgtcatccctgcccttgatgccgacagcatttatgccgtccccatctcattagaggaagagggcctctgtctagaaatgctggatgtactcaacctgactgaccatgacagtgacatgaaaaactgggttcagctggtacataagctgcgcaacccaggtcccgctgtgaaggtggccctagtcggaaaatatgtgcaactcaacgacgcctacctttcagtagtggaggccctgcgccatgcctgcctaacccaagatgcctccctagagctgtcttgggtctgcgcagaacagatcgaaacgcatggtcctgaaaacctcctcaaaggaatggatgctgttgtagtaccaggaggcttcggcaaccgtggcgtcgatggcaaaattgcagccattcgctgggcgagagaacaacgagtgccattcctagggctttgtctaggcatgcaatgcgctgtgatcgagtgggcacgcaaccaggcaggactcactggagccagcagtgccgagctggaacccgacaccagccatcctgttatccacctcctgccagagcaacaagacgtagtcgatctgggcggcacaatgaggcttggggtctatccatgccgcatagcaccagacacgttggcacagaagctttatggcgaagaagtcgtctacgaacgccaccgccatcgctatgaattcaacaactcctaccgcaacctatttattgaatccggctacaccatcagcggtagctcacccgatgggcgactcgtggaactgatcgaactgaaaggtcatcccttctttacagcctgccaataccacccagaatttctctcccgacccggaaaaccccatcccctcttccggggattaatcgaggcagctcaactacggctaccagcctcacctgacgaagccctacgccgacaaagccagaccaacatctccgcgcaggagaaacccagccggattggatga

SEQ ID NO: 31091 - protein, 558 aa, Prochlorococcus marinus str. MIT 9303
MAKFVFVTGGVVSSIGKGIVAASLGRLLKSRGYSVSILKLDPYLNVDPGTMSPFQHGEVFVTEDGAETDLDLGHYERFTDTAMSRLNSVTTGSIYQAVINKERRGDYNGGTVQVIPHITGEIRERIHRVAANSGADVVITEIGGTVGDIESLPFLEAIREFRGDVGRNDLAYIHVTLLPFIGTSGELKTKPTQHSVKELRAIGIQPDVLVCRSDRPINEDLKRKIGGFCGVPNRAVIPALDADSIYAVPISLEEEGLCLEMLDVLNLTDHDSDMKNWVQLVHKLRNPGPAVKVALVGKYVQLNDAYLSVVEALRHACLTQDASLELSWVCAEQIETHGPENLLKGMDAVVVPGGFGNRGVDGKIAAIRWAREQRVPFLGLCLGMQCAVIEWARNQAGLTGASSAELEPDTSHPVIHLLPEQQDVVDLGGTMRLGVYPCRIAPDTLAQKLYGEEVVYERHRHRYEFNNSYRNLFIESGYTISGSSPDGRLVELIELKGHPFFTACQYHPEFLSRPGKPHPLFRGLIEAAQLRLPASPDEALRRQSQTNISAQEKPSRIG

SEQ ID NO: 31092 - DNA, 1629 bp, Clostridium thermocellum ATCC 27405
  CDS (1)..(1629): transl_table=11
atgtctgtcaagtacatttttgtaaccggcggtgttgtttcggggcttggaaagggaataactgccgcctcactgggaagacttttgaaagccagaggtcttcgagtcactattcaaaaatttgacccgtatattaatgtcgacccgggtactatgagcccgtatcagcacggagaagtgtttgtaacagatgacggggctgagacggatttggaccttgggcattatgaaagatttatagatgaaaacttgagcaaaaacaataatgtcaccaccggtaaaatatactggtccattatcagcaaggaaagaaaaggagattttctcggtggtacggtgcaagttataccacatgtaaccaacgagattaaaaatagaatttatttagtgggcaaagaaggaaaaaccgatgtggtgattaccgaaatcggcggtactgttggcgatattgaaagcttgccttttttagaggccattcgtcaggtggcaagtgacgtaggcagagagaatgtggtttacatacatgttacccttgtcccttacctcagcaagtcgggagagcttaagacaaagcccacccagcacagtgtcaaagagttaagaagcctcggtatacagccggatataattgtatgccgtacggaaaagagactttcaaaggaattgaaggacaagataggactgttttgcaatatacccggagaatgggtaattcagaatcttgacgccgagtccctttatgagattcctttgatgctggaggaagaaggactggccaacattgtttgtgagcgtttgaatcttggatgcgttaagccggatatgacagaatggtgtgagttggtaaacaggcagaaaaacttaagtaagtccttgaccatagctcttgtggggaaatacgttgaacttcacgatgcgtatcttagtgttgtagagtctttaaatcacggaggaatatataatgacgccgaggtaaagataaagtgggtgaattccgaggaacttactgaagacaatcttgaggaaactctctgtgatgtggacggaatactggttcccggcggttttggagacaggggtatagagggaaagattcttgcagccaaatatgcccgtgaaaacaaagttccgtactttggtatctgccttggaatgcagatggcggttgtggagtttgcaaggaatgtagccgggcttaagatggccaacagctcggaatttgacgcaaacagtccgcatcctgtaattgatctcatgccggaacagaaggatatagatgaaaagggaggtacaatgaggcttggactgtacccctgcaagattataaaagattcttctgcttatagaatatatgaaagcgagcttatatatgaaaggcacagacacagatatgagttcaacaatgaatacagggagcttttgacctcaaagggactgattctggcaggtttgtctccaagtgagaagcttgtggaaattattgaactgaaagatcatccatggtttatcggagttcagttccatccggagtttaaatcaaggccgaacagaccccacccgttgtttaaggactttataagggccgcggtggaaagacgttacaaacagcaggaaaataaaaacgattaa

SEQ ID NO: 31093 - protein, 542 aa, Clostridium thermocellum ATCC 27405
MSVKYIFVTGGVVSGLGKGITAASLGRLLKARGLRVTIQKFDPYINVDPGTMSPYQHGEVFVTDDGAETDLDLGHYERFIDENLSKNNNVTTGKIYWSIISKERKGDFLGGTVQVIPHVTNEIKNRIYLVGKEGKTDVVITEIGGTVGDIESLPFLEAIRQVASDVGRENVVYIHVTLVPYLSKSGELKTKPTQHSVKELRSLGIQPDIIVCRTEKRLSKELKDKIGLFCNIPGEWVIQNLDAESLYEIPLMLEEEGLANIVCERLNLGCVKPDMTEWCELVNRQKNLSKSLTIALVGKYVELHDAYLSVVESLNHGGIYNDAEVKIKWVNSEELTEDNLEETLCDVDGILVPGGFGDRGIEGKILAAKYARENKVPYFGICLGMQMAVVEFARNVAGLKMANSSEFDANSPHPVIDLMPEQKDIDEKGGTMRLGLYPCKIIKDSSAYRIYESELIYERHRHRYEFNNEYRELLTSKGLILAGLSPSEKLVEIIELKDHPWFIGVQFHPEFKSRPNRPHPLFKDFIRAAVERRYKQQENKND

SEQ ID NO: 31094 - DNA, 1740 bp, Mycobacterium sp. JLS
  CDS (1)..(1740): transl_table=11
ttgcccgcgctacgcaagcatccgcaaacggccacaaagcacctcttcgtcacgggcggcgtcgtctcctccctgggcaagggtctgacgggctcgagcctcggacagttgttgactgccaggggcctgcaggtgacgatgcagaagctcgacccctatctcaacgtcgaccccggcaccatgaacccgttccagcacggtgaggtgttcgtcaccgaggacggcgccgagaccgacctcgacgtcgggcactacgaacgcttcctcgaccggaacctgtcggggtccgcgaacgtcaccacggggcagatctattcgtcggtgatcgccaaggaacgccgcggggagtacctcggtgacaccgtgcaggtgatcccgcacatcaccgacgagatcaagagccgcatcgtcgcgatggccgcgccggacgagcacggcaaccgtccggacgtggtgatcaccgaagtcggcggcacggtcggcgacatcgaatccctgcccttcctggaggccgcgcgccaggtgcgccacgaggtcggccgcgagaactgcttcttcctgcactgctcactggtgccctacatggcgccgtcgggtgagctcaagaccaaacccacgcagcattcggtcgccgcactgcgcagcatcggcatccagccggacgccctgatcctgcgctgcgaccgggacgtgcccgaggcgctgaagaacaagatcgcgctgatgtgcgacgtcgacatcgacggggtcatctcgacgccggacgcaccgtcgatctacgacatccccaaggtgctccaccgtgaggaactcgacgcctacgtggtgcgccggttgaacctgccgttccgcgacgtggactggacccagtggaacgacctgctcaagcgggtgcacgaaccgcacgagacggtccggatcgcgctggtgggcaagtacatcgacctctccgatgcgtacctgtcggtgaccgaggcgctgcgtgcgggcgggttcttccaccacgccaaggtcgagatgcggtgggtggcctccgacgactgcgaactcgacagcggtgcggccgcggcgcttgccgacgtcgacggggtgctgatccccggcgggttcggcatccgcggtatcgaaggcaagatcggcgcgatcagctacgcccgcaagcgcggcctgccggtgctcgggctgtgcctcgggttgcagtgcatcgtgatcgaggcggcccgctcggtgggcatcaccggagcgaactccgccgaattcgatccggccacccccgacccggtcatctcgacgatggccgaccagcgtgacgccgtggccggtgaggccgatctgggcggcaccatgcggttgggcgcctatccggctgtgctggaggaagattcgatcgtcgcgcgggcctaccaggcgaccgaggtctccgaacggcaccggcaccgctacgaggtcaacaacgcctaccgcgaccgcatcgccgagagtgggctgcgcttctcgggcacgtcgcccgacggacatctggtcgagttcgtcgagtacgacgccgagcagcatccgttcctcgtcggcacccaggcgcatcccgaactcaagagccggcccacccgtccgcacccgctgttcgccgcgttcatcggcgcggcgctcgactacaaggccgccgagcggttgccggtcgagattcccgagcaacggtccaacggggtggagctgctgcaagaacccgcttcccgtggctga

SEQ ID NO: 31095 - protein, 579 aa, Mycobacterium sp. JLS
MPALRKHPQTATKHLFVTGGVVSSLGKGLTGSSLGQLLTARGLQVTMQKLDPYLNVDPGTMNPFQHGEVFVTEDGAETDLDVGHYERFLDRNLSGSANVTTGQIYSSVIAKERRGEYLGDTVQVIPHITDEIKSRIVAMAAPDEHGNRPDVVITEVGGTVGDIESLPFLEAARQVRHEVGRENCFFLHCSLVPYMAPSGELKTKPTQHSVAALRSIGIQPDALILRCDRDVPEALKNKIALMCDVDIDGVISTPDAPSIYDIPKVLHREELDAYVVRRLNLPFRDVDWTQWNDLLKRVHEPHETVRIALVGKYIDLSDAYLSVTEALRAGGFFHHAKVEMRWVASDDCELDSGAAAALADVDGVLIPGGFGIRGIEGKIGAISYARKRGLPVLGLCLGLQCIVIEAARSVGITGANSAEFDPATPDPVISTMADQRDAVAGEADLGGTMRLGAYPAVLEEDSIVARAYQATEVSERHRHRYEVNNAYRDRIAESGLRFSGTSPDGHLVEFVEYDAEQHPFLVGTQAHPELKSRPTRPHPLFAAFIGAALDYKAAERLPVEIPEQRSNGVELLQEPASRG

SEQ ID NO: 31096 - DNA, 1611 bp, Prochlorococcus marinus str. MIT 9301
  CDS (1)..(1611): transl_table=11
atgtcaaaatttgtatttgtcaccggaggagttgtttctagcattggaaaaggaattgtagctgcaagcttaggaagattattaaagtccagaggatatagtgtttcaatattaaaactagatccatatctaaatgttgatccaggcacaatgagtcctttccaacatggagaagtatttgtaaccgaagatggggctgaaaccgatctagatttaggtcactatgaaagatttactgatactgcaatgactaggttaaatagtgtgactacgggatctatctatcaagcagttatcaataaagaaagaagaggtagttataacggtggaactgtgcaagtaatacctcatataacaggagaaataagagaaagaattcatagagtagccgccaacagtaatgcagatattattattactgaaattggtggaacagttggtgatattgaatctctaccttttttagaggcaataagagaattcaaaaatgatgtcaataggaacgatgttgcatacattcacgtaacattacttccttacatcaaaacctctggcgaaataaaaactaaaccaacacagcattcagttaaagaattaagatcaattggaattcagccagatttacttgtatgccgaagtgataaatctatcaatgaagctctaaaaaagaagcttagtggtttttgcggtgtcagtattaactctgtaattgaagctttagacgcagacagtatttattcggtacctctttctttaaaaaaagaaggtttatgcaaagaaaccttgaattatctagaacttgaagataaaaaatgtgatttgaaaaattgggagcaactaatacacaacctaagaaatcctggaggtccaatcaaagttgctttagtaggtaaatatattgaacttggagatgcatatttatctgtagttgaagctttaagacatgcatgcattgaacaaaaagctttattagatttacattgggtgagtgctgaaatgatagaaaaaaattcagcagaaacttacttaaatgaagttgatgcaattgtcgtacccggaggatttggcaatagaggagtcaatggaaaaattgcggctataaaattcgcaagagaaaataaaattccctttttaggtttgtgccttggtatgcaatgtgcagttattgaatgggccaggaatgtagctcatcttccagatgcatctagttcagaactagacccaaacactcccaatccagtgatacatttattaccagaacagcaagatgtagttgatttaggtggaacaatgagacttggagtatatccatgtagattgacaaaaaatacaactggaaaaaacttatatgatgaggatgttatttatgagagacatcgacatagatacgaatttaataattactataaacaaagttttttagattctggatacaaaattagtggtacatcaccagatggcagattagttgagttaattgagttggaaaatcatccttacttcttagcatgtcaatatcatcccgagtttttatcaagacctggcaaacctcatcctttatttaaaggtttaataaaagcctctcaagataagttaactcaatcaaattaa

SEQ ID NO: 31097 - protein, 536 aa, Prochlorococcus marinus str. MIT 9301
MSKFVFVTGGVVSSIGKGIVAASLGRLLKSRGYSVSILKLDPYLNVDPGTMSPFQHGEVFVTEDGAETDLDLGHYERFTDTAMTRLNSVTTGSIYQAVINKERRGSYNGGTVQVIPHITGEIRERIHRVAANSNADIIITEIGGTVGDIESLPFLEAIREFKNDVNRNDVAYIHVTLLPYIKTSGEIKTKPTQHSVKELRSIGIQPDLLVCRSDKSINEALKKKLSGFCGVSINSVIEALDADSIYSVPLSLKKEGLCKETLNYLELEDKKCDLKNWEQLIHNLRNPGGPIKVALVGKYIELGDAYLSVVEALRHACIEQKALLDLHWVSAEMIEKNSAETYLNEVDAIVVPGGFGNRGVNGKIAAIKFARENKIPFLGLCLGMQCAVIEWARNVAHLPDASSSELDPNTPNPVIHLLPEQQDVVDLGGTMRLGVYPCRLTKNTTGKNLYDEDVIYERHRHRYEFNNYYKQSFLDSGYKISGTSPDGRLVELIELENHPYFLACQYHPEFLSRPGKPHPLFKGLIKASQDKLTQSN

SEQ ID NO: 31098 - DNA, 1659 bp, Herminiimonas arsenicoxydans
  CDS (1)..(1659): transl_table=11
atgaccaagtttgtattcgtaactggcggtgttgtgtcttcccttggcaaagggattgccgccgcctctctcgccgcgattcttgaatcccgcggcctcaaagtcactcttctcaagctcgatccgtatatcaacgtcgatcccggcacgatgagtccattccagcacggtgaagtcttcgtaaccgaagatggcgccgagaccgatctggatctgggtcactatgaacgtttcatcactgcgaaaatgcgcaaggtgaataacttcacgaccggccagatttacgaatcggtgatccgcaaggagcgtcgtggcgaatatctgggcaaaaccgtccaggtcatcccgcatatcaccaatgaaatccaggattacatctatcgcggcgccgaaggttttgatgtcgccctggtggaaatcggcggtactgtcggcgatatcgaatcactgccattcctcgaagcggcgcgtcagctgagcctgcgtgccggtcgcaatgcggctgccttcgtccatctgacattggtgccgtatctggtatcggcgggtgagctgaaaaccaagcctacccagcacagtgtgcaaaagctgcgcgaaatcggtatttcgccagacgctttgttatgccgtgccgaccgcccgattccggatgatgaacgggccaagatttcactgttttccaatgtgccggaagacgccgttatttccgtgtgggatgcagatacgatctacaagattccacaaatgctgtacgaccagggcctggatcgcatcgtctgtgaaaaactcgcgctgtcgccgaaaccggctgatctgtcggtctggaccaagttggtgcatgcgctggaaaatcccaagcatagtgtcaccatcggtatggtcggcaagtatgtcgatctgaccgaatcgtacaaatcgctgactgaagccttgcgtcacgccggcattcataccgaaagccgcgtcaatatcgaatatctggattccgaagaaatcgaagccagtggtccgcaatgcctggccaaatacgatgcgattctggtgcccggcggtttcggaaaacgcggcgtggaaggcaagattgctgcggcccgttttgcgcgcgaacatgcgattccctatttcggaatctgtctgggcatgcaggttgcgctgattgaatatgcacgcaatgtggctggcctgaccaaggcaaattcgaccgagttcgatccggataccgagcaaccggtagtggccttgatcaatgagtggcagaaccacgacggcaaggttgaacgtcgcgatctgaattccgatctgggcggcaccatgcgtctgggttcgcaaacctgcgcggtcaagccgggcacgctggcggcagaaatttatggcaatgaagtgactgaacgccatcgccatcgttatgaagcgaataaccattaccttggtcgtgttgaagaagcgggtctgatcgtgtcggcgcgcacgccggccgaatcgctgtgcgaaatcatggagttgccgcgtaccggcgagcatgcgcatccctggtatgtcggtgtgcagtatcatccggaattcaattcaacgccgcgtgatggacatcctttgttcatttcgttcatcaaggcggcactggcgcataaacaggctgaagagtcgaaaaaagtgacctga

SEQ ID NO: 31099 - protein, 552 aa, Herminiimonas arsenicoxydans
MTKFVFVTGGVVSSLGKGIAAASLAAILESRGLKVTLLKLDPYINVDPGTMSPFQHGEVFVTEDGAETDLDLGHYERFITAKMRKVNNFTTGQIYESVIRKERRGEYLGKTVQVIPHITNEIQDYIYRGAEGFDVALVEIGGTVGDIESLPFLEAARQLSLRAGRNAAAFVHLTLVPYLVSAGELKTKPTQHSVQKLREIGISPDALLCRADRPIPDDERAKISLFSNVPEDAVISVWDADTIYKIPQMLYDQGLDRIVCEKLALSPKPADLSVWTKLVHALENPKHSVTIGMVGKYVDLTESYKSLTEALRHAGIHTESRVNIEYLDSEEIEASGPQCLAKYDAILVPGGFGKRGVEGKIAAARFAREHAIPYFGICLGMQVALIEYARNVAGLTKANSTEFDPDTEQPVVALINEWQNHDGKVERRDLNSDLGGTMRLGSQTCAVKPGTLAAEIYGNEVTERHRHRYEANNHYLGRVEEAGLIVSARTPAESLCEIMELPRTGEHAHPWYVGVQYHPEFNSTPRDGHPLFISFIKAALAHKQAEESKKVT

SEQ ID NO: 31100 - DNA, 1659 bp, Burkholderia vietnamiensis G4
  CDS (1)..(1659): transl_table=11
atgaccaaatatgttttcgtcaccggcggcgtagtttcttccctcggcaagggtattgccgccgcctccctcgccgcgatcctcgaatcgcgcggtctgaaagtcaccctcctcaaactcgatccctacatcaacgtcgaccccggcacgatgagcccgtttcagcacggcgaagtgttcgtgacggaagacggtgcggagacggacctcgacctcggccactatgagcgcttcatcagcacgaagatgcgcaaggccaacaacttcacgaccggccagatctacgaatcggtgatccgcaaggagcgccgtggcgattatctcggcaagaccgtgcaggtgatcccgcacatcacgaacgaaatccaggcattcatcgagcgcggcgcggcatcggccacctgcggcgagccggacgtcgcgatcgtcgagatcggcggcacggtcggcgacatcgaatcgctgccgttcctcgaggccgcgcgccagatgagcctgcgcctcggccgcaacagcgcatgtttcgtgcacctgacgctcgtgccgtacgtcgcgaccgccggcgagctgaagacgaagccgacccagcacagcgtgcagaagctgcgcgagatcggcatcctgccgcacgtgctgctgtgccgtgcggaccgccgcattcccgacgacgagtcgaagaagatctcgatgttctcgaacgtgccggaagacgcggtgatttcggtgtgggatgccgacagcatctacaagattccgcagatgctgcacgaccagggcctcgaccggatcatctgcgacgaactgaagctgtcgccgaaggaagccgacctcagcatgtggtcggagctcgtcgagaagctcgagcacccgaagcacgaagtgacgatcggcatggtcggcaagtacgtcgatctgacggagtcgtacaagtcgctgatcgaggcgctgcgccacgcgtcgctgcacacgtcgacgaaggtcaacatcgagtacatcgactccgaagagatcgagtcgaacggtgtcgacagcctgaagcatctcgacgccgtgctggtgccgggcggcttcggccgtcgcggcacggaaggcaagatcgcggcgatccgctatgcgcgcgaggcgaaagtgccgtatctcggcatctgcctcggcatgcagctcgcggtgatcgagttcgcacgcgacgtcgtcggcctgaagcaggcgaacagcacggagttcgatccggacacgccggaacgcgtggtcgcgctgatcaccgagtggtacgaccgcgaaggcaaggtcgagacgcgcaccgagtcgtccgatctcggcggcacgatgcggctcggctcgcaacgctgcccgatcaagcccggcacgatggccgaagagatctacggcaaggacgtgaacgagcgccatcgccaccgttatgaagtcaataaccgcttcgtgccccagctcgaagccggcggccttatcatcagcgcccgtaccccgagcgaggatctgccggagatgatggaactgccgcgttcgatgcacccgtggttcgtcggcgtccagttccacccggaattcacgtcgacgccgcgtgacggtcatccgctgttcaagtcgttcgtcgaagcggcgctcgccaacaagcaagcgcgcggagcagaagcatga

SEQ ID NO: 31101 - protein, 552 aa, Burkholderia vietnamiensis G4
MTKYVFVTGGVVSSLGKGIAAASLAAILESRGLKVTLLKLDPYINVDPGTMSPFQHGEVFVTEDGAETDLDLGHYERFISTKMRKANNFTTGQIYESVIRKERRGDYLGKTVQVIPHITNEIQAFIERGAASATCGEPDVAIVEIGGTVGDIESLPFLEAARQMSLRLGRNSACFVHLTLVPYVATAGELKTKPTQHSVQKLREIGILPHVLLCRADRRIPDDESKKISMFSNVPEDAVISVWDADSIYKIPQMLHDQGLDRIICDELKLSPKEADLSMWSELVEKLEHPKHEVTIGMVGKYVDLTESYKSLIEALRHASLHTSTKVNIEYIDSEEIESNGVDSLKHLDAVLVPGGFGRRGTEGKIAAIRYAREAKVPYLGICLGMQLAVIEFARDVVGLKQANSTEFDPDTPERVVALITEWYDREGKVETRTESSDLGGTMRLGSQRCPIKPGTMAEEIYGKDVNERHRHRYEVNNRFVPQLEAGGLIISARTPSEDLPEMMELPRSMHPWFVGVQFHPEFTSTPRDGHPLFKSFVEAALANKQARGAEA

SEQ ID NO: 31102 - DNA, 1632 bp, Bradyrhizobium sp. ORS278
  CDS (1)..(1632): transl_table=11
atggcgcggtacatcttcatcaccggcggcgtggtttcctcgctcggaaagggtctggcttcagccgcgttaggcgcgctgctgcaggcccgcggctacaaggtccggcttcgcaagctcgacccctatctcaacctcgatccaggcacgatgtcgccgtatcagcacggcgaagtgttcgtgaccgatgacggcgcggagaccgatctcgatctcggccattacgaacgcttcaccgggcggcccgcgaccaaggccgacaacatcaccacggggcgcatctaccaggacatcctgaccaaggagcgccgcggcgattatctcggagcgaccatccaggtcgtcccgcatgtgaccaatgcgatcaaggatttcgtgctgtcgggcaatgacgagtacgacttcgtgctggtcgagatcggcggcaccgtcggcgacatcgagggcctgccgttcttcgaggcgatccgccaactcggcaacgagctgccgcgccaccacgcgatctacattcatctcacgctgctgccgtacatcccgagcgccggcgaattgaagaccaagccgacacagcattcggtcaaggagctgcgctcgatcggcatccagccggacatcctgctgtgccgcaccgatcgcgagatcccgaaggaggagcggcgcaagctcggcctgttctgcaacgtgcgcgagagcgccgtgatcgaggcgcgcgacgtcgacaacatctacgccgtgccggaggcctatcacgccgccggcctcgacgacgaggtgctggccgcgttcgggatcgagccgcggattccgccggcgcttgcgagctggcacacgatcaacgagcgcgtccgtaatccggaaggcgacgtgacgatcgcgatcgtcggcaagtacacgggcatgaaggatgcctacaagtcgctgatcgaagcgctgtcccatggcggcatcgccaacaaggtccgcgtcaagctcgactggatcgagagcgaggtgttcgagaacgaggaccccgcgccgttcctggagcacgtcaacggcatcctggtgcccggcggcttcggccagcgcggcgcggaaggcaagatccgcgcggcgcagttcgccagggagcgcgacgtgccgtatttcggcatctgtttcggcatgcagatggcggtgatcgaagcagcgcgcaatctcgtcggaatcaccgaggcaaactcgaccgagttcggcccgaccaaggagccgctggtcggtctgatgaccgagtggctgcgcggcaacgaactggagaagcgctcgcagagcggcgatctcggcggcacgatgcggctcggcgcctatcccgcgacgctcaagcgcggcagccgcgtgtccgaggtctatggcggcgccaccgagatctcggagcggcaccgccatcgctacgaggtcaacaccgcctacaaggaccggctcgagcagcatggcttgaagttctccggcctgtcgcccgacggcgtgctgccggagatcgtggagtacgaggaccatccctggttcatcggcgtccagttccaccccgagctgaagtcgcgcccgttcgagccgcacccgctgttcgcatcgttcatccaggcggcgatggtgcagagccggctggtgtga

SEQ ID NO: 31103 - protein, 543 aa, Bradyrhizobium sp. ORS278
MARYIFITGGVVSSLGKGLASAALGALLQARGYKVRLRKLDPYLNLDPGTMSPYQHGEVFVTDDGAETDLDLGHYERFTGRPATKADNITTGRIYQDILTKERRGDYLGATIQVVPHVTNAIKDFVLSGNDEYDFVLVEIGGTVGDIEGLPFFEAIRQLGNELPRHHAIYIHLTLLPYIPSAGELKTKPTQHSVKELRSIGIQPDILLCRTDREIPKEERRKLGLFCNVRESAVIEARDVDNIYAVPEAYHAAGLDDEVLAAFGIEPRIPPALASWHTINERVRNPEGDVTIAIVGKYTGMKDAYKSLIEALSHGGIANKVRVKLDWIESEVFENEDPAPFLEHVNGILVPGGFGQRGAEGKIRAAQFARERDVPYFGICFGMQMAVIEAARNLVGITEANSTEFGPTKEPLVGLMTEWLRGNELEKRSQSGDLGGTMRLGAYPATLKRGSRVSEVYGGATEISERHRHRYEVNTAYKDRLEQHGLKFSGLSPDGVLPEIVEYEDHPWFIGVQFHPELKSRPFEPHPLFASFIQAAMVQSRLV

SEQ ID NO: 31104 - DNA, 1635 bp, Dichelobacter nodosus VCS1703A
  CDS (1)..(1635): transl_table=11
atgacgcaatatatttttatcaccggcggcgtggtttcttcattgggaaaagggatttctgctgcttctttaggcgcaattttggaagcgcgcggtttacggatcaccatgatcaaattagatccttatattaacgttgaccccggcacgatgagtccttttcaacatggagaagtgtttgtaacgcatgacggcgcggaaacggatttggatttggggcattatgaacggttcgttaatatgcgcgccacgcaatttcataattgcaccgccggacgcgtttatttagaagtgattcaacgcgaacgtaaaggcgattatttaggaaaaacggtacaagttattccgcatattacggataccattcaacaatatattctccgcgcggcacaaggcgctgatattgctatggtggaaatcggcggcacggtgggcgatattgaatcgttgccgtttatggaagccattcgtcaattgggcacgaaattagggcgccgcgataccatgtttattcatctcactttagtgccttttatttcggctgccggtgaactcaaaaccaaaccaacgcaacacagcgttaaagaattgcgttccatcggcattcaaccggatatgttaatttgccgcgccgatcgggaaattccagaagatgaaaaagccaaaatttctttgtttaccaatgtgccggcaaaagcagtaatcagcggtttaagcgtgaaaaatatttatgaaattcccatgctttaccaaaaacaaggcgttgatgatttggtggtgaaacattttggtttacacgttaaagaagccaatttaggcgattgggaaaaagttgttgacgccatcaatcaccccgaacatgaagtaaccgtggcaatggtcggtaaatacgtcaatttaactgatgcttataaatcattgaatgaagcgctttatcacgccggcattaaaaataaaaccaaggttaatattcgctacgttgattctgaagatttatattctcaaggaacagaattgctcgcgggcgttgatgccatcgttgtgcccggcggttttggtaatcgcggtgtgaacggcaaattgcgggcagtgcaatatgcgcgcgaggaaaatattccttatttaggcatttgtttgggattacaaattgctgtggtggaatttgcacgcaacgttttaggtattaaaaatgcatgcagcacggaatgggacgaaaaaaccgatgagccgattatcgcattagtggcgcaatgggtaaatgaacgcggcgaagtagaacaacgcgataaaaaaatggatctcggcggcacgctgcgtttgggcgcattgccagcaaaattaaaagccggcagcaaaattgccacgatttacggcagcgaaatcatgaatgaacgccatcgtcatcgttatgaagtcaacgccaattatgaaaaacgcttggaagccgccggcatgcgcatttccggacgttccgcggataatgatttggtagaagtcattgaaattccaagccatcgttggtttatcggtttgcaatcgcaccctgaatttacgtccacaccgctcggcggtcacccgctattttccgcattcattgccgcggcattggattatcaaacggaacgtttatcatga

SEQ ID NO: 31105 - protein, 544 aa, Dichelobacter nodosus VCS1703A
MTQYIFITGGVVSSLGKGISAASLGAILEARGLRITMIKLDPYINVDPGTMSPFQHGEVFVTHDGAETDLDLGHYERFVNMRATQFHNCTAGRVYLEVIQRERKGDYLGKTVQVIPHITDTIQQYILRAAQGADIAMVEIGGTVGDIESLPFMEAIRQLGTKLGRRDTMFIHLTLVPFISAAGELKTKPTQHSVKELRSIGIQPDMLICRADREIPEDEKAKISLFTNVPAKAVISGLSVKNIYEIPMLYQKQGVDDLVVKHFGLHVKEANLGDWEKVVDAINHPEHEVTVAMVGKYVNLTDAYKSLNEALYHAGIKNKTKVNIRYVDSEDLYSQGTELLAGVDAIVVPGGFGNRGVNGKLRAVQYAREENIPYLGICLGLQIAVVEFARNVLGIKNACSTEWDEKTDEPIIALVAQWVNERGEVEQRDKKMDLGGTLRLGALPAKLKAGSKIATIYGSEIMNERHRHRYEVNANYEKRLEAAGMRISGRSADNDLVEVIEIPSHRWFIGLQSHPEFTSTPLGGHPLFSAFIAAALDYQTERLS

SEQ ID NO: 31106 - DNA, 1632 bp, Synechococcus sp. WH 7803
  CDS (1)..(1632): transl_table=11
atggccaagttcgtcttcgtcaccggtggagtggtgtccagcatcggcaagggcatcgtggcggccagcctggggcgcttgctgaaatcacgcggctacagcgtgtcgatcctgaagctggatccttacctgaatgtggatccgggcaccatgagcccgtatcagcacggtgaggtgtttgtcaccgaggatggcgctgaaaccgatctcgatctcggccactacgaacgcttcaccgacacggcgatgtcacgcctgaacagcgtgaccacaggctcgatctatcagtcggtgatcaacaaggagcgccggggcgattacaacggcggcaccgtgcaggtgatcccgcacatcacaggcgagatccgcgaacgcattcaccgcgtggcctccaacagcaacgccgatgtggtgatcacagaaatcggcggcaccgtgggtgacattgaatctctgcccttcctcgaggccattcgcgaattcaggggcgatgtgggtcgccacgatctggcctacatccatgtgaccttgctgccctacatcggcacctcaggcgaactgaagaccaaacccacccagcactcggtgaaagagctgcgctcgatcggcatccagccggatgtgctggtgtgccgcagcgaccgagagatcaacgcagaactcaaacgcaaaatcggcggattctgtggtgtgcacgaacgggcggtgatcccctctcttgatgccgacagcatttacgccgtcccccagaccctcgaagaacaggggctgtgccgggaagtgctggatgtgctcaatctcaccgaccacgacagtgacatgcgtgcctggcagcagctggtgcacaagatgcgcaaccctggcccggcggtgaaggtggccctggtgggcaaatacgtgcagctcaatgacgcctatctctcggtggtggaagccctgcgccacgcttgcctcgcccaggatgcatccctcgatctgcactgggtgtgcgccgaagagatcgaaaaccgcggcgctgatgccctgctgcatggcatggatgctgtggtggtgccaggcggcttcggcaaccgtggcgtggatggcaaggtggcggcaatccgctgggccagggaacaacgcattcccttcctggggttgtgcctgggcatgcaatgcgcggtaatcgaatgggcccgcaacctggctggcttaaccgatgccaccagcgctgaactggagccgggcaccagccatccggtgattcacctcctgccggaacagcaggacgtggtggacctgggcggcaccatgcgcctcggggtgtacccctgccgcatcgccgaaggctcgatggccgatcggctctatggcgatgaggtggtgtacgaacgccaccgccatcgctacgagttcaacaacgcctaccgcaatctctttcttgagtcgggctatcggatcagcggcagctcccccgacggtcgcctggtggaactgatcgaactgccggagcatccgttcttcacggcttgccagtaccacccggaattcctctcgcggccaggccagccccatcctctgtttcgcggcctgatcgaagccgcccaacaacgactgcccaacagtcccagcgaaatcaaggccacggcgtga

SEQ ID NO: 31107 - protein, 543 aa, Synechococcus sp. WH 7803
MAKFVFVTGGVVSSIGKGIVAASLGRLLKSRGYSVSILKLDPYLNVDPGTMSPYQHGEVFVTEDGAETDLDLGHYERFTDTAMSRLNSVTTGSIYQSVINKERRGDYNGGTVQVIPHITGEIRERIHRVASNSNADVVITEIGGTVGDIESLPFLEAIREFRGDVGRHDLAYIHVTLLPYIGTSGELKTKPTQHSVKELRSIGIQPDVLVCRSDREINAELKRKIGGFCGVHERAVIPSLDADSIYAVPQTLEEQGLCREVLDVLNLTDHDSDMRAWQQLVHKMRNPGPAVKVALVGKYVQLNDAYLSVVEALRHACLAQDASLDLHWVCAEEIENRGADALLHGMDAVVVPGGFGNRGVDGKVAAIRWAREQRIPFLGLCLGMQCAVIEWARNLAGLTDATSAELEPGTSHPVIHLLPEQQDVVDLGGTMRLGVYPCRIAEGSMADRLYGDEVVYERHRHRYEFNNAYRNLFLESGYRISGSSPDGRLVELIELPEHPFFTACQYHPEFLSRPGQPHPLFRGLIEAAQQRLPNSPSEIKATA

SEQ ID NO: 31108 - DNA, 1635 bp, Candidatus Protochlamydia amoebophila UWE25
  CDS (1)..(1635): transl_table=11
atggctatgcaaacaaaatacatttttataacaggcggtgtctgttcctctttgggaaaaggactcacttctgcagcaattgggttattactcgaaaaaaaagggttaagagtgtcaatgcttaaattagatccttacttgaatgttgatccaggtacgatgagcccctttcaacatggcgaggtttatgtgacagatgatggcgctgaaacagatttagatttaggtcattactaccgttatacaaattcttttttatcaaaagcttctaacgctacttctggtcaaatttacaatacagtaattaaaagagagcgacatggcgactatctaggaaaaacggttcaagttattcctcatattacgaatgagattaaacaacgcattgtgaactgtggaaaacaacaagaaaatattgatgttgttttggtcgaaataggaggaactgccggagatattgaatcacttccctttttagaagccattcgccaatttacttacgatcatcgcaataattgtttaaatatacacttgacatatgttccatatttgaaagcagcaggagaggtaaaaactaaaccttctcagcattccgtacaagttttaagaggaattgggatttttccagatattattgtttgccgttgcgaagtgaatttatctgatgaagttaaagataaaattagccttttttgtaatgtcaacagacgtgctgtcatcgaagaaaaagatgtcgaacatagtatttatgaagtccctttagatttgcataagcaaggaattgatgctttaatttgtgaacttttacatcttcctaatccctcaatcaatttatcagaatgggaaaaaatacttgaaacgataaaaaatcctaaaggaactgtaactgtaggcatcgttggaaaatatgttcaacatcaagatgcttataaatcggttttcgaatctttgacgcatggagcattagctgcaggatataaacttcaaattaaacgatttgaagcagataaacttccgttagatgataaccaattagctaaaacaattgaaggttgtgatggctatttagttcctggaggatttggagaaagagggtggcttggcaaaattcacacagctaaattatgtagggagaaaaaaattccttactttggaatctgcttaggaatgcaggtcatggcagtcgaattcgctagacatgtggtcggactcaatgaagctaattcaacagagtttgatcctgatactatacatcctgtgatttctttattaagtgagcaaagaggtttacaagaccttggaggtacaatgcgtcttggagcttatatttgtgatttgaaacttcacacaaaagcttatcaagcttataaaagttcacaaatcagcgaacggcatcgacatcgttatgaatttaataatacttacaaagaacaaatggaaaaagctggttttgtagttgcaggaacgttaaaaggtgagaatctttgcgaaatagctgaagtcaaagatcatccttggatgattggagttcaatttcaccctgaatttaaatcaaaaccaacagaccctcatccacttttccgtgactttattcaagcgatgattatttaccataagagtcagcatggaaaataa

SEQ ID NO: 31109 - protein, 544 aa, Candidatus Protochlamydia amoebophila UWE25
MAMQTKYIFITGGVCSSLGKGLTSAAIGLLLEKKGLRVSMLKLDPYLNVDPGTMSPFQHGEVYVTDDGAETDLDLGHYYRYTNSFLSKASNATSGQIYNTVIKRERHGDYLGKTVQVIPHITNEIKQRIVNCGKQQENIDVVLVEIGGTAGDIESLPFLEAIRQFTYDHRNNCLNIHLTYVPYLKAAGEVKTKPSQHSVQVLRGIGIFPDIIVCRCEVNLSDEVKDKISLFCNVNRRAVIEEKDVEHSIYEVPLDLHKQGIDALICELLHLPNPSINLSEWEKILETIKNPKGTVTVGIVGKYVQHQDAYKSVFESLTHGALAAGYKLQIKRFEADKLPLDDNQLAKTIEGCDGYLVPGGFGERGWLGKIHTAKLCREKKIPYFGICLGMQVMAVEFARHVVGLNEANSTEFDPDTIHPVISLLSEQRGLQDLGGTMRLGAYICDLKLHTKAYQAYKSSQISERHRHRYEFNNTYKEQMEKAGFVVAGTLKGENLCEIAEVKDHPWMIGVQFHPEFKSKPTDPHPLFRDFIQAMIIYHKSQHGK

SEQ ID NO: 31110 - DNA, 1623 bp, Mycoplasma mobile 163K
  CDS (1)..(1623): transl_table=4
atggaggaaaaaatgtcaaaaacaaagtttatttttgtaacaggtggagtggtttcgggactaggaaaaggtgtttcagcagcttctttaggtaatattttaaaagcaagaggattttcaatttttgttcaaaaacttgatccttatttaaatgttgatccgggtgtaatgtcaccttatgagcatggagaagtttttgttacttcagatggtggagaaacagatttagatttagggcattatgaaagatttattaatacaaaattcactaaagaaagtaactatacctcaggaagtatcttaaataatatcatccaaagggaaagagaaggagaatttttaggtaaaaccgttcaagtaattcctcatgtaactgatgaaattattgcagttataaaaaatgctgcaaataaatatcaacctgattttattatcaccgaaattggtggtactgtcggagatattgaatcaaatccatttttttatgcaattgcacaattaggtgcaaaaaatcgtgatgacattttttttattcacgtttcttacattatttatttgcaatcttcacaagaatgaaaaacaaaaccttctcaagtttcacttgaaaaattaagaagttttggaattaatgcaaacatgctttttttaagaagtgaaaaagaactaccatctttcataagagaaaaagcttctactttttctttactttcatatgaaaatgttatccctattccagattcatcttcaatttataaaattcctttatatttggaagcacaaaatgtcgcaaaaattattcttgatcattttaaaatggaaaatccaattcctaatttagaaaaatgagaaaaatttgttaatttaatcgataaaccaaaaggtttagaaataaaattggcaatgttaggaaaatatacagaatttccagatgcttataaatcaattgtagaagctctatttgtttcttctacttatgaaaatgtaaaagtagtgcttacttgattaagtagtgaaaatattaaagaagataatattgaattaactcttggaaaatttgatggagttgtcattttaccaggatttggaattagaggatgacatggaaaaattgttgcttcttcatgattgaaaaaagttaatattccaacttttggaatttgtttaggttttcaagcaatggttattgctcaagcaagagaaaaaggtattaaggatgctgattcagcagaatttagcaaaaaaggaacaatggttctaaacactatccaggagtctacaaaaggaagtagtttaggtgggactttaagattaggtgaatatgatgtaaatgtagaaaaaaatacattagcatttgatatttataaaagcacaaaaatttccgaaagacatagacatagatatgaagttcaaccagaatttcaaaaaattctatcagatgatgaatttatattttcaggttttaataaaaaactaaatacaccagaaatttgcgaagttaaaaatttagatttctatttaggaacacaatatcatcctgaatttaattctactccacttgagccacaaaaattatttagtgcgtttatacaatcgataaaaaagagaaagttaaactctaaatag

SEQ ID NO: 31111 - protein, 540 aa, Mycoplasma mobile 163K
MEEKMSKTKFIFVTGGVVSGLGKGVSAASLGNILKARGFSIFVQKLDPYLNVDPGVMSPYEHGEVFVTSDGGETDLDLGHYERFINTKFTKESNYTSGSILNNIIQREREGEFLGKTVQVIPHVTDEIIAVIKNAANKYQPDFIITEIGGTVGDIESNPFFYAIAQLGAKNRDDIFFIHVSYIIYLQSSQEWKTKPSQVSLEKLRSFGINANMLFLRSEKELPSFIREKASTFSLLSYENVIPIPDSSSIYKIPLYLEAQNVAKIILDHFKMENPIPNLEKWEKFVNLIDKPKGLEIKLAMLGKYTEFPDAYKSIVEALFVSSTYENVKVVLTWLSSENIKEDNIELTLGKFDGVVILPGFGIRGWHGKIVASSWLKKVNIPTFGICLGFQAMVIAQAREKGIKDADSAEFSKKGTMVLNTIQESTKGSSLGGTLRLGEYDVNVEKNTLAFDIYKSTKISERHRHRYEVQPEFQKILSDDEFIFSGFNKKLNTPEICEVKNLDFYLGTQYHPEFNSTPLEPQKLFSAFIQSIKKRKLNSK

SEQ ID NO: 31112 - DNA, 1722 bp, Leifsonia xyli subsp. xyli str. CTCB07
  CDS (1)..(1722): transl_table=11
gtggataactcagacgcgggcttgtcaatcaagcgagcacagctcggcggcacgaccaaacacatctttgtcaccggtggtgtcgtctcttcgctggggaagggtctcacggccgcttccctcggcaatctgctgaccgcacggggtctgcgcgtcgtcatgcagaaactcgacccctacctcaatgtggacccggggacgatgaacccgttccagcacggcgaggtgttcgtgaccgacgatggtgccgagaccgacctcgacatcgggcactacgagcgctttctggacatcaacctcggccagtcggcgaacgtcaccacggggcagatctactccaatgtgatcgccaaggagcgtcgcggcgagtacctgggcgacacggtgcaggtcatcccgcacatcaccgacgagatcaagcgccggatgcgcttgcaggcgcagcccggacccgacggcgatcccgcgcccgatgtcatcatcaccgagatcggcggcacggtcggcgatatcgagtcgcagcccttcatcgagtcggcccgccaggtgcgccacgaactcggccgcaagaactgcttcttcgtgcatgtctcgctggttccgttcatgaacgcctcgggcgagcagaagaccaagccgacgcagcactccgtcgcggccctgcgctcgatcggcatccagccggacgcgctcgtgctgcgcagcgaccgtcccgtgtcggagccgaacaagcgcaagatcgcgctcatgtgcgatgtggacgaggcggccgtggtgaacgcggtggatgtgccgagcatctacgacatcccgagcatgctccacgatcaggggctggacgcctacatcatcgaccagctggggctcacccaggcggccgatgtggactgggcgggctggtcgcggctgctggaggccgtacacgatccgaagcacacggtgacgatcggcctggtgggcaagtacatcgacctcccggatgcctacctgtccgtcaccgaggcgctgtgttcgggcggtttcgcccacgatgccaaggtcgcgctcaaatggatcgcctccgacgagtgtcagaccgccgatggcgctgccgcacagctgagcgatgtggacgggatctgcgtcccggggggattcggcgtgcgcggaattgagggcaaactcggcgcgctgaggttcgcacgcgagaacggcatcccggccctcggcctgtgccttggcctccagtgcatggtgatcgagtacgcgcggaacgaggccgggctcgccggcgcgtcgtcgtccgagttcgacccggacaccgcgttcccggtcatcgcgacaatggcagagcaggtggacatcatcgccggcggcgatctgggcggcacgatgcgcctcggtctctatccggcggcgctggccgggggctcgatcgtcgccgagctgtacggcgcggccgaggtgagcgagcgccaccgccaccgatacgaggtgaacaaagcctaccgcgcccagatcgccgacgcgggcctttggttctccggcacttcgcccgatggccacctcgttgagtgtgtggagctgccgcgcgacgtgcatccgttctacgtgggcacgcaggcgcatcccgagctgcggtcgcggccgaaccgggcgcacccgctcttcgccggcctcatcggcgcggcgctcgaccgccagaaggcgagcctgctgttcgacgtcgccgcggacgcctga

SEQ ID NO: 31113 - protein, 573 aa, Leifsonia xyli subsp. xyli str. CTCB07
MDNSDAGLSIKRAQLGGTTKHIFVTGGVVSSLGKGLTAASLGNLLTARGLRVVMQKLDPYLNVDPGTMNPFQHGEVFVTDDGAETDLDIGHYERFLDINLGQSANVTTGQIYSNVIAKERRGEYLGDTVQVIPHITDEIKRRMRLQAQPGPDGDPAPDVIITEIGGTVGDIESQPFIESARQVRHELGRKNCFFVHVSLVPFMNASGEQKTKPTQHSVAALRSIGIQPDALVLRSDRPVSEPNKRKIALMCDVDEAAVVNAVDVPSIYDIPSMLHDQGLDAYIIDQLGLTQAADVDWAGWSRLLEAVHDPKHTVTIGLVGKYIDLPDAYLSVTEALCSGGFAHDAKVALKWIASDECQTADGAAAQLSDVDGICVPGGFGVRGIEGKLGALRFARENGIPALGLCLGLQCMVIEYARNEAGLAGASSSEFDPDTAFPVIATMAEQVDIIAGGDLGGTMRLGLYPAALAGGSIVAELYGAAEVSERHRHRYEVNKAYRAQIADAGLWFSGTSPDGHLVECVELPRDVHPFYVGTQAHPELRSRPNRAHPLFAGLIGAALDRQKASLLFDVAADA

SEQ ID NO: 31114 - DNA, 1683 bp, Mannheimia succiniciproducens MBEL55E
  CDS (1)..(1683): transl_table=11
atgattggctataatcattttatttcattattaatcccgacattaggtttcactatggctacaaattatattttcgtaacaggcggcgttgtatcttcgctgggtaaaggtattgcggctgcgtcattagcagcgattttagaagcgcgtggtttgaatgtaaccatgatgaagcttgatccgtacattaacgttgacccgggcactatgagcccgacccaacacggtgaagtattcgtcacccaggacggtgcggaaaccgacttggatttaggtcactatgagcgttttatccgcacgaaaatgaccaaacgcaacaatttcaccacaggtaaaatttattccgaagtgttacgcaaagaacgtcgcggcgactatttgggcgctacggttcaggttattccgcatattaccaacgaaatcaaagcgcgcgtaatcgaaggtgccgccggtcatgatgtggcaatcgtggaagttggcggaaccgtgggcgatattgagtctttaccgtttctggaagcgttacgtcaactagccgtacaggttggccgtgaaaaaacgattttcatgcacttaaccttagtgccttatattccgactgcaggcgaagtaaaaaccaaaccgacccaacattccgtaaaagaattgctttctatcgggattcagccggatgtgttgatttgccgctcggatcgtatggttccgccaaacgagcgtgcaaaaatcgccttattctgtaacgtaccggaaaaagcggtcatttccttaaaagacgtggattctatctatcgcattcccgcattattacaatctcaaggtttagatgatttgatttgccaacgtttccgtttagcctgcaaagaagcggatctgtccgaatgggaacaagtgctttatcgccaagctaatcctaccggtgatgtaactatcggtatggtgggtaaatatgtggaattgccggatgcatataaatccgtaaatgaagccctaaaacacgcaggtttaaccaaccgtttaaacgtacatatcaaatatatcgattcgcaagacgttgaaacaaaaggcattgacgtattaaaaggggtggacggcattttagtgccgggcggtttcggttatcgcggtgtggaaggcaaaattctgaccgcccaatatgcccgtgaaaataacattccttatctcggcatctgcttaggtatgcaggtcgcctttattgaatatgcgcgccatgtggcgggattaacgcaggcgaattcttccgaattcgataaaaactgccctcaaccggtagtcggtttaatcaccgaatggcaggatgccgacggcagcgtggaacaacgttcggaaaactcggatctaggcggaactatgcgtttaggcgcgcaacaatgtcatttaatcgaagggtcgaaagcccgtgaattatacggtaaagaaaccattgaagaacgccaccgtcaccgttatgaagtcaacaatactctgttaccgcaaattgaagcggcgggcttaaaagtaacgggtttaagtgcggataaaaaattagtggaaattatcgaagtgcctaaccacccttggtttgtggcatgtcagttccacccggaatttacctcaacgccgcgcgacggtcatccgttgtttgccggatttgttaaagcggcaaaagaaaatcagaaaaagtag

SEQ ID NO: 31115 - protein, 560 aa, Mannheimia succiniciproducens MBEL55E
MIGYNHFISLLIPTLGFTMATNYIFVTGGVVSSLGKGIAAASLAAILEARGLNVTMMKLDPYINVDPGTMSPTQHGEVFVTQDGAETDLDLGHYERFIRTKMTKRNNFTTGKIYSEVLRKERRGDYLGATVQVIPHITNEIKARVIEGAAGHDVAIVEVGGTVGDIESLPFLEALRQLAVQVGREKTIFMHLTLVPYIPTAGEVKTKPTQHSVKELLSIGIQPDVLICRSDRMVPPNERAKIALFCNVPEKAVISLKDVDSIYRIPALLQSQGLDDLICQRFRLACKEADLSEWEQVLYRQANPTGDVTIGMVGKYVELPDAYKSVNEALKHAGLTNRLNVHIKYIDSQDVETKGIDVLKGVDGILVPGGFGYRGVEGKILTAQYARENNIPYLGICLGMQVAFIEYARHVAGLTQANSSEFDKNCPQPVVGLITEWQDADGSVEQRSENSDLGGTMRLGAQQCHLIEGSKARELYGKETIEERHRHRYEVNNTLLPQIEAAGLKVTGLSADKKLVEIIEVPNHPWFVACQFHPEFTSTPRDGHPLFAGFVKAAKENQKK

SEQ ID NO: 31116 - DNA, 1608 bp, Bacillus licheniformis ATCC 14580
  CDS (1)..(1608): transl_table=11
atgacaaaatatatctttgtaaccggaggagttgtatcctcgcttggaaaaggaattacggcgtcttcgctcggccgcctgctgaagaacagaggtttgaatgtcaccattcaaaaatttgacccgtatatcaacgtagacccgggtacgatgagcccgtatcagcacggtgaagtgtttgtaaccgacgacggtgcggaaacggatcttgacctcggccattatgagcgctttatcgacatcaatttaaataaatacagcaacgtgacaacaggaaaaatctattccacggtgctgaaaaaagagcgcagaggcgattatttaggcggaaccgtacaggtaatacctcatatcacaaatgaaattaaagaccgtgtattccgcgccggaaaagaaacgcacgctgatgtcgtaatcactgaaatcggcggaaccgtcggtgacatcgaatcgctgccatttcttgaagcgatccgccagatcaagagcgatgtcggccgcgacaatgtgatgtacatccattgtacgcttgttccatatcttaaagcggcgggagaaatgaaaacaaagccgactcagcacagcgtaaaagaactgcgcagcctcggcattcagccaaatgtcatcgtcgtgagaacagaaatgccgatttctcaggacatgaaagataaaatcgcgctcttctgcgacattgatcctaaagccgtcatcgaggctggagatgcggatacgctctactccattcctctcgaccttcaaaaacaaggcctggacagcctggtttgcagccacttgaagctggattgcagagaagccgatatggaagagtggaaagaactcgtcaaaaaggtgaaaaatctgtccaaaacggtaacaatcgctttggtcggtaaatacgttgagctcccggatgcttacatttcagttgtagaatcgcttcgccatgcgggttatgcgtttgatgcagacattcaagttaaatggatcaatgcggaagaagtgacggaagacaacgttgccgatcttgttcaaaatgcggacggtattcttgttccgggcggattcggagaccgcggtgttgaagggaaaatcacgacagtcaaatatgcccgcgaacaaaagattccgttcttcggcatttgcctcggaatgcaggtggcatcgattgaatacgcgagaaacgtgctcggccttgaaggagcgcactcagccgaaatcgatccgtctacaccgtatccgattatcgaccttctccctgaacaaaaggacattgaagacctcggcggaacactgcgcctcggactttatccgtgcaagcttcaagaaggatcgaaagcatatcaggcatatgaaaatgaagtggtgtatgaacgccaccgccaccgctacgaattcaacaatgagttcagacagcagatggaagaagccggttttgtattttccgggacaagccctgacggccgtctcgtagaaattatcgagcttaaagaccatccatggtttgtcgcgtctcagttccatcctgaatttacgtcaagaccgacaagacctcaggctctgttcagagacttcgtacatgcttcgctaaagacttcggaaaagctgtaa

SEQ ID NO: 31117 - protein, 535 aa, Bacillus licheniformis ATCC 14580
MTKYIFVTGGVVSSLGKGITASSLGRLLKNRGLNVTIQKFDPYINVDPGTMSPYQHGEVFVTDDGAETDLDLGHYERFIDINLNKYSNVTTGKIYSTVLKKERRGDYLGGTVQVIPHITNEIKDRVFRAGKETHADVVITEIGGTVGDIESLPFLEAIRQIKSDVGRDNVMYIHCTLVPYLKAAGEMKTKPTQHSVKELRSLGIQPNVIVVRTEMPISQDMKDKIALFCDIDPKAVIEAGDADTLYSIPLDLQKQGLDSLVCSHLKLDCREADMEEWKELVKKVKNLSKTVTIALVGKYVELPDAYISVVESLRHAGYAFDADIQVKWINAEEVTEDNVADLVQNADGILVPGGFGDRGVEGKITTVKYAREQKIPFFGICLGMQVASIEYARNVLGLEGAHSAEIDPSTPYPIIDLLPEQKDIEDLGGTLRLGLYPCKLQEGSKAYQAYENEVVYERHRHRYEFNNEFRQQMEEAGFVFSGTSPDGRLVEIIELKDHPWFVASQFHPEFTSRPTRPQALFRDFVHASLKTSEKL

SEQ ID NO: 31118 - DNA, 1695 bp, Synechococcus elongatus PCC 6301
  CDS (1)..(1695): transl_table=11
atgttagagtcgatcgctgtgccaacagcgactgggactgaacgctggaagagtatgactaagttcatctttgtgaccggtggcgtggtttccagcatcggcaaaggaattgtggccgcgagtttggggcggctcctcaagtcgcggggctattcggtttcgattctcaaactcgacccctacatcaacgtcgaccccggcacgatgagcccctaccaacatggggaagtgtttgtgacggcggacggggcggaaacagacctcgaccttggacactacgagcgctttaccgacacaccgatgtcacgcctcaacagtgtcaccaccggctcgatctaccaggcggtgatcaacaaagaacggcggggtgactataacggtggcacggtgcaggtcattccgcatatcactgccgaaatccgcgatcgcattcaccgcgttgcccaagacacccatcctgatgtggtgattacagaaattggcggcacagtgggcgacattgaatccctgccctttttagaagcgattcgccaattccgtaaggatgtgggacgtcgcgatctcgcttacattcatgtcactttagtgccctggattccgtctgctggtgagatgaaaaccaagccgacgcagcactcggtcaaagagttgcgatcgattggcattcagcccgatattttggtctgtcgttgcgatcgcccgttgcaggccggcatgaaggaaaaaatgtcggagttctgcaatgtttcaccagaagcggtgatcacgtcgcaggatgccagctcgatctacgaagtgccgttgatgctggagcgcgaaggcttagcagagcaagtgctcgacattctgcaacttgagcagcggcaacccgatctgactcaatggcaacgctgggtgcatcagctccagaaccccagccgccgcgttgaagtggcgatcgtgggcaagtatgtgcgactgaatgacgcctatctctcggtcagtgagtctctgcgccatgcggcagctagtgctgatgctgatctccagctgcgctgggtcgatgcggaagatctcgaaaatggcgatccggcaacctatctagatggcgtggatggcatcgttgtccccggtggttttggggctcgtggggtagatggcaaagtcgccgcgattcaattcgcccgcgatcaccagattcctttcttgggcttgtgtctagggatgcaagcagcggtgattgactgggcacgtaatgtggcaggcttggacggtgctaacagtgccgaatttgacccagaaacgccccatcctgtcattgcgctactgcctgagcagcaggacgtggtcgacttaggcggcacgatgcgcttgggtctttgcccttgcaaaatccagtctggttccttggcacagcggctctatggcgaagacatcatctacgagcggcatcgtcatcgctacgagttcaataatgcttaccgcagtctcttcctcgaaagtggctactgtgtcagtggcacctcgcccgacagccgcttggtggagattgtcgagcgtcctgatcatcccttctttattgcctgtcaattccacccagagtttgtctcgcgtccaaatcatccccacccgctcttccaaggcttgatcaaagcagcgttgggtagcgacctgactctggtggatcctgctcctctgcctgcggaaacggtttaa

SEQ ID NO: 31119 - protein, 564 aa, Synechococcus elongatus PCC 6301
MLESIAVPTATGTERWKSMTKFIFVTGGVVSSIGKGIVAASLGRLLKSRGYSVSILKLDPYINVDPGTMSPYQHGEVFVTADGAETDLDLGHYERFTDTPMSRLNSVTTGSIYQAVINKERRGDYNGGTVQVIPHITAEIRDRIHRVAQDTHPDVVITEIGGTVGDIESLPFLEAIRQFRKDVGRRDLAYIHVTLVPWIPSAGEMKTKPTQHSVKELRSIGIQPDILVCRCDRPLQAGMKEKMSEFCNVSPEAVITSQDASSIYEVPLMLEREGLAEQVLDILQLEQRQPDLTQWQRWVHQLQNPSRRVEVAIVGKYVRLNDAYLSVSESLRHAAASADADLQLRWVDAEDLENGDPATYLDGVDGIVVPGGFGARGVDGKVAAIQFARDHQIPFLGLCLGMQAAVIDWARNVAGLDGANSAEFDPETPHPVIALLPEQQDVVDLGGTMRLGLCPCKIQSGSLAQRLYGEDIIYERHRHRYEFNNAYRSLFLESGYCVSGTSPDSRLVEIVERPDHPFFIACQFHPEFVSRPNHPHPLFQGLIKAALGSDLTLVDPAPLPAETV

SEQ ID NO: 31120 - DNA, 1746 bp, Thermobifida fusca YX
  CDS (1)..(1746): transl_table=11
ttgttcggccgtgtgccgttggcggacaccgcacggtcgcctgacggacgtaaggcgttccgtagccgcacaaccacgggagcaatcttggcatccgccgcgagtagcaaacaccttttcgtcaccggcggcgtcgcctccagcctcggcaagggcctgaccgcttccagcctcggacgactgctgaagtcgcgcgggctgcgggtcacgatgcagaagcttgacccctacctcaacgtcgaccctggaacgatgaacccgttccagcacggtgaggtgttcgtcactgacgacggggcagaaaccgacctggacatcggccactacgagcggttcctggacaccgagctgtccgcctcagccaacgtcactactgggcagatctactccagcgtgatcgccaaggagcgccaaggcgcctacctcggcgatacagtgcaggtcattccgcacatcaccaacgagatcaaagcccgcatcctcgccatggacagcgaggacgtggacgtggtcattaccgagatcggcggcacggtcggggacatcgaatcgcagcccttcctcgaggcagccaggcagatcaggcacgagatcggccgcgacaactgcttcttcctgcacatctccctgctgccgtatctggcgcccgccggtgaactgaagacgaaacccacccagcattcggtggctgcgctgcgcagcatcggcatccagcctgatgcgatcgtctgccgcgctgaccgcccgattcccaccagtctcaagcagaagatcagcctcatgtgcgacgtggaggagggcggtgtcgtggcctgcccggacgctccctccatctacgacatccccaaggtgctgcaccgcgagggcttggacgccttcgtcgtgcgccgcctcgggctggccttccgcgacgtggactggaccgagtggaacgacgtgctcgaccgggtccacaaccccgagcacgaagtcaccatcgccctagtcggtaaatacgtcgacctccccgacgcctacctgtcggtcactgaagcgctgcgggccggagggttcgcccaccgcacccgggtcaacatccgctgggtggccagcgacaactgcaccaccccggaaggcgcccaacgggaactcgacggggtccacggggtcctcatccccggtggtttcggggtgcgcggcatcgaaggcaaagtgggggcgatccgccacgcccgtgaaaacggcatccccctgctcggcatctgtctgggcctgcagtgcatggtcatcgaatacgcccgcgacgtggccgggctgcgcggcgccaacagcctcgagttcgatgacaaggcggaacacccggtcgtctccaccatggccgaccagaccgacgtggtcgccggggaacgcgacatgggcggcacgatgcggctcggcctgtacccggcccggctccgcgagaacacgctcgtccgggaactgtacggaggggcggaagaagtctccgaacggcaccgccaccgctacgaggtctccaacgcctaccggcccgtcctggaagaagcgggactggtcatctccggagtctcccctgacggatccctggtggagtacgtggagctgccgcaggacaagcacccgttcttcctcggcacccaggcccacccggagctgcgctcccggcccacccgcccccacccgctgttcgtgggattcatcgaggccgcgctgaaatactcggcggggacagggatcgccgatgggtga

SEQ ID NO: 31121 - protein, 581 aa, Thermobifida fusca YX
MFGRVPLADTARSPDGRKAFRSRTTTGAILASAASSKHLFVTGGVASSLGKGLTASSLGRLLKSRGLRVTMQKLDPYLNVDPGTMNPFQHGEVFVTDDGAETDLDIGHYERFLDTELSASANVTTGQIYSSVIAKERQGAYLGDTVQVIPHITNEIKARILAMDSEDVDVVITEIGGTVGDIESQPFLEAARQIRHEIGRDNCFFLHISLLPYLAPAGELKTKPTQHSVAALRSIGIQPDAIVCRADRPIPTSLKQKISLMCDVEEGGVVACPDAPSIYDIPKVLHREGLDAFVVRRLGLAFRDVDWTEWNDVLDRVHNPEHEVTIALVGKYVDLPDAYLSVTEALRAGGFAHRTRVNIRWVASDNCTTPEGAQRELDGVHGVLIPGGFGVRGIEGKVGAIRHARENGIPLLGICLGLQCMVIEYARDVAGLRGANSLEFDDKAEHPVVSTMADQTDVVAGERDMGGTMRLGLYPARLRENTLVRELYGGAEEVSERHRHRYEVSNAYRPVLEEAGLVISGVSPDGSLVEYVELPQDKHPFFLGTQAHPELRSRPTRPHPLFVGFIEAALKYSAGTGIADG

SEQ ID NO: 31122 - DNA, 1695 bp, Synechococcus elongatus PCC 7942
  CDS (1)..(1695): transl_table=11
atgttagagtcgatcgctgtgccaacagcgactgggactgaacgctggaagagtatgactaagttcatctttgtgaccggtggcgtggtttccagcatcggcaaaggaattgtggccgcgagtttggggcggctcctcaagtcgcggggctattcggtttcgattctcaaactcgacccctacatcaacgtcgaccccggcacgatgagcccctaccaacatggggaagtgtttgtgacggcggacggggcggaaacagacctcgaccttggacactacgagcgctttaccgacacaccgatgtcacgcctcaacagtgtcaccaccggctcgatctaccaggcggtgatcaacaaagaacggcggggtgactataacggtggcacggtgcaggtcattccgcatatcactgccgaaatccgcgatcgcattcaccgcgttgcccaagacacccatcctgatgtggtgattacagaaattggcggcacagtgggcgacattgaatccctgccctttttagaagcgattcgccaattccgtaaggatgtgggacgtcgcgatctcgcttacattcatgtcactttagtgccctggattccgtctgctggtgagatgaaaaccaagccgacgcagcactcggtcaaagagttgcgatcgattggcattcagcccgatattttggtctgtcgttgcgatcgcccgttgcaggccggcatgaaggaaaaaatgtcggagttctgcaatgtttcaccagaagcggtgatcacgtcgcaggatgccagctcgatctacgaagtgccgttgatgctggagcgcgaaggcttagcagagcaagtgctcgacattctgcaacttgagcagcggcaacccgatctgactcaatggcaacgctgggtgcatcagctccagaaccccagccgccgcgttgaagtggtgatcgtgggcaagtatgtgcgactgaatgacgcctatctctcggtcagtgagtctctgcgccatgcggcagctagtgctgatgctgatctccagctgcgctgggtcgatgcggaagatctcgaaaatggcgatccggcaacctatctagatggcgtggatggcatcgttgtccccggtggttttggggctcgtggggtagatggcaaagtcgccgcgattcaattcgcccgcgatcaccagattcctttcttgggcttgtgtctagggatgcaagcagcggtgattgactgggcacgtaatgtggcaggcttggacggtgctaacagtgccgaatttgacccagaaacgccccatcctgtcattgcgctactgcctgagcagcaggacgtggtcgacttaggcggcacgatgcgcttgggtctttgcccttgcaaaatccagtctggttccttggcacagcggctctatggcgaagacatcatctacgagcggcatcgtcatcgctacgagttcaataatgcttaccgcagtctcttcctcgaaagtggctactgtgtcagtggcacctcgcccgacagccacttggtggagattgtcgagcgtcctgatcatcccttctttattgcctgtcaattccacccagagtttgtctcgcgtccaaatcatccccacccgctcttccaaggcttgatcaaagcagcgttgggtagcgacctgactctggtggatcctgctcctctgcctgcggaaacggtttaa

SEQ ID NO: 31123 - protein, 564 aa, Synechococcus elongatus PCC 7942
MLESIAVPTATGTERWKSMTKFIFVTGGVVSSIGKGIVAASLGRLLKSRGYSVSILKLDPYINVDPGTMSPYQHGEVFVTADGAETDLDLGHYERFTDTPMSRLNSVTTGSIYQAVINKERRGDYNGGTVQVIPHITAEIRDRIHRVAQDTHPDVVITEIGGTVGDIESLPFLEAIRQFRKDVGRRDLAYIHVTLVPWIPSAGEMKTKPTQHSVKELRSIGIQPDILVCRCDRPLQAGMKEKMSEFCNVSPEAVITSQDASSIYEVPLMLEREGLAEQVLDILQLEQRQPDLTQWQRWVHQLQNPSRRVEVVIVGKYVRLNDAYLSVSESLRHAAASADADLQLRWVDAEDLENGDPATYLDGVDGIVVPGGFGARGVDGKVAAIQFARDHQIPFLGLCLGMQAAVIDWARNVAGLDGANSAEFDPETPHPVIALLPEQQDVVDLGGTMRLGLCPCKIQSGSLAQRLYGEDIIYERHRHRYEFNNAYRSLFLESGYCVSGTSPDSHLVEIVERPDHPFFIACQFHPEFVSRPNHPHPLFQGLIKAALGSDLTLVDPAPLPAETV

SEQ ID NO: 31124 - DNA, 1638 bp, Mesorhizobium sp. BNC1
  CDS (1)..(1638): transl_table=11
atgagtcccatggcgcgatatgttttcataaccggcggcgtggtttcctccctcggcaaaggcattgcatcggcggctctcggcgcgctgctgcaggcacgcgggtaccgcgtccgattgaggaagctcgatccctatctcaacgtcgatcccggcacgatgtcgccgtatcagcacggcgaggttttcgttaccgacgacggggcggagacggatctcgatctcgggcattacgagcgcttcacagggcgctcggccaacaagcgggataacatcaccacgggccgcatctaccagaatatcatcgagaaggagcggcgcggcgattacctcggcgccacagtgcaggtgatccctcacgtcactgacgagatcaagcaattcgtactcgaaggcaacgaggagtttgatttcgtgctctgcgaaatcggcggcacggtgggcgatatcgaggcgatgcccttcctcgaagccatccgccaacttggcaacgaactgccgcgcggcaacgccgtctacatccatctgacgctgatgccctggattccggcggcgggcgagctcaagaccaagcccacccagcactccgtcaaggagcttcgctcgatcggtatcgcacccgatatcctgctcgtgcgggccgaccggccggttccgcctgaggagcgacgtaagctctcgctcttttgcaatgtgcgcgaatcggccgtcatccaggccctcgatgtggcgcatatctacgatgttccgatggcctatcataaggaaggccttgattcggaggtgcttgccgccttcgggatcgaccctgcgcccaagccgcggatggagcgttgggaggaggtctcgaaccggattcacaatccggaaggcgaggtgacgattgcaatcgtcggcaaatataccggcctcaaggatgcctataagtcgcttaacgaggcgcttacgcatggcggcatcgccaatcgggtgcgcgtgaagctggattggatcgaatctgagattttcgagaaggaagatccggcgccgtggctggagaaggtgcacggcattctggtgcccggcggctttggcgagcgtggctccgagggcaagatcctggcagcgaaattcgcgcgcgagcggaaagtgccctatttcggcatatgtttcggcatgcagatggcctgcatagaggctgcccgctcgctcgcgggcatcgagaaggcgtcctccaccgaattcggaccgacaaaggagccggtggttggcctgatgaccgagtggctgcgcggcaacatgctggagaagcgcacggcggccggcgatctgggcggtacgatgcggctcggcgcttacgaggcacggctccagcctggctcaaaaatcgcggaaatctacggcagcgaagagatatccgaacgccaccgccatcgctatgaggtcaatatcggctaccgcgagaagcttgaggcgtgcggacttgtcttcgccggcctttcgcctgacggcgtgctgccggaaacgatagagtacccagaccacccctggtttgtcggcgtgcagtaccatccggaactgaagagccggcccttcgagccgcacccgctttttgcttccttcatcgccgccgccgtggagcagtcgcgtctggtttag

SEQ ID NO: 31125 - protein, 545 aa, Mesorhizobium sp. BNC1
MSPMARYVFITGGVVSSLGKGIASAALGALLQARGYRVRLRKLDPYLNVDPGTMSPYQHGEVFVTDDGAETDLDLGHYERFTGRSANKRDNITTGRIYQNIIEKERRGDYLGATVQVIPHVTDEIKQFVLEGNEEFDFVLCEIGGTVGDIEAMPFLEAIRQLGNELPRGNAVYIHLTLMPWIPAAGELKTKPTQHSVKELRSIGIAPDILLVRADRPVPPEERRKLSLFCNVRESAVIQALDVAHIYDVPMAYHKEGLDSEVLAAFGIDPAPKPRMERWEEVSNRIHNPEGEVTIAIVGKYTGLKDAYKSLNEALTHGGIANRVRVKLDWIESEIFEKEDPAPWLEKVHGILVPGGFGERGSEGKILAAKFARERKVPYFGICFGMQMACIEAARSLAGIEKASSTEFGPTKEPVVGLMTEWLRGNMLEKRTAAGDLGGTMRLGAYEARLQPGSKIAEIYGSEEISERHRHRYEVNIGYREKLEACGLVFAGLSPDGVLPETIEYPDHPWFVGVQYHPELKSRPFEPHPLFASFIAAAVEQSRLV

SEQ ID NO: 31126 - DNA, 1692 bp, Haemophilus somnus 129PT
  CDS (1)..(1692): transl_table=11
ttgtttgttgtcaaagcaaattctccaacacttattttcatatcaaaaacacataggtttaatatggctaccaattatatttttgtaaccggcggcgttgtatcttctttgggaaaaggaattgcagcggcatctttagctgcgattttagaagctcgtggcttaaatgtaactattatgaaactcgatccttatattaatgtagatccggggacaatgagtccgacacaacatggtgaagtttttgtgactcaagacggtgctgaaacagatcttgatttagggcattatgagcgttttattcgtactaaaatgacgaaacgtaataactttacggcaggaaaaatttattcagaagttttgcgtaaagaacgtcgtggtgattatttgggtgcaactattcaagttattccgcatattactaatgaaattaaatctcgtgtcattgatggtgcagcaggatatgatgttgccattgttgaagtgggtggaaccgttggtgatattgaatcgttgccatttttagaggcattacgccagttagccgtccaagttgggcgtgaacggactatttttatgcatctaactttggtaccttatattccaactgccggagaggtaaaaaccaaaccgacacaacattccgttaaagagttactctcaattggtattcagcctgatgtattaatttgtcgttcagatcgcatgattccacctaatgagcgtgcgaaaattgctcttttctgtaatgtaccggaaagagcggttatttctttaaaagatgtatcatctatttatcaaattccggctttattaaaatcacaagggttagatgattttatttgccaacgtttccgtcttgattgtcaagaagcggatttatctgaatgggaaaaagtgctttatcaagaagcaaatccgacaggtgaagtcactattggcatggtaggtaagtacacggaattacctgatgcttataaatctgttaatgaagccttgaagcatgcgggattgaccaatcgtttaaccgttaatattaaatacattgattcgcaagatgtagaaacaaaaggcatagatattttaaaagatctggatggtattttaattcccggtggctttggctatcgtggtgtagagggcaaaatcttaacagcacaatatgctcgtgaaaacaacgtaccttatttaggaatttgtttaggtatgcaagtggcgtttattgaatatgcacgtcatgttgccggactaaaaggtgcaaattcttccgaatttgaccgcacttgtgaatatccagtcattgcgttaattactgaatggcaagatgcagaaggtaatgtggaagtgcgttctgatgaaagcgatttaggtgggacaatgcggttaggtgcacagcaatgtcatttagttgcaggaagtttagcacatcaattatacggttcggatattattgaggagcgtcatcgtcatcgttatgaagtgaataacgttattcgtccgcaagttgagaaagcaggactgaaagtaacaggcttaagtgcggataaaaaattggtagaaattatcgaagtaccaaatcatccttggtttgttgcttgtcaatttcatccggagtttacttcaacaccacgtgatggacatccgctatttgcaggctttgtaaaagccgcaagcgaaaaccggaaaaaataa

SEQ ID NO: 31127 - protein, 563 aa, Haemophilus somnus 129PT
MFVVKANSPTLIFISKTHRFNMATNYIFVTGGVVSSLGKGIAAASLAAILEARGLNVTIMKLDPYINVDPGTMSPTQHGEVFVTQDGAETDLDLGHYERFIRTKMTKRNNFTAGKIYSEVLRKERRGDYLGATIQVIPHITNEIKSRVIDGAAGYDVAIVEVGGTVGDIESLPFLEALRQLAVQVGRERTIFMHLTLVPYIPTAGEVKTKPTQHSVKELLSIGIQPDVLICRSDRMIPPNERAKIALFCNVPERAVISLKDVSSIYQIPALLKSQGLDDFICQRFRLDCQEADLSEWEKVLYQEANPTGEVTIGMVGKYTELPDAYKSVNEALKHAGLTNRLTVNIKYIDSQDVETKGIDILKDLDGILIPGGFGYRGVEGKILTAQYARENNVPYLGICLGMQVAFIEYARHVAGLKGANSSEFDRTCEYPVIALITEWQDAEGNVEVRSDESDLGGTMRLGAQQCHLVAGSLAHQLYGSDIIEERHRHRYEVNNVIRPQVEKAGLKVTGLSADKKLVEIIEVPNHPWFVACQFHPEFTSTPRDGHPLFAGFVKAASENRKK

SEQ ID NO: 31128 - DNA, 1599 bp, Pediococcus pentosaceus ATCC 25745
  CDS (1)..(1599): transl_table=11
atgaccaaatatatttttgttacaggtggggttgtttcatctttaggtaaggggattgttgctgcatcccttggacgtcttttgaagaatcgtggacttaaggttacgattcaaaagtttgatccatatattaacgtggatccaggaacgatgagtccttaccaacatggtgaagtttttgttactgatgatggaacagaaacagatttagatttaggccactatgaacgttttatcgatatcaacttaaacaagtattctaacgttacaactggaaagatttattcagaagtattacgtaaagaacgtcatggcgattatcttggagcaactgtccaagttattcctcatattacggacgcaattaaagaaaaaattatgcgcgctggtaaagtgactgattctgatatcgtaatcactgaaattggtggaacggttggggacatcgagtcacttcctttcttggaagctattcgtcagatgaagagtcaagccggatcagaaaatgttttctacatccacacgactttggttccatacctaaaagctgcaggggaaatgaagacaaagccaacgcaacacagtgttaaagaacttcgtggtttgggaattcaacctaatatgttggttgttcgtacagaagaagatatcacagatggtatgcgttcgaagattgctgcattctgtgatgttgagccagaagctgtaattgaatctcaagatgttgcaagtttatacgaaattccattgaacttaaaagcacaaaagatggacgacattgtgatggaccactttggtttgcaagcaccacaagcagacatgtctaagtgggaagatcttgtcgatcacgttaataaccgtttgaaccataccattaacattgcattggttggtaaatacgttgccttacaagatgcttatatctcggtgaatgaagcgttaaaacatgcaggttatgttgtcgatgccgacattaagattaccaaaattgattcagaaaaacttactaaggaaaatgttgctgaacaacttgccgggcaagatggaatcattgttcctggtggctttggtgatcgtgggattgaaggaatgattcattccattcaatatgctcgtgaaaatgatgtgccattcttaggaatttgtttaggaatgcaaatggccagcgttgaatttgctcgtaacgtattgggttaccaagatgctaattcggctgaaatggatccagcaactaagcacaacattattgatttaatggctgatcaagaaggtgttaaagatatgggtggaactcaacgcctcggtctttacccatgcaagcttaaagaaggatctgtagctgccgccgcttataacaaccaagaaatgattgaagaacgtcatcgtcatcgttttgaatttaacaatgactatcgtgccgaaatggaagctaagggtcttgtattctcaggaacttcaccagacaatcgtttagtagaagtaattgagttaccagaaaagaaattcttcgtggcagctcaatatcacccagaatttttatcacgtccacaacgtccagaaggattatttaaggcatttatcgctgctgcaaataaataa

SEQ ID NO: 31129 - protein, 532 aa, Pediococcus pentosaceus ATCC 25745
MTKYIFVTGGVVSSLGKGIVAASLGRLLKNRGLKVTIQKFDPYINVDPGTMSPYQHGEVFVTDDGTETDLDLGHYERFIDINLNKYSNVTTGKIYSEVLRKERHGDYLGATVQVIPHITDAIKEKIMRAGKVTDSDIVITEIGGTVGDIESLPFLEAIRQMKSQAGSENVFYIHTTLVPYLKAAGEMKTKPTQHSVKELRGLGIQPNMLVVRTEEDITDGMRSKIAAFCDVEPEAVIESQDVASLYEIPLNLKAQKMDDIVMDHFGLQAPQADMSKWEDLVDHVNNRLNHTINIALVGKYVALQDAYISVNEALKHAGYVVDADIKITKIDSEKLTKENVAEQLAGQDGIIVPGGFGDRGIEGMIHSIQYARENDVPFLGICLGMQMASVEFARNVLGYQDANSAEMDPATKHNIIDLMADQEGVKDMGGTQRLGLYPCKLKEGSVAAAAYNNQEMIEERHRHRFEFNNDYRAEMEAKGLVFSGTSPDNRLVEVIELPEKKFFVAAQYHPEFLSRPQRPEGLFKAFIAAANK

SEQ ID NO: 31130 - DNA, 1635 bp, Oenococcus oeni PSU-1
  CDS (1)..(1635): transl_table=11
atgacagacaagaaacaaactaaatatatttttgtgactggtggggttgtttcttcgcttggaaaaggcattgttgcagcaagtctcggccgtttgctcaagtctcggggactggcagtgaccgttcaaaaattcgatccttatttgaatccggatccaggtacgatgtcgccttatcagcatggtgaaacttttgtgacccaggatggcgttgaaactgatcttgatcttggccattatgaacgtttcatggatattaataccaataagtattctaatgttacttcgggaaagatttatcaagaggtaattgatcgtgaacgaaccggtgactatatgggtaggacagtgcaagttattcctcatgtgaccgatgccatcaaggacaagatttttcgcggtgcaaaagaatccgaagccgatgtaattattacggaaattgggggaacgatcggtgatatcgaatcgatggcatttattgaagcgattcggcaaatgaaaaaagaagttggatcggacaatactttttacattcacgtttcactcgtaccttttttgcgggcagccggtgaattaaaaacaaaaccaacccaacattccgttcatgaattgcgtggaatgggaattcagccggacatgattgttgttcgttccgaaaaagcgattaccgatagtatgaaagaaaaactttctgaatttaccgatgtcccaaccgaggcaatcattcagtcgattgattcggatgttttatattcggttcctttgaatttagccgcccaaaacatggatcaggttgttttggaaaaattaggccttggtagccaaccaaaagccaatctttctcaatggggggctttggttgaccgaattcgtcatttatctaaagaaattaagattgctttggtagggaaatatactgatttgccggatgcttatatttcggttcatgaagctttaaagcatgccggttatgcggttgattccaaaattactttgaaaagtattaattccgagatgctgacagataataatgttgccgaaaaattggcaggaatcgatggtgtcattgttccaggcggtttcgggccgcgtgggattgaaggtatgatttcagcgattaaatatgctcgtgaaaacaatattcccttttttggtgtttgcctggggatgcagatggcctctgtcgaatttgcccgcgatgctgtcgggatgtcgaatgccaattcgacagaaatgaatcctgatactccttatccggtagttggattaatggattcacaaaagaaaatcacaaaaatcggtggcacgatgcgattgggttcctacccggcaatattgaaagccggcactaagacggccgaagcttacaataacgtttcagaaatttccgagcgccatcgtcaccgttatgaatttaataacgattatcgcgaacagtttgaaaaagcaggaatggttttcgccggtacttctccggacaactctctggtagaaattattgaatatcctcaaaatgatttcttcattgctgttcagtaccatccggaatttttaagccgtcccgaccgtccagagggactttatgccgcttttattcaagcggctcttgcatacgaggagaagctaaaagactga

SEQ ID NO: 31131 - protein, 544 aa, Oenococcus oeni PSU-1
MTDKKQTKYIFVTGGVVSSLGKGIVAASLGRLLKSRGLAVTVQKFDPYLNPDPGTMSPYQHGETFVTQDGVETDLDLGHYERFMDINTNKYSNVTSGKIYQEVIDRERTGDYMGRTVQVIPHVTDAIKDKIFRGAKESEADVIITEIGGTIGDIESMAFIEAIRQMKKEVGSDNTFYIHVSLVPFLRAAGELKTKPTQHSVHELRGMGIQPDMIVVRSEKAITDSMKEKLSEFTDVPTEAIIQSIDSDVLYSVPLNLAAQNMDQVVLEKLGLGSQPKANLSQWGALVDRIRHLSKEIKIALVGKYTDLPDAYISVHEALKHAGYAVDSKITLKSINSEMLTDNNVAEKLAGIDGVIVPGGFGPRGIEGMISAIKYARENNIPFFGVCLGMQMASVEFARDAVGMSNANSTEMNPDTPYPVVGLMDSQKKITKIGGTMRLGSYPAILKAGTKTAEAYNNVSEISERHRHRYEFNNDYREQFEKAGMVFAGTSPDNSLVEIIEYPQNDFFIAVQYHPEFLSRPDRPEGLYAAFIQAALAYEEKLKD

SEQ ID NO: 31132 - DNA, 1614 bp, Leuconostoc mesenteroides subsp. mesenteroides ATCC 8293
  CDS (1)..(1614): transl_table=11
atggcagataaacaagtgaagtatatttttgttaccggtggtgttgtttcatctcttggtaaaggaatagttgcagcatcattaggtcgattgctcaaaaaccgtggattgaaattagctattcaaaaattagatccatacattaatattgatcccggtacaatgtcaccatatcaacacggggaaacatttgttactggcgatggtttagaaactgatttggatatggggcactatgagcgtttcatggatattaatacaaacatgtattctaacgtgacaacagggcgtatttattctgaggttttggcaaaggaacgtcgtggtgattataatggtggtactgtacaagtgattcctcatatcacaaatgccattaaagaaaaaatgcaaaaagctgctgaatcaactgatgccgatgccgtgattgttgaagttggtggaacagttggtgatattgaaagtttgccatttgtagaagcattacgccaaatgaagtcggatttgggtagtgaaaatgttttctatattcatactagtttgattatttacttagctgcggctggtgaagccaagacaaagccaacacaacattctgtagcacaattacgttcgttaggtattcaacctgacatgattgtcttgcgtacacaacgtcctctagaagagaatttgaagcaaaagatatcaacatttaccgatgttaatgaaaatgcagttattgaatctcgtgatgtagaaactctttatgagattccgttaaatctgcaagcacagggcatggatgatgttgtattacataagttaaagcttgatgcgccaaaggcagaaatgtctgattggtcaaagatggttgaattaattaagcatcctaagaagacagttaacgtgactttggttggtaaatatactgatttgcctgatgcttatatctctgttaacgaagccttgaagcatgcaggttatgcccaagatgccgatgtcaagattaatcatgtgaaatcagaaaatgttacaccagagaacgttgctgaattgttagcaggtgctgatggtgtgattgtacctggtggatttggtgaacgtggtactgaaggtaagattcaagccattcgttatgcgcgtgaaaacaatattcctttcttaggcatttgcttgggtatgcaactagcatcaatcgaatttgctcgtcatgttttaggttataaggacgcgaattcgacagaattaaatcctaatacttcagcgccaattattgatttgatgaaagatcaagccaacgtcgaaaacctaggtggtacgctacgtctgggattatatccagcaatgctattacctggcacattgacagccaaggcttatgggaatcaatcagaaatcgaacaacgtcatcgtcatcgttatgaattcaatacacaatatcgtgaagaatttgaaaaggcgggtatgttattctcagcaacatcccctgataaccgtttgatggaagttattgagtatcctaagaatgatttctttatcgcagcgcaatatcatccagaatttttgtcaaggccagatcgtcccgaaggcttgtatcatgacttcgtggctgcctcaattaaaaatagttga

SEQ ID NO: 31133 - protein, 537 aa, Leuconostoc mesenteroides subsp. mesenteroides ATCC 8293
MADKQVKYIFVTGGVVSSLGKGIVAASLGRLLKNRGLKLAIQKLDPYINIDPGTMSPYQHGETFVTGDGLETDLDMGHYERFMDINTNMYSNVTTGRIYSEVLAKERRGDYNGGTVQVIPHITNAIKEKMQKAAESTDADAVIVEVGGTVGDIESLPFVEALRQMKSDLGSENVFYIHTSLIIYLAAAGEAKTKPTQHSVAQLRSLGIQPDMIVLRTQRPLEENLKQKISTFTDVNENAVIESRDVETLYEIPLNLQAQGMDDVVLHKLKLDAPKAEMSDWSKMVELIKHPKKTVNVTLVGKYTDLPDAYISVNEALKHAGYAQDADVKINHVKSENVTPENVAELLAGADGVIVPGGFGERGTEGKIQAIRYARENNIPFLGICLGMQLASIEFARHVLGYKDANSTELNPNTSAPIIDLMKDQANVENLGGTLRLGLYPAMLLPGTLTAKAYGNQSEIEQRHRHRYEFNTQYREEFEKAGMLFSATSPDNRLMEVIEYPKNDFFIAAQYHPEFLSRPDRPEGLYHDFVAASIKNS

SEQ ID NO: 31134 - DNA, 1641 bp, Solibacter usitatus Ellin6076
  CDS (1)..(1641): transl_table=11
atggctaaatacatattcgtaaccggcggcgtggtctcctctttggggaaagggattgcggccgcgtcgatcggttgcctgctggagagccgcggactcaaagtcacgtgccagaagttcgatccgtacctgaatgtagacccgggcacaatgagcccgttccagcacggcgaagtctttgtcaccgacgatggggcggagaccgatctcgacctgggccactacgagcgcttcacgcactccaagctgacgcagagcaacaacctgaccagcggccgaatctacgagcagatcatcgcgcgcgaacgccgcggcgattatctcggcaagacggtgcaagtaattccgcacgtcaccaatgaaatcaaagcggcgatgaaaaaagtgtcccaggatgtggacgtggtgatcgccgaaatcggcggcaccgtgggcgacatcgaatccctgccgttcctcgaggccatccgccagatgcgccacgagcagggccgcgacaactgtctgttcgtgcacgtcactctggtgccgtggatcgccgccgcacaggaattgaagaccaagccgacgcagcacagcgtgaaggagctgcgcgcgctcggtatccaaccggacattctgctttgccgctgcgagcgctttatccccgaggacatgaaggagaagatcgcgctcttctgcgacgtggacgtacaggccgtgatcacggcgcgcgacgtgaagagcgtgtacgaagttccggtgggcttcgccgccgagggcgtggacgagatcgccatgcggctgctcaaactggaagccgggccgcgggacctcgccaaatggaatgcgatgctggatcgcatcgaacagccgaagggcgaagtttccatcgcgctggtcggcaaatacgtggagtatgaggactcctacaagagcctcaaggaagcactgctgcacggcgggctggcgcatcaattgaaggtcaacattcactggatcgaggccgagggcgtcgccggtgaaaattgggagcggcagctggaggactacgatggcgtgctggtgccgggcggtttcggcaagcgcggcatcgacggcatgctcaacgcgatccgcttcgcgcgcgagaacaaggtgccgtacttcggcatctgcctcggtatgcagacgctcgtgatcgagttcgcacgcaacgtctgcggtctcgaagcagccgattccaccgagttcaacagcggcaccccgcatcgtgtgattttcaagctgcgtgagctgaagggcatcgacgagttgggcggcaccatgcggctgggcagttgggcctgcaaactggccgaaggcagcttcgcgcacaaggcctacggcacgcgcgagattaacgaacgccatcgccaccgctatgagttcaatcgcgaatatgaagaccgcctgaaagccggcggcctgaagatcaccggcgaaacgcccgacaacacctacgtcgagatctgcgagctcggcgaccacccctggttcctgggctgccagttccatcccgaattcaagagcaagccgatggaaccgcatccgttgttcaaggccttcatcggcgccgcatgggaatatcgcatgcgaaggctatcggcgattgaggagcccctgttctcccgtgccgattga

SEQ ID NO: 31135 - protein, 546 aa, Solibacter usitatus Ellin6076
MAKYIFVTGGVVSSLGKGIAAASIGCLLESRGLKVTCQKFDPYLNVDPGTMSPFQHGEVFVTDDGAETDLDLGHYERFTHSKLTQSNNLTSGRIYEQIIARERRGDYLGKTVQVIPHVTNEIKAAMKKVSQDVDVVIAEIGGTVGDIESLPFLEAIRQMRHEQGRDNCLFVHVTLVPWIAAAQELKTKPTQHSVKELRALGIQPDILLCRCERFIPEDMKEKIALFCDVDVQAVITARDVKSVYEVPVGFAAEGVDEIAMRLLKLEAGPRDLAKWNAMLDRIEQPKGEVSIALVGKYVEYEDSYKSLKEALLHGGLAHQLKVNIHWIEAEGVAGENWERQLEDYDGVLVPGGFGKRGIDGMLNAIRFARENKVPYFGICLGMQTLVIEFARNVCGLEAADSTEFNSGTPHRVIFKLRELKGIDELGGTMRLGSWACKLAEGSFAHKAYGTREINERHRHRYEFNREYEDRLKAGGLKITGETPDNTYVEICELGDHPWFLGCQFHPEFKSKPMEPHPLFKAFIGAAWEYRMRRLSAIEEPLFSRAD

SEQ ID NO: 31136 - DNA, 1644 bp, Magnetococcus sp. MC-1
  CDS (1)..(1644): transl_table=11
atggcgaaatttgtttttatcacaggtggcgtggtctcttctttgggtaaaggtttggcggcagcatcgctggcggctctgctccaggcgcggggctaccgggtcacgatgcaaaagctggatccctatatcaacgtggatccaggcaccatgagtccttttcaacatggggaggtgtttgtcaccgatgatggtgccgaaaccgacctggatctgggccactatgagcgctttttgggcctgcccatgggcaaggccaataactggaccgcaggacgcatctatcagcacgtcatcaagcgggagcgtcggggggactatctgggagccaccgtacaggtgattccgcatattaccgatgccattaaaaacgcggtgcgcagtgtgggcaacgatgtggatattgccctcatcgaggtgggggggacggtgggggatattgaatccctaccctttatggaggccattcgtcagctccgcaacgatctgggcaaacaggagaccatgtttgtacacctgaccctgttgccctacattcctacctcgggggagttgaaaaccaagcctacccagcactccgtcaaagagttgctggccattggtattcaacccgatattctggtgtgtcgctccgaccgtgcagtacccgagaccgaaaaacgtaaaatcgccctgttctgtaacgtggatcaacaaaatgtgatctcctgtgtggaccaggataccatctacaaggtcccctttgccctctatcaagagggcttcgcgcgaaaagtattggaccatctgggtatgggggtgcgggaacccgatctcagcgcttgggaggcggtgttggaggcggtggttaaccccgcctataaaaccaccatcgccattgtgggcaaatatgtggagctgaaagatgcctacatgtccctggccgaggcgctctcccacgggggcattgccaataatgccaaggtctccatccgctgggtggatgccgaaaatgtgcatgatgaagaggctgaatccctactcggcggggtggatggcattttggtgcccggtggttttggtgagcgaggcacccatggcaaattggcggccattcactacgcccgtaccaataaagtgccctattttggcatctgtttaggtatgcaaatggcggtggtggagtttgcccgtaatgtggctgggctggcgggcgcccactccaccgagctgagtgacgacaccccccatccggtgatcgggttgttaaccgagtgggtggatggcggcaccctgcaaaagcgggataaagatggcgataaagggggcaccatgcgcttgggggcctacccctgtgtgctcaaacccgactcgctggcggcatggatctacccccagggggagattatggaacggcaccggcaccgctacgagttcaataatgcctatcgggagcagttggaacaggccggtatggtcttttcagggaccagccccgataatgagttggtggaagtggtggagattccggaccatcctttctttattgcctgtcagtatcacccagagtttatgtcgcgcccacgggagccacatccgctgtttaccgcttttgtgcgggctgcgttggagcagagaaaacggcgcaaagggcaggaggcttaa

SEQ ID NO: 31137 - protein, 547 aa, Magnetococcus sp. MC-1
MAKFVFITGGVVSSLGKGLAAASLAALLQARGYRVTMQKLDPYINVDPGTMSPFQHGEVFVTDDGAETDLDLGHYERFLGLPMGKANNWTAGRIYQHVIKRERRGDYLGATVQVIPHITDAIKNAVRSVGNDVDIALIEVGGTVGDIESLPFMEAIRQLRNDLGKQETMFVHLTLLPYIPTSGELKTKPTQHSVKELLAIGIQPDILVCRSDRAVPETEKRKIALFCNVDQQNVISCVDQDTIYKVPFALYQEGFARKVLDHLGMGVREPDLSAWEAVLEAVVNPAYKTTIAIVGKYVELKDAYMSLAEALSHGGIANNAKVSIRWVDAENVHDEEAESLLGGVDGILVPGGFGERGTHGKLAAIHYARTNKVPYFGICLGMQMAVVEFARNVAGLAGAHSTELSDDTPHPVIGLLTEWVDGGTLQKRDKDGDKGGTMRLGAYPCVLKPDSLAAWIYPQGEIMERHRHRYEFNNAYREQLEQAGMVFSGTSPDNELVEVVEIPDHPFFIACQYHPEFMSRPREPHPLFTAFVRAALEQRKRRKGQEA

SEQ ID NO: 31138 - DNA, 1641 bp, Shewanella sp. ANA-3
  CDS (1)..(1641): transl_table=11
atgactacaaggtatatcttcgttactggtggtgtggtttcatcactaggtaaaggcattgcagccgcttcattagccgcaattttagaggcccgtggtctcaatgtaaccatcatgaaactggacccatacattaacgttgatccaggtaccatgagcccaacgcaacatggtgaagtgtttgtgactgaggacggcgcagaaacagaccttgatcttggccactatgagcgtttcatccgtactaagatgaaccgtcgcaacaacttcactacgggtcgtatttacgaggaagtactgcgtaaagagcgtcgcggtgactatttaggcgcgacgattcaggtgatcccacacatcactaacgcgatcaaagaaaaagtgattgcaggcggtgaaggtcacgatgtggctatcgttgaaatcggcggtactgttggtgatatcgaatcactgccattccttgagtctatccgccaattaggcgttgaactgggccgcgatcgtaccctgtttatgcatttaaccttagtgccattccttggcgccgcgggtgaagtgaaaacgaaaccgactcaacattcagtgaaagaattgcgttctatcggtattgcaccggatgtgctgatctgccgtggcgaccgcgcgattcctgccaacgaacgtgcgaagatttcgttattctgtaacgttgaagaacgtgcggttatttcattaaaagacgtcgacagcatctacaagatccctgcgctgctgcgttcacagggtttagatgacttagtggttaagcgttttggcttagaatgccgcgaagctgacttgtctgagtgggaaaacgtcatttaccaagaagccaatccaaacggcgaagtcgtgattggtatggtcggtaaatacatcgaactgccagacgcctataagtcagtcaacgaagcattaaaacacgcgggtctgaagaaccgtgtatctgtgagcatcaagtatattgactcacaaaccgttgaagcgaaaggcgatgaagttctgcaaggtttagacggtatcttagttccaggtggcttcggtgagcgcggtgtggaaggtaagatcctagcggctaaatatgcccgtgaaaacgagctgccgtactttggtatctgtttaggtatgcaagtggcgctgattgaattcgctcgtaacgttgctggcatgaccgatgctcactcaaccgagttcaataaagcaacgccattccctgtggttggcttaatcactgaatgggttgatgaagaaggtaacgttgaacaacgccatgaagcttctgatttaggtggcactatgcgtttaggtgcgcagttatgtcacctgctggaaggctcaaaagcggcgcaagcgtacaaaggtaacacttgtgttgagcgtcaccgtcaccgttacgaagtgaacaacaagtacagagaacgtttagagcaagcgggtctggtatttagtggtttatcttcggaccgtaaactggttgagatgattgagctgaaagatcatccttggtttgtagcgggtcaattccacccagaattcacttcgaccccacgcgatggtcatccattgttcgaaggtttcgttgctgccgcaagtgcacatcaaaaacgtgatctgaagaaataa

SEQ ID NO: 31139 - protein, 546 aa, Shewanella sp. ANA-3
MTTRYIFVTGGVVSSLGKGIAAASLAAILEARGLNVTIMKLDPYINVDPGTMSPTQHGEVFVTEDGAETDLDLGHYERFIRTKMNRRNNFTTGRIYEEVLRKERRGDYLGATIQVIPHITNAIKEKVIAGGEGHDVAIVEIGGTVGDIESLPFLESIRQLGVELGRDRTLFMHLTLVPFLGAAGEVKTKPTQHSVKELRSIGIAPDVLICRGDRAIPANERAKISLFCNVEERAVISLKDVDSIYKIPALLRSQGLDDLVVKRFGLECREADLSEWENVIYQEANPNGEVVIGMVGKYIELPDAYKSVNEALKHAGLKNRVSVSIKYIDSQTVEAKGDEVLQGLDGILVPGGFGERGVEGKILAAKYARENELPYFGICLGMQVALIEFARNVAGMTDAHSTEFNKATPFPVVGLITEWVDEEGNVEQRHEASDLGGTMRLGAQLCHLLEGSKAAQAYKGNTCVERHRHRYEVNNKYRERLEQAGLVFSGLSSDRKLVEMIELKDHPWFVAGQFHPEFTSTPRDGHPLFEGFVAAASAHQKRDLKK

SEQ ID NO: 31140 - DNA, 1773 bp, Mycobacterium smegmatis str. MC2 155
  CDS (1)..(1773): transl_table=11
ttgcccgcgttacgcaagcacccgcaaaccgccacgaaacacctcttcgtcaccggtggagttgtttcgtcgctgggtaagggtctgaccgcgtccagcctcggtcagttgctgaccgcgcgggggctgcaggtgaccatgcagaagctggatccctatctcaacgtcgatcccggcaccatgaaccccttccagcacggagaggttttcgtcaccgaggacggcgccgagacggatctggatgtcggtcactacgaacgtttcctggaccgcaacctgtcgggttcggccaacgtcaccaccggtcaggtgtactcctcggtgatcgccaaggagcgccgcggtgaatacctcggtgacaccgtgcaggtcatcccgcacatcaccgacgagatcaagagccgcatcctcgcgatggccgagcccgacgccgcgggcgtccggcccgatgtcgtgatcaccgaggtcggcggcacggtcggtgacatcgaatcgcttccgttcctggaggcggcccgtcaggtccgccacgaggtgggtcgcgagaactgcttcttcctgcacgtctcgctggtgccgtacctggcaccgtcgggcgagctcaagaccaaacccacccagcactccgtggcggcgctgcgcagcatcggtatcactcccgacgcgctcatcctgcggtgcgaccgcgacgtgcccgagccgctcaagaacaagatcgcgctcatgtgcgacgtggatgtcgacggcgtcatctcgacgccggacgctccgtcgatctacgacatcccgaaggtgctgcaccgcgaggaactcgacgcctacgtggtgcgccgtctcaacctgccgttccgtgatgtcgactggaccgaatgggacgacctgctgcggcgcgtgcacgagccgcaggagaccgtgcggatcgcgttggtgggcaagtacatcgacctgtccgacgcgtatctctcggtcgccgaggcgttgcgcgcgggcgggttcaagcaccgcgccaaggtcgagatgcggtgggtggcctccgacgactgcgagaccgagcacggcgcggcggccgcgctctccgatgtccacggtgtgctgattcccggcgggttcggcatccgcggcatcgagggcaagatcggtgcgatctcctacgcgcgcaagcgtggcctgcccgtgctggggctctgcctcggcctgcagtgcatcgtgatcgaggccgcgcgcagcgttggcatcaccgaggccaactcggccgagttcgaccccaagacgcccgatccggtgatctccacgatggccgaccagcgcgacgcggtggccggtgaggccgatctgggcggcaccatgcgactgggcgcctacccggccgtgctgacgccgaattccgttgtggcgcaggcgtatcagtccaccgaggtgtccgagcggcatcggcaccgcttcgaggtgaacaacgcctaccgtgaccgcatcgccaagagcggcctgcgtttctcgggaacctcgcccgacggccatctcgtggagttcgtcgagtacgacccgcagatccatcctttcctggtgggtacgcaggcgcatcccgagctcaagagccggcccacccgtccgcatccgctgttcgcggcgttcatcggtgcggcgatcgactacaaggccgccgagcggttaccggggatggacctgcccgagcagttcgtcccggtcgagcacagcgacgcagatgcgcccgcactggaggaaccgctggagaaatccgacgtccgtgggtga

SEQ ID NO: 31141 - protein, 590 aa, Mycobacterium smegmatis str. MC2 155
MPALRKHPQTATKHLFVTGGVVSSLGKGLTASSLGQLLTARGLQVTMQKLDPYLNVDPGTMNPFQHGEVFVTEDGAETDLDVGHYERFLDRNLSGSANVTTGQVYSSVIAKERRGEYLGDTVQVIPHITDEIKSRILAMAEPDAAGVRPDVVITEVGGTVGDIESLPFLEAARQVRHEVGRENCFFLHVSLVPYLAPSGELKTKPTQHSVAALRSIGITPDALILRCDRDVPEPLKNKIALMCDVDVDGVISTPDAPSIYDIPKVLHREELDAYVVRRLNLPFRDVDWTEWDDLLRRVHEPQETVRIALVGKYIDLSDAYLSVAEALRAGGFKHRAKVEMRWVASDDCETEHGAAAALSDVHGVLIPGGFGIRGIEGKIGAISYARKRGLPVLGLCLGLQCIVIEAARSVGITEANSAEFDPKTPDPVISTMADQRDAVAGEADLGGTMRLGAYPAVLTPNSVVAQAYQSTEVSERHRHRFEVNNAYRDRIAKSGLRFSGTSPDGHLVEFVEYDPQIHPFLVGTQAHPELKSRPTRPHPLFAAFIGAAIDYKAAERLPGMDLPEQFVPVEHSDADAPALEEPLEKSDVRG

SEQ ID NO: 31142 - DNA, 1710 bp, Nocardioides sp. JS614
  CDS (1)..(1710): transl_table=11
gtgaaccaggcgacgcccaccaagcacgtgttcgtgaccggaggcgtcgcctcctcgctcgggaagggcctgacggcttccagcctcggtagcctcctgcgctcgcgcggtctgcgcgtcaccatgcagaagctggacccctacctcaacgtcgacccggggacgatgaacccgttccagcacggcgaggtgttcgtcaccaacgacggagccgagaccgacctcgacatcgggcactacgagcggttcctcgacaccgacctgagccagatcgcgaacgtcaccaccggccaggtgtactccagcgtgatcgccaaggagcgccgcggcgactacctgggcgacaccgtgcaggtgatcccgcacatcacgaacgagatcaaggagcggatcctcgccatgggcggcaccggcgaggacggccggagcgtcgacgtggtgatcaccgaggtcggcggcaccgtgggcgacatcgagtcgctgccgttcctcgaggccgcccgtcaggtgcgccacgacatcgggcgggagaactgcttcttcctgcacgtctccctggtgccctacatcgggccgtcgggtgagctgaagaccaagcccacccagcactcggtggccgcgttgcgtcaggtcggcatccagcccgacgccgtcgtctgccgcgccgatcgcgagctcccgccgtcgatcaagaagaagatctcgttgatgtgcgacgtcgaccaggatgcggtggtcacgtgcgcggacgcgccgtcgatctacgacatccccaaggtgctgcaccgcgagggcctggacgcgtacctggtgcgccggctcgacctgcccttccgcgacgtggactggacggtgtgggacgacctgctgcgccgggtgcaccatccgaaggaggaggtgacggtcgcgctggtcggcaagtacgtcgacctgcccgacgcgtacctgtcggtcgccgaggcactgcgcgccggcggcttcgcccatgaggccaaggtccagctgcggtgggtcgcctccgacgagtgccagacggcggccggagcggcgcgcaacctgcaggacgtcgacgcgatctgcgtgcccggcggattcggggtacgcggcatcgagggcaagctgggtgcgctcacctacgcccgcacgcacggcatccccacgctggggctgtgcctgggcctgcagtgcatggtgatcgagtacgcccgcaacgtggtggggctggagaaggcggggtccacggagttcgaccccgacaccccggagccggttatcgcgaccatggccgagcagaaggccttcgtcgagggcgccggcgacctcggcgggacgatgcggctgggcctgtacccggcggccctcaaggacggctcgatcgcccgggaggtctacggcagcagcctcatcgaggagcggcaccggcaccgctacgaggtcaacaacgcctaccgcgaccagctcgaggaggccggtctggtcttctccggcacctcgccggacaacagcctggtggagtacgtcgagctgccgcgagacacgcacccctactacatctccacgcaggcgcaccccgagctgcgctcccgcccgacccggccgcatccgctgttcgcgggcctggtcggcgcggccatcgagcgccagcgcgagctgcggttccccatcgacgagaccgggctgcgccgcgagcccgagcccgacgaggactga

SEQ ID NO: 31143 - protein, 569 aa, Nocardioides sp. JS614
MNQATPTKHVFVTGGVASSLGKGLTASSLGSLLRSRGLRVTMQKLDPYLNVDPGTMNPFQHGEVFVTNDGAETDLDIGHYERFLDTDLSQIANVTTGQVYSSVIAKERRGDYLGDTVQVIPHITNEIKERILAMGGTGEDGRSVDVVITEVGGTVGDIESLPFLEAARQVRHDIGRENCFFLHVSLVPYIGPSGELKTKPTQHSVAALRQVGIQPDAVVCRADRELPPSIKKKISLMCDVDQDAVVTCADAPSIYDIPKVLHREGLDAYLVRRLDLPFRDVDWTVWDDLLRRVHHPKEEVTVALVGKYVDLPDAYLSVAEALRAGGFAHEAKVQLRWVASDECQTAAGAARNLQDVDAICVPGGFGVRGIEGKLGALTYARTHGIPTLGLCLGLQCMVIEYARNVVGLEKAGSTEFDPDTPEPVIATMAEQKAFVEGAGDLGGTMRLGLYPAALKDGSIAREVYGSSLIEERHRHRYEVNNAYRDQLEEAGLVFSGTSPDNSLVEYVELPRDTHPYYISTQAHPELRSRPTRPHPLFAGLVGAAIERQRELRFPIDETGLRREPEPDED

SEQ ID NO: 31144 - DNA, 1641 bp, Azoarcus sp. BH72
  CDS (1)..(1641): transl_table=11
atgaccaaatacgtcttcgttactggcggtgtcgtgtcctctctgggcaagggcatcgcagccgcctccctcggcgccattctcgaatcccgcggcatcaaggtgacccacctcaaactggatccgtacatcaacgtcgatccgggcaccatgagccccttccagcacggtgaagtgttcgtcaccgaagacggcgcggaaaccgacctcgatctgggccactacgagcgcttcaccagcgccaagatgagcaagcgcaacaacttcaccaccggccagatctacgaggcggtgatcaagaaggagcggcgcggcgaatatctcggcaagacggttcaggtcattccgcacatcaccgatgagatcaagagctacgtcaagcgtggcgccgaaggcgccgatgtggcgatcgttgaagtcggcggcactgtcggcgacatcgagtcgctgcccttcctcgaagccatccgccagatgggcatcgaagaaggccgcaacgccacctgtttcatccacctcacgctgctgccttacattccgaccgcgggcgagctgaagaccaagccgacccagcactcggtgaaggagttgcgcgagatcggcatccagcccgacatcctgctgtgccgcgccgaccgctccattccggcggacgagcgccgcaagatcgcgctgttctgcaacgtgatgccggaagcggtgatcgagtgcctcgatgccgactccatctacaagattcccggtcagctgcacgaccagatgctggacgagatcgtctgccacaagctgggcatccttgcccgcgcggccgatctttccgtctgggagaacctgatccgcgcgctggaaaacccgaagcaggcggtcgatatcgccttcgtcggcaagtacgtcgatctgaccgagtcgtacaagtcgctgatcgaggcgctcaaccacgccggcatgcacaccgaatcgaaggtgaacatccactacctcgattccgaagagatcgaacgcagcggctgcgcggtgctcgagaagatggatgccattctggtgcccggcggcttcggcaagcgcggcaccgaaggcaagatcgccgcgatccgctatgcgcgcgagaacaaggtgccgtatctcggcatctgtctgggcatgcagctggcggtcgtggaattcgcccgcgacgtggccggcatggcggaggcgcactccaccgagttcgagcgcgaaaccccgttcccggtcatcggcctgatcaccgaatgggctgatcgcagcggcaaggtcgaaaagcgcagcgaagactccgatctcggcggcacgatgcggctcggcggccaggtgtgcaagctggccgacggcacgctcgcacgtgaggtctacggttctggcgagatcatggagcgtcaccgccatcgctatgaagtgaacaacacgctgctggcccagctcgaagagaaggggttggtggtttccgggcgcgccccggtgaccgacctgtgcgaaatggtcgaactgcccgccgatgttcatccctggttcgtcggttgccagttccatccggaattcacctccaatccgcgcaaggggcatccgctgttcaccgcctacgtcaaggcagcgatcgcccgccatagcgcgtcacgcggctga

SEQ ID NO: 31145 - protein, 546 aa, Azoarcus sp. BH72
MTKYVFVTGGVVSSLGKGIAAASLGAILESRGIKVTHLKLDPYINVDPGTMSPFQHGEVFVTEDGAETDLDLGHYERFTSAKMSKRNNFTTGQIYEAVIKKERRGEYLGKTVQVIPHITDEIKSYVKRGAEGADVAIVEVGGTVGDIESLPFLEAIRQMGIEEGRNATCFIHLTLLPYIPTAGELKTKPTQHSVKELREIGIQPDILLCRADRSIPADERRKIALFCNVMPEAVIECLDADSIYKIPGQLHDQMLDEIVCHKLGILARAADLSVWENLIRALENPKQAVDIAFVGKYVDLTESYKSLIEALNHAGMHTESKVNIHYLDSEEIERSGCAVLEKMDAILVPGGFGKRGTEGKIAAIRYARENKVPYLGICLGMQLAVVEFARDVAGMAEAHSTEFERETPFPVIGLITEWADRSGKVEKRSEDSDLGGTMRLGGQVCKLADGTLAREVYGSGEIMERHRHRYEVNNTLLAQLEEKGLVVSGRAPVTDLCEMVELPADVHPWFVGCQFHPEFTSNPRKGHPLFTAYVKAAIARHSASRG

SEQ ID NO: 31146 - DNA, 1635 bp, Neisseria meningitidis FAM18
  CDS (1)..(1635): transl_table=11
atgaccaaattcattttcgtaaccggcggcgttgtctcctcactgggtaaaggtatcgccgccgcttctattgccgccatcctcgaatcgcgcggcttgaacgttaccatgctcaagctcgatccttatatcaacgtcgatcccggcacgatgagcccgttccaacacggcgaagtgttcgtaaccgacgacggcgcggaaaccgacctcgacttgggacactacgaacgctttatcgattccacgatgacccgccgcaacagcttcagcacggggcaggtgtacgaaaacgtcatcgccaaagaacgacggggcgactatttgggcggcacggttcaagtcattccgcacattaccgacgaaatcaaacgccgcatccacgaaggcgcggcaggttacgatgtggcgattgtcgaaatcggcggtacagtcggcgatatcgaatctttgccattcttggaagccatccgccagatgcgaagccagttgggacgcaacaacaccctgttcgcccacttgagctacgtcccctacatcgccgctgcaggcgaaatcaaaaccaagccgacccagcacaccgttaaagaaatgttgagcatcggtttgcaacccgacatcctgatttgccgtatggacaggacaatgcctgcggacgaacgccgcaaaatcgccttgttctgcaacgtggaagaacgcgcgattgtcggcagctacgatgtggacagcatctacgaatgccccgaaatgctgcacgaccaaggcatcgacaacatcattaccgagcagttgcagcttaatgtgcagcaggcggatttgaccgcgtggaaaaaaatcgtccacgccatccaaaacccgaaacacaccgtcaaaatcgccatggtcggcaaatacgtcgatttgaccgagtcctacaaatcgctgatcgaagccttgaaacacgcaggcattcacaccgaaaccgacgtacaaattacctttgttgacagcgaaagcatcgagaaaaacaacggcgacgtttccatgcttaaagacatggatgccatcctcgttcccggcggttttggttcgcgcggcgtggaaggcaaaatcgccgctgtgcgctatgcccgcgaaaacaacgtgccatacttgggcatctgcctcggtatgcagattgcgctgatcgaatacgcccgcgacgtggcaggtttgaaaggtgcgaattccaccgagttcgacctcaaatgcgccgcccccgtcgttgccctgattgacgaatggcaaactgccgacggcagcgtcgaaacccgcgacgaatccgccgatttgggcggcaccatgcgtttgggcgcgcaagaagtcgaattgaaagcaggcagcctcgccgccaaaatctacggcagcgaacacatccgcgaacgccaccgccaccgctacgaagtcaacaacaactacgttcctacgctggaacaggcaggtttggtcatcggcggcgtatccgccggacgcgaacgcttggtcgaaaccatcgaactgccgaaccatccttggttcttcgcctgccagttccaccccgagtttacctccaatccgcgcaaagggcatcctttgttcaccgcgtttgtcaaagctgcgttgaacaataaaaaagcctga

SEQ ID NO: 31147 - protein, 544 aa, Neisseria meningitidis FAM18
MTKFIFVTGGVVSSLGKGIAAASIAAILESRGLNVTMLKLDPYINVDPGTMSPFQHGEVFVTDDGAETDLDLGHYERFIDSTMTRRNSFSTGQVYENVIAKERRGDYLGGTVQVIPHITDEIKRRIHEGAAGYDVAIVEIGGTVGDIESLPFLEAIRQMRSQLGRNNTLFAHLSYVPYIAAAGEIKTKPTQHTVKEMLSIGLQPDILICRMDRTMPADERRKIALFCNVEERAIVGSYDVDSIYECPEMLHDQGIDNIITEQLQLNVQQADLTAWKKIVHAIQNPKHTVKIAMVGKYVDLTESYKSLIEALKHAGIHTETDVQITFVDSESIEKNNGDVSMLKDMDAILVPGGFGSRGVEGKIAAVRYARENNVPYLGICLGMQIALIEYARDVAGLKGANSTEFDLKCAAPVVALIDEWQTADGSVETRDESADLGGTMRLGAQEVELKAGSLAAKIYGSEHIRERHRHRYEVNNNYVPTLEQAGLVIGGVSAGRERLVETIELPNHPWFFACQFHPEFTSNPRKGHPLFTAFVKAALNNKKA

SEQ ID NO: 31148 - DNA, 1659 bp, Acidovorax sp. JS42
  CDS (1)..(1659): transl_table=11
atgaccaaattcgtcttcgtcaccggcggtgtggtgtcttccctgggcaagggaatcgcctcagcctcccttgccgcgatcctcgaatcgcggggtctcaaagtcaccctcatcaagctcgacccgtacatcaacgtggacccgggcaccatgtcgcccttccagcatggtgaggtcttcgtgaccgacgacggcgccgaaaccgacctggacctcggccactacgagcgcttcatcgaaacgcgcatgaagcaggccaacaacttcaccaccggccgcatctaccagtccgtgctggagaaggagcgccgcggcgactaccttggcaagaccgtgcaggtgatcccgcacgtgaccaatgaaatccaggagttcatcaagcgcggcgccggcatcggcacgccagacgccgtggacgtggccatctgcgaggtgggcggcacggtgggcgacatcgagtcgctgcccttcctggaggcggtgcgccagctctcgctgaagctgggcccgaacaattcggccttcgtgcacctgacctacctgccgtggatcgcggcagccggcgaactcaagaccaagcccacgcagcacaccgtgcagaagctgcgcgagatcggcatccagcccgacgcactgctgtgccgcgcgctgcacgccgtgcccgaggaagaaaaagagaagatctccctcttcaccaacgtggccgaatggggcgtgatctccatgtgggacgtggacaccatctacaaggtgccgcgcatgctgcacgagcagggcctggacggactgatctgcgacaagctgcgcctgaacacaccgcccgccaacctcaagcgctgggacgacctggtgtatgagaccgagcacccgcgcggcgaggtgcagatcgccatggtgggcaagtacgtggaactgtcggacgcctacaagtcggtcaatgaggcgctcaaacacgcgggtatgcaaagccatgtgcgcgtgaagatcacccacgtcgactcggaaaccatcagcgacgacaacgccgcccagcagctggcgcagtacgacgccatcctcgtgcccggcggcttcggcagccgcggcgtggagggcaagatctccacggcgcgctacgcgcgcgagcaccaggtgccctacctgggcatctgcctggggatgcaggtggccaccatcgaatacgcgcgccacgtggcgggcctgcagggcgccaattccaccgagttcgaccccgccacgccgcatccggtcatcgccctgatcaccgaatggaaggacgaggacggcaccatcaagacgcgctccgagaattccgacctgggcggcaccatgcgcctgggcgcgcagagctcggacgtgcagcccggcaccctggcgcacagcatttacggcgacgtggtcaccgagcgccaccgccaccgctacgaggccaacgtgcagtacctggaccgcttgcgcagcgccgggctggtgatctcggcgctcacgcagcgcgagcacctcaccgagatcgtcgagctgccgcagagcgtgcatccctggttcatcggcgtgcagttccaccccgagttcaagtccacgccctggagcggccacccgctgttcaacgccttcatcaaggcggccgtggaacaccagaagccagcggcgaaagcctga

SEQ ID NO: 31149 - protein, 552 aa, Acidovorax sp. JS42
MTKFVFVTGGVVSSLGKGIASASLAAILESRGLKVTLIKLDPYINVDPGTMSPFQHGEVFVTDDGAETDLDLGHYERFIETRMKQANNFTTGRIYQSVLEKERRGDYLGKTVQVIPHVTNEIQEFIKRGAGIGTPDAVDVAICEVGGTVGDIESLPFLEAVRQLSLKLGPNNSAFVHLTYLPWIAAAGELKTKPTQHTVQKLREIGIQPDALLCRALHAVPEEEKEKISLFTNVAEWGVISMWDVDTIYKVPRMLHEQGLDGLICDKLRLNTPPANLKRWDDLVYETEHPRGEVQIAMVGKYVELSDAYKSVNEALKHAGMQSHVRVKITHVDSETISDDNAAQQLAQYDAILVPGGFGSRGVEGKISTARYAREHQVPYLGICLGMQVATIEYARHVAGLQGANSTEFDPATPHPVIALITEWKDEDGTIKTRSENSDLGGTMRLGAQSSDVQPGTLAHSIYGDVVTERHRHRYEANVQYLDRLRSAGLVISALTQREHLTEIVELPQSVHPWFIGVQFHPEFKSTPWSGHPLFNAFIKAAVEHQKPAAKA

SEQ ID NO: 31150 - DNA, 1626 bp, Magnetospirillum magnetotacticum MS-1
  CDS (1)..(1626): transl_table=11
atgacccgtttcatcttcatcaccggtggtgtggtttcctcgcttggcaagggcctggcctcggcggcgctgggggcgctgctccaggcgcgtggcttcaaggtccgcctgcgcaagctcgatccctatctcaacgtggatccggggaccatgagtccctaccagcatggcgaggtctatgtcaccgatgacggtgccgagaccgacctggacctgggccattacgagcgcttcaccggcgtggcgtcgcgcaagagcgacaacatcaccaccgggcgcatctattccaatgtgatcgccaaggaacggcgcggcgactatctgggcgccaccgtccaggtgattccccatgtcaccgacgccatcaaggaattcgtcaaaagcgatctgacggacgaggatttctgtctgtgcgagatcggcggcacggtgggcgatatcgaaagcctgcccttcctggaagccatccgccagttgggcaacgaactgggccgggcgcgcaccatgttcgtgcatctgaccctggtgccctatatcccctctgcgggcgagttgaagaccaagcccacccagcattcggtcaaggaattgctgtcggtggggatccagccggacatgctgatgtgccgttgtgaccgggagatccccgagggcgaccgcaagaagatcgccctgttctgcaacgtggcgcctgccgcggtcattccggcgctggacgtggattccatctatcaggtgccggtttcctatcacgagcagggcatggatgccgtcgtctgccgccatttcggcctggacgcgcccatgccggatttgaagcgctggaccaccatcgtcgagcgcatccgccagcccgagggcgaggtcaccatcgcggtggtcggcaagtatatcagcctgctcgacagttataagtctctggccgaggcgctgtaccacggcggcatcgccaataacgtgcgtgtcaacctgaactggatcgacagccagatcttcgaacagggcgacgtggtccagcatctggagccctgtgacggcattctggtgcccggcggcttcggcgagcgcggcgccttcggcaaagtcgaggcggtgcgcttcgcccgcgagcgcaaggttccctatttcggcatctgcttcggcatgcagatggcggtgatcgaggcggcgcgcaatctggccggttacaaggatgccagttccaccgagttcggcccctgcgacaatcccgtggtcggcctgatgaccgagtggatgaagggcaatatgctggaaaagcgggccgcgtccggtgatctgggcggcaccatgcgtctgggcgcctatgaatgcgacctgaagcagggctcgcgcgtgcgcgagatctacggccagggccgcatttccgagcgccatcggcatcgctacgaggtcaatatgggttatcgggccgatctggagaagacgggtctgtccttctccggcctgtcgcccgacggtgtgctgcccgagatcgtcgagattccggatcatccgtggttcgtcggcgttcagttccacccggaactcaagtccaagcccttcgatccgcatccgctgttcaccagcttcatcgcggcggcggtccgtcagtcgcgtctcgtctag

SEQ ID NO: 31151 - protein, 541 aa, Magnetospirillum magnetotacticum MS-1
MTRFIFITGGVVSSLGKGLASAALGALLQARGFKVRLRKLDPYLNVDPGTMSPYQHGEVYVTDDGAETDLDLGHYERFTGVASRKSDNITTGRIYSNVIAKERRGDYLGATVQVIPHVTDAIKEFVKSDLTDEDFCLCEIGGTVGDIESLPFLEAIRQLGNELGRARTMFVHLTLVPYIPSAGELKTKPTQHSVKELLSVGIQPDMLMCRCDREIPEGDRKKIALFCNVAPAAVIPALDVDSIYQVPVSYHEQGMDAVVCRHFGLDAPMPDLKRWTTIVERIRQPEGEVTIAVVGKYISLLDSYKSLAEALYHGGIANNVRVNLNWIDSQIFEQGDVVQHLEPCDGILVPGGFGERGAFGKVEAVRFARERKVPYFGICFGMQMAVIEAARNLAGYKDASSTEFGPCDNPVVGLMTEWMKGNMLEKRAASGDLGGTMRLGAYECDLKQGSRVREIYGQGRISERHRHRYEVNMGYRADLEKTGLSFSGLSPDGVLPEIVEIPDHPWFVGVQFHPELKSKPFDPHPLFTSFIAAAVRQSRLV

SEQ ID NO: 31152 - DNA, 1638 bp, Nostoc punctiforme PCC 73102
  CDS (1)..(1638): transl_table=11
atgactaagtttatcttcgtaactggaggcgtagtttccagtattggtaagggcattgtagcagcaagtctagggcgtttgctcaagtcgcgcggatattcggtgtcgattctcaaactcgacccttatatcaatatcgatcctggcacaatgagcccttttcagcatggggaagtattcgttacccaggatggtgcggagacagatttagacttggggcattacgaacgttttaccgatacctcaatgtcgcgcttgaactgtgtgactactggctcgatttaccaggcagtcattaataaagagcgacggggagactacaatggtggcactgtacaggttattcctcatattaccaatgaaatcaaagagcggattctgcgagttgctaaaagtacaaatccgtccgtagtaatcacagaaattggcgggacggtgggagatattgaatcactgccgtttttggaagcgattcgccagttccgcaaagaggttgggcggcaacatgtactgtatatgcatgtaacgttggtaccgtggattgcttctgcgggtgagatgaaaactaagccaacacagcattcagttaaagaactcagatccattggtattcaaccagatattttagtttgtcggagcgatcgccccttacccaagggattaaagcaaaaattgtcgggattttgcgatgtgcccgaagaatgcgtcattacttctcaagatgccaaaagtatctatgaagtacccctaaatctggaacgggaaggaatggcagaacaagtgctgaacttgctgcaaatggagcaacgccaaccagatttgacgcagtggcaaaccttggtacaacggttacatactcctaagcacgagctagaaattgccattgtcggcaaatatgtgcagttaagtgatgcctatttatctgtcgtggaagcactaaaccatgctgcaatttccacttatggcaaactgcgcttgcgttgggtgaactcagaagatttggaaaatgaatcagccgaaactcatcttgggggtgtcgatggcgtagttgtgccaggaggttttggggttcggggagtggatggcaaaattgccgccattaaatacgcccgcgatcgccaaattccttttttgggtttatgcctgggaatgcaatgctctgtaattgaatgggctaggaacatagggggattaacagatgctaatagtgctgaatttgaccctcatacaacgaatccggtaattaatttattgccaggacagcaggaagttgtcgatttagggggtacaatgcgcttggggctatatccttgtcgtgttcttcctgatacattggctttcaagctttatcaagaagatgtaatttatgaacgacatcgacatcgctatgagttcaacaatgcttaccgcgatctcttattaaagtccggctatgcgattagtgggacttctcctgatggacagttagttgaaattgtggaattacccaagcacccattctttctagcttgccaatttcatccagaatttcaatctcgtcctagtagccctcatcctttatttaaagggtttattcaagcagcgatcgctctttctttgtcaacttcaactacaccaacaccattggaggtttcttaa

SEQ ID NO: 31153 - protein, 545 aa, Nostoc punctiforme PCC 73102
MTKFIFVTGGVVSSIGKGIVAASLGRLLKSRGYSVSILKLDPYINIDPGTMSPFQHGEVFVTQDGAETDLDLGHYERFTDTSMSRLNCVTTGSIYQAVINKERRGDYNGGTVQVIPHITNEIKERILRVAKSTNPSVVITEIGGTVGDIESLPFLEAIRQFRKEVGRQHVLYMHVTLVPWIASAGEMKTKPTQHSVKELRSIGIQPDILVCRSDRPLPKGLKQKLSGFCDVPEECVITSQDAKSIYEVPLNLEREGMAEQVLNLLQMEQRQPDLTQWQTLVQRLHTPKHELEIAIVGKYVQLSDAYLSVVEALNHAAISTYGKLRLRWVNSEDLENESAETHLGGVDGVVVPGGFGVRGVDGKIAAIKYARDRQIPFLGLCLGMQCSVIEWARNIGGLTDANSAEFDPHTTNPVINLLPGQQEVVDLGGTMRLGLYPCRVLPDTLAFKLYQEDVIYERHRHRYEFNNAYRDLLLKSGYAISGTSPDGQLVEIVELPKHPFFLACQFHPEFQSRPSSPHPLFKGFIQAAIALSLSTSTTPTPLEVS

SEQ ID NO: 31154 - DNA, 1638 bp, Actinobacillus pleuropneumoniae serovar 1 str. 4074
  CDS (1)..(1638): transl_table=11
atggcaacgaattatattttcgtgacgggcggtgttgtttcatctttaggcaaaggtattgccgctgcatctctcgcatcaattctcgaagctcgtggtttaaacgtaaccattatgaagctggatccttatatcaatgtcgatccgggtacaatgagcccgacgcaacacggtgaagttttcgttacgcaagacggtgcggaaaccgatttagacttaggtcactatgagcgttttattcgttctaaaatgagcaaagcgaacaactttaccagcggtaaaatttactccgaagtattacgcaaagaacgccgcggcgattatttaggtgcgactatccaagtaatcccgcacatcactaacgaaattaaagaacgtgtgattgaaggcggtaaaggtcgtgatgtggtgatcgtggaagtcggcggtacggtaggcgatattgaatcattaccgttcttagaagcgttacgtcagttagcggtcgatgtcggtcgagaaaaaaccttatttatgcacttaactttagtgccgtatattccgactgccggcgaagtgaaaaccaaaccaacgcaacactcggtaaaagaattactttcaatcggtattcaaccggacgtgttaatttgccgttcggatcgtgcgattccaagcaacgagcgtaaaaaaatcgccttattctgtaacgtgccggaacgtgcggtaatttccttaaaagacgtggattcgatttaccgtattcctgaattactcaaatcacaaggtttggatacttttgtttgcgatcgtttccgcttagattgtccggaagcggatttaagcgaatgggaacaagtgctttatcgccaagcgaacccgaccggtgaagtgactatcggtatggtaggtaaatatgtggaattaccggatgcgtataaatcggtaaacgaagcgttaaaacacgccggtttaaccaatcgcttaacggtcaatatcaagtatattgattcgcaagatatcgaaaccaaaggcgttgaattactccatggcttagatgcgattttagtgccgggcggtttcggctaccgtggcgtagaaggtaaaatccgtaccgcacaatatgcgcgtgaaaacaaaatcccttatttaggtatttgtttaggtatgcaaatcgcactgatcgaatatgcacgtaacgtagcaggtttaacccaagcaaattcatccgagtttgataaagattgtccgcaaccggtagtgggtttaattaccgaatggcaggatgagtcgggtaatgtggaaacacgttccgatgagtcggatttaggcggcacaatgcgtttaggcgcacaacaatgtcacttaatcgaaggcactaaagcacgtgaagtttatggtgcggaaacgattgttgagcgtcaccgtcaccgttatgaagtaaacaatactttattaccgcaaatcgaagcggcaggcttaaaagtgagcagtttatcggcagaccgtaaattagtggaaattattgaaattccaaaccacccttggtttattgcggcgcagttccacccggaatttacttcgacaccgcgtgacggtcatccgttatttgccggctttgtggcggcggcaaaagcatatcaagatagccataaagcgtaa

SEQ ID NO: 31155 - protein, 545 aa, Actinobacillus pleuropneumoniae serovar 1 str. 4074
MATNYIFVTGGVVSSLGKGIAAASLASILEARGLNVTIMKLDPYINVDPGTMSPTQHGEVFVTQDGAETDLDLGHYERFIRSKMSKANNFTSGKIYSEVLRKERRGDYLGATIQVIPHITNEIKERVIEGGKGRDVVIVEVGGTVGDIESLPFLEALRQLAVDVGREKTLFMHLTLVPYIPTAGEVKTKPTQHSVKELLSIGIQPDVLICRSDRAIPSNERKKIALFCNVPERAVISLKDVDSIYRIPELLKSQGLDTFVCDRFRLDCPEADLSEWEQVLYRQANPTGEVTIGMVGKYVELPDAYKSVNEALKHAGLTNRLTVNIKYIDSQDIETKGVELLHGLDAILVPGGFGYRGVEGKIRTAQYARENKIPYLGICLGMQIALIEYARNVAGLTQANSSEFDKDCPQPVVGLITEWQDESGNVETRSDESDLGGTMRLGAQQCHLIEGTKAREVYGAETIVERHRHRYEVNNTLLPQIEAAGLKVSSLSADRKLVEIIEIPNHPWFIAAQFHPEFTSTPRDGHPLFAGFVAAAKAYQDSHKA

SEQ ID NO: 31156 - DNA, 1614 bp, Rickettsia sibirica 246
  CDS (1)..(1614): transl_table=11
atggtacatttcatttttgttaccggcggcgttgtttcatcactcggtaaaggtctcacggcagcatctcttgctatgctattgcaagcgaaaggttttagagtaagtgtacgaaaactagacccttatcttaacattgacccgggaactatgaatcctcacgaacatggtgaggtatatgtaaccgatgacggagcagaaaccgatctagatcttggacattatgaacgttttaccggagtttccgcatgcaaatttgatagcatcacaacaggtgcgatatactcaaaattacttaaagatgaacgtttaggaaattacgccggcgttactgttcaagtcatcccgcatgttacaaatataataaaagattttatactttcaaacaccaagggttttgattttattatttgtgaaataggcggtacagtcggtgatattgaaggtctaccgttttttgaagctataaggcaaattggtaacaaattaaaaagcgaaaattgtttatttattcatttaacattattaccttatgttaaaaccgcccgtgaattaaaaataaaacctacccaacactcagttaaagcattacgcgctataggtatttcacctaatatactagtgtgtcgtgcagaacataacatttcaaaaggcgaaatagataaaatatctttattgtgtaatatagaatctgagtatgttgttccggcaatagatcaaaaaaatatatatttagtaccgattgcatatcataattcaggtcttgataataaagtattaaaattttttaatattaatatcatgccatctaaattagataaatggcatgatataattaataggctaaaagattctaattcaaaagtaagaatcgctataatagctaaatatcataaattaaaagatgcttataaatcagtaatcgaggcacttgatcatgcaggtatttattacaaatacaaaattgatttagtatggataaatgctgaaaatctaactgaagagaatattaataaaaaattattagatatagatgggattttagtaccaggtggatttggagaacgggcaactaaaggaaaaattatagcaataaaatatgcccgtactaataacatacctttttttggaatatgtttcggtatgcaacttgcgacgatcgaaatagctcagaatttaatcggtattaaagatgcagtaacggaagagtttaaagtagacggtacaaaaattattgagaaaataaataaaaactgtgaagactcaaaaataacaattgaaaatgtaaaaaagactatgaggctcggctcttatccttgtagtttggtcgcaagtaccattgcagctaatgcttataaaagccttgaaataaatgagagacatcgtcatagatataaatttaataatgaatttcaaaatatttttgaaaaacacggaatagtatttagcggtttttcaaaagataaagagattgtagaaataattgaactaccgctactgcgttggttcgtaggagtacaatttcatccggaatttaaatctaaaccttttgaagctcatccgttatttattcagtttattaaagcagcgattgagtataacaaatgtaattaa

SEQ ID NO: 31157 - protein, 537 aa, Rickettsia sibirica 246
MVHFIFVTGGVVSSLGKGLTAASLAMLLQAKGFRVSVRKLDPYLNIDPGTMNPHEHGEVYVTDDGAETDLDLGHYERFTGVSACKFDSITTGAIYSKLLKDERLGNYAGVTVQVIPHVTNIIKDFILSNTKGFDFIICEIGGTVGDIEGLPFFEAIRQIGNKLKSENCLFIHLTLLPYVKTARELKIKPTQHSVKALRAIGISPNILVCRAEHNISKGEIDKISLLCNIESEYVVPAIDQKNIYLVPIAYHNSGLDNKVLKFFNINIMPSKLDKWHDIINRLKDSNSKVRIAIIAKYHKLKDAYKSVIEALDHAGIYYKYKIDLVWINAENLTEENINKKLLDIDGILVPGGFGERATKGKIIAIKYARTNNIPFFGICFGMQLATIEIAQNLIGIKDAVTEEFKVDGTKIIEKINKNCEDSKITIENVKKTMRLGSYPCSLVASTIAANAYKSLEINERHRHRYKFNNEFQNIFEKHGIVFSGFSKDKEIVEIIELPLLRWFVGVQFHPEFKSKPFEAHPLFIQFIKAAIEYNKCN

SEQ ID NO: 31158 - DNA, 1614 bp, Rickettsia rickettsii
  CDS (1)..(1614): transl_table=11
atggtacatttcatttttgttaccggcggcgttgtttcatcactcggtaaaggtctaacggcagcatctcttgctatgctattgcaagcgaaaggttttagagtaagtgtacgaaaactagacccttatcttaacattgacccgggaactatgaatcctcatgaacatggtgaggtatatgtaaccgatgacggagcagaaaccgatctagatcttggacattatgaacgttttaccggagtttccgcatgcaaatttgatagcatcacaacaggtgcgatatactcaaaattacttaaagatgaacgtttaggaaattacgccggcgttactgttcaagtcatcccgcatgttacaaatataataaaagattttatactttcaaacaccaagggtgtggattttattatttgtgaaataggcggtacagtcggtgatattgaaggtctaccgttttttgaagctataaggcaaattggtaaccaattaaaaagcgaaaattgtttatttattcatttaacattattaccttatgttaaaaccgcccgtgaattaaaaataaaacctacccaacactcagttaaagcattacgcgctataggtatttcacctaatatactagtgtgtcgtgcagaacgtcacatttcaaaaggcgcaatagataaaatatctttattgtgtaatataaaatctgagtatgttgttccggcaatagatcaaaaaaatatatatttagtaccgattgcatatcataattcaggtcttgataataaagtattaaaattttttaatattaatatcatgccatctaaattagataaatggtatgatataattaataggctaaaagattctaattcaaaagtaagaatcgctataatagctaaatatcataaattaaaagatgcttataaatcagtaatcgaggcacttaatcatgcaggtatttattacaaatacaaaattgatttagtatggacaaatgctgaaaatctaactgaagagagtattaataaaaaattattagatatagatgggattttagtaccaggtggatttggagaacgggcaactaaagggaaaattatagcaataaaatatgcccgtactaataacatacctttttttggaatatgtttcggtatgcaacttgcgacgatcgaaatagctcagaatttaatcggtattaaagatgcagtaacggaagaatttaaagtagacggtacaaaaattattgagaaaataaataaaaactgtgaagactcaaaaataacaattgaaaatgtaaaaaagactatgaggctcggctcttatccttgtagtttggtcgcaaataccattgcagcaaatgcttataaaagccttgaaataaatgagagacatcgtcatagatataaatttaataatgaatttcaaaatatttttgaaaaacacggaatagtatttagcggtttttcaaaagatgaagagattgtagaaataattgaactacctctactgcgttggttcgtaggagtacaatttcatccggaatttaaatctaaaccttttgaagctcatccgttatttattcagtttattaaagcagcgattgagtataacaaatgtaattaa

SEQ ID NO: 31159 - protein, 537 aa, Rickettsia rickettsii
MVHFIFVTGGVVSSLGKGLTAASLAMLLQAKGFRVSVRKLDPYLNIDPGTMNPHEHGEVYVTDDGAETDLDLGHYERFTGVSACKFDSITTGAIYSKLLKDERLGNYAGVTVQVIPHVTNIIKDFILSNTKGVDFIICEIGGTVGDIEGLPFFEAIRQIGNQLKSENCLFIHLTLLPYVKTARELKIKPTQHSVKALRAIGISPNILVCRAERHISKGAIDKISLLCNIKSEYVVPAIDQKNIYLVPIAYHNSGLDNKVLKFFNINIMPSKLDKWYDIINRLKDSNSKVRIAIIAKYHKLKDAYKSVIEALNHAGIYYKYKIDLVWTNAENLTEESINKKLLDIDGILVPGGFGERATKGKIIAIKYARTNNIPFFGICFGMQLATIEIAQNLIGIKDAVTEEFKVDGTKIIEKINKNCEDSKITIENVKKTMRLGSYPCSLVANTIAANAYKSLEINERHRHRYKFNNEFQNIFEKHGIVFSGFSKDEEIVEIIELPLLRWFVGVQFHPEFKSKPFEAHPLFIQFIKAAIEYNKCN

SEQ ID NO: 31160 - DNA, 1608 bp, Bacillus cereus G9241
  CDS (1)..(1608): transl_table=11
atgactaagtatatttttgtaacaggcggtgtagtatcgtctttaggaaaaggtattacagcagcatctcttggaagacttttaaaaaatcgtggtttaaacgtaacgattcaaaagtttgatccatacattaacgtagacccagggactatgagcccataccaacacggtgaggtattcgtaacagatgatggtgcagaaactgacttagaccttggtcactatgagcgtttcatcgacatcaacttaaacaaatatagcaacgtaacaacaggtaaaatttactcttcagttcttcaaaaagagcgtcgtggtgaatacctaggaggaacagttcaagttattcctcacattactaacgaaattaaagagcgcgtataccgttctggtcgcgaaacaaacgcggatgttgttattacagaaattggtggaactgttggtgacatcgagtctctaccattcttagaagcaatccgtcaaattaagagcgacatcggtcgtgacaatgtaatgtacattcactgtacgttaatcccgtacttaaaagcagcgggtgaaatgaaaacaaaaccaacgcaacatagcgttaaagagcttcgcagcttaggtattcaaccaaatattatcgttgttcgtacagaaatgcctgtttctcaagatatgaaagacaagcttgcattattctgtgatattgatacaaaagcagttattgaagcacgcgatgcagatactttatatgcggttccattatctcttcaagagcaaaatatggaccaaatcgcttgcgatcacttaaaattagacaatccagctgcagatatgacagagtggactgcgctagttgaaaaagtgcgtaacctttctaagaaaacaaaaatcgctcttgttggtaaatacgtagagcttcaagatgcatacatttctgttgtagaagcacttcgtcatgcaggttactctttcgacacagatgtagaagtgaaatgggtaaacgctgagcatgtaacagcagagaacgtacaagaattagttggtgacacagacggtatccttgtaccaggtggcttcggggatcgtggtgtagaaggtaaaatcgttgcaattcaatatgctcgtgaaaacaaagtaccattcctaggaatttgcttaggtatgcaacttgcatcaatcgaatttgcacgtaacgtattaggattagaaggagctaactcttctgaaattaatcctgacacaccgtatgcaatcattgacttattaccagaacaaaaagatgtagaagacttaggtggtacacttcgtcttggtctatacccatgtaagctttctgaagaaacaaatgcttacaatgcttacaatgagccggttgtatatgagcgtcatcgtcatcgttatgagttcaacaatcaattccgtccggatatggaaaaagcaggatttgtattctctggtacaagcccagacggtcgtctagttgaaatcattgaattaaaagatcacccttggttcgtggcagcacagttccacccagaactagtttctcgtccaaaccgtccacaaccattgttccatgacttcgtaagagcttctattacgaataaagagagcaagtaa

SEQ ID NO: 31161 - protein, 535 aa, Bacillus cereus G9241
MTKYIFVTGGVVSSLGKGITAASLGRLLKNRGLNVTIQKFDPYINVDPGTMSPYQHGEVFVTDDGAETDLDLGHYERFIDINLNKYSNVTTGKIYSSVLQKERRGEYLGGTVQVIPHITNEIKERVYRSGRETNADVVITEIGGTVGDIESLPFLEAIRQIKSDIGRDNVMYIHCTLIPYLKAAGEMKTKPTQHSVKELRSLGIQPNIIVVRTEMPVSQDMKDKLALFCDIDTKAVIEARDADTLYAVPLSLQEQNMDQIACDHLKLDNPAADMTEWTALVEKVRNLSKKTKIALVGKYVELQDAYISVVEALRHAGYSFDTDVEVKWVNAEHVTAENVQELVGDTDGILVPGGFGDRGVEGKIVAIQYARENKVPFLGICLGMQLASIEFARNVLGLEGANSSEINPDTPYAIIDLLPEQKDVEDLGGTLRLGLYPCKLSEETNAYNAYNEPVVYERHRHRYEFNNQFRPDMEKAGFVFSGTSPDGRLVEIIELKDHPWFVAAQFHPELVSRPNRPQPLFHDFVRASITNKESK

SEQ ID NO: 31162 - DNA, 1608 bp, Crocosphaera watsonii WH 8501
  CDS (1)..(1608): transl_table=11
atgactaagtttgtttttgtaaccggtggtgttgtttctagtattggtaaaggtattgtagctgcgagtttagggcgtttattgaaatcccgaaattactctgtttctatccttaaacttgacccctatattaacgttgatcctggtactatgagtccctatcaacacggggaagtatttgttaccgatgacggagccgaaactgacttagacttaggccattacgaacgcttcacagatactcctatgtcccgtctcaatagtgttaccaccggatcgatctatcaagcggtccttaataaagaacgacgaggggcctacatggggggaacagtccaagttatcccccatattaccaacgaaattaaagaacgcatccatcgtgtggctaaaaataccactcctgatattgttatcactgaaatcggcggaaccgttggcgatatcgaatctttaccctttttagaagcaatacggcagtttcgtaaggatgtggggcgaaataacgtcctctatatgcacgttaccttaattccttggataccggcagctagggaaatgaaaaccaaacctactcaacactccgttaaagagttacgatccattggtattcaaccagatgtgttagtatgtcgttgcgatcgccctttaaaagaggggatgaaggaaaaactatcagagttttgtgacgttcccgtcgaatcggtaattacggcgcaagatgctagtagtatttatgaagtgcctttagtggtggaaaaagagggtttagcccaacaaaccctagaattattacgtctagaaccccgtaaaccggatttaagtcaatggcaaaccttaatccaaagaatgcagtccccgaaacgacaaattgaggtagccttagtaggaaaatatgttcaactcagcgatgcttatctatcggtggtagaatccttggtacatgggggtattgccacggatagcgaggttaagttacggtgggttgatgcggaagatatcgaaaattatggggcagagaaatacttaaacgatgtgggtggaattatagttccgggtgggtttggtattcgtggggtagatggtaaggttaaagctattgaatacgctagaaaagagaaaattccctttctgggactgtgtttagggatgcaatgcgctgtcatcgaatggggtcgcaatgttgcccgtttaaataacgtcaatagtgccgaatttgaaccagaaaccgccaatcctgtgattaatttgttaccagaacagcaagacgtggtggacttagggggaactatgcgtttaggactgtatccttgtcgtatttctcctgataccttggccgcttctttgtatggacaagaggtgatttatgaacgtcaccgtcaccgttacgagtttaataatgcgtatcgcaatcaattattagaaacgggttataaagtcagtggaacatctccagatggtcgtttagtagagattattgaattgtcggaccatcccttttttattgccactcagtttcaccccgaatttagatcccgtcccaactgcgcccatcctttatttttagggtttgttaaagctgccattgagcaaactaaaagcagttaa

SEQ ID NO: 31163 - protein, 535 aa, Crocosphaera watsonii WH 8501
MTKFVFVTGGVVSSIGKGIVAASLGRLLKSRNYSVSILKLDPYINVDPGTMSPYQHGEVFVTDDGAETDLDLGHYERFTDTPMSRLNSVTTGSIYQAVLNKERRGAYMGGTVQVIPHITNEIKERIHRVAKNTTPDIVITEIGGTVGDIESLPFLEAIRQFRKDVGRNNVLYMHVTLIPWIPAAREMKTKPTQHSVKELRSIGIQPDVLVCRCDRPLKEGMKEKLSEFCDVPVESVITAQDASSIYEVPLVVEKEGLAQQTLELLRLEPRKPDLSQWQTLIQRMQSPKRQIEVALVGKYVQLSDAYLSVVESLVHGGIATDSEVKLRWVDAEDIENYGAEKYLNDVGGIIVPGGFGIRGVDGKVKAIEYARKEKIPFLGLCLGMQCAVIEWGRNVARLNNVNSAEFEPETANPVINLLPEQQDVVDLGGTMRLGLYPCRISPDTLAASLYGQEVIYERHRHRYEFNNAYRNQLLETGYKVSGTSPDGRLVEIIELSDHPFFIATQFHPEFRSRPNCAHPLFLGFVKAAIEQTKSS

SEQ ID NO: 31164 - DNA, 1596 bp, Exiguobacterium sibiricum 255-15
  CDS (1)..(1596): transl_table=11
atgacaaagtatattttcgtaaccggtggggtagtatcttcgctcggtaaagggatcacggcagcatcactcgctcgtctcttgaaaaaccgtggcctgaacgtcacgatccaaaaattcgacccgtacatcaacatcgacccgggaacgatgagcccgtaccagcacggcgaagtgttcgtcacggatgacggtgctgaaacggaccttgaccttggtcactacgaacggttcatcgacattaacctcagccaaaatgcaaacgtgacatccggccggatctactcgacggttctgaaaaaagaacgtcgcggggattacaacggtggaacggttcaggtcattccgcacatcacgaatgaaatcaaagaccgtgtcttccgtgccggaaaagaaacgggcgcagatgtcgtcatcacagagattggtggaacagtaggggatatcgaatcgcttccgttcatcgaagccattcgtcaggtgaaaaacgatattgggaaagaaaacgtcatgtacgttcactgtacactcgttccgtatcttgccgctgcaggcgagctgaagacgaaaccgacacaacacagtgttaaagaactccgcagctacggtattcagccggatatcatcgtgcttcgtgccgagcatgatgtaccacaagaaatgaaagataaaattgctctcttctgtgatacacgtccggaagccgtcatcgaagcgaaggatgcatcgacactctatgaagtaccgcttaatctgcaacgtcaaggcatggaccaactcgtctgtgactacttcaaattcgatacaccggctgctgacatgactgcttggaagcaacttgtccacaccgtgacacacctcgagaagaaaacgaaaatcgctctcgtcgggaaatatgtcgaactccgtgatgcgtacatctcggttgcagaagctttgaaacacgccggtttcgcctttaacagcgacatcgaaatcgactggatcaatgcagaagacgtcacgcgtgacaacgttcaggaattactcggttcagcaaatggaatccttgtcccgggcggattcggagaacgtggaatcgaagggaaaatcgaagcgacacgttttgcccgtgaaaacaacgtcccgttcttcggaatttgcctcggtatgcaactggcgacagttgagttcgcccgtaacgtcttgaatcttgaaggtgcccactcggcggaaatcgatccggcgacaccgtatccgatcatcgatttgttgccggaacaaaaagacatcgaagatctcggcggaacacttcgtcttggtctgtatccgtgtaagcttgaagacggttcaaaagcgcgtgctgcttattcgagtgaactcgtttacgaacgtcaccgtcaccgttatgagttcggcaacgaattccgtgaacagttcgaagcgaacggcatgatcttctctggtacgagcccggatggccgtctcgttgaaatcatcgaaatcccggaacacaaatggttcgtcgcttgtcagttccacccggaattgatttcgcgtccggaacgtccgcaagccttgttccatgacttcatccaggcatcacttggtgagtaa

SEQ ID NO: 31165 - protein, 531 aa, Exiguobacterium sibiricum 255-15
MTKYIFVTGGVVSSLGKGITAASLARLLKNRGLNVTIQKFDPYINIDPGTMSPYQHGEVFVTDDGAETDLDLGHYERFIDINLSQNANVTSGRIYSTVLKKERRGDYNGGTVQVIPHITNEIKDRVFRAGKETGADVVITEIGGTVGDIESLPFIEAIRQVKNDIGKENVMYVHCTLVPYLAAAGELKTKPTQHSVKELRSYGIQPDIIVLRAEHDVPQEMKDKIALFCDTRPEAVIEAKDASTLYEVPLNLQRQGMDQLVCDYFKFDTPAADMTAWKQLVHTVTHLEKKTKIALVGKYVELRDAYISVAEALKHAGFAFNSDIEIDWINAEDVTRDNVQELLGSANGILVPGGFGERGIEGKIEATRFARENNVPFFGICLGMQLATVEFARNVLNLEGAHSAEIDPATPYPIIDLLPEQKDIEDLGGTLRLGLYPCKLEDGSKARAAYSSELVYERHRHRYEFGNEFREQFEANGMIFSGTSPDGRLVEIIEIPEHKWFVACQFHPELISRPERPQALFHDFIQASLGE

SEQ ID NO: 31166 - DNA, 1695 bp, Prosthecochloris aestuarii DSM 271
  CDS (1)..(1695): transl_table=11
atggcacgcccaaaaaacgttaagcatatttttgttactggaggggttgtttcatcgcttggtaaggggatcctgtccgcttcgctcggtttactgctcaagtcacgaggactgcgcgtcgcgattcagaaatatgatccgtatatcaatgtcgatccggggacaatgtctccttatcagcatggcgaggtctatgtgactgatgacggggcggaaactgaccttgaccttggtcactatgagcgatttctcgatgaggcgacgtcccagcagtcaaaccttaccatgggcagggtttacaagtcggtgatcgacaaggagcgccagggcgaatatcttggagggaccgttcaggttgtgcctcatgtgatcgacgagatcaaggagcgcatgggcgaattggctaaaaacagcaatctcgacatcctcattaccgagatcggcggaaccattggcgatatcgagtctcttccatttctcgaggccatgcgtcagttgaagctcgatttcgggccgaaaaacatgctcaatatccatctcacgctggtaccctacatcaaggcagcgtgtgaactgaagaccaagccaacacagcacagtgtcaaaatgctgctcgaaacaggtattcagccggatattctggtttgccgcagtgaaaaaccgctttcgcgggagatcaagaacaaggtgggccatttctgtaatcttcatgaactcgatgtcattggtttaagcgactgcgataccatttacggggttccgctgatgttgctcaatgagaagctcgatatccgcgttctcaagaagcttggtctcaaaaagtacaaggagccggacctcgcatactggaaagagttctgcaacaaggtgcagcatccgacagacggggaggtgaccattgccatctgtggaaagtataccgagtatccagatgcgtacaagtccattctcgagtctttggtgcatgctggcgcagacaataatgtcagggtccatgttcgcctcattcgtgccgaagatgccgaagagaacggttccgatgtcaaaacggccctggaaggtgttcatggggtacttgtcgctccgggctttggtgatcgcggtatagagggaaagatccggttcgttcaatacgcaagggagaacaatattccattccttgggatttgtctgggtatgcagtgtgcatcgatcgagtttgcaagaaatgtgtgcggcctttcggaagccaactctaccgagttcagcaagcgctgccgtcagccggtcatcgatctgatggagcaccagaagaaggtgaaagaaaaaggcgggactatgcgtcttggaagttacccctgtatcctgaaagagggaacaaaagcgcatcaggcatatgacaaatttctgatcaacgagcgtcaccggcaccgttatgagttcaataacgaatatcgacggctttttgaggataacggtatggttttctccggtacctctcctaacggcgagctggtagagattgtcgagattagtaatcatcgctggtttgtagcggtacagttccatccggaatacaagtccagggttcattgcgttcaccctctcttcagtggttttgtcgcagcggcaaaagagtttgcccacggcgcccgtcagctctcgtttgagccagaagctccatcatttcaggtgatgcccggagcggagaattag

SEQ ID NO: 31167 - protein, 564 aa, Prosthecochloris aestuarii DSM 271
MARPKNVKHIFVTGGVVSSLGKGILSASLGLLLKSRGLRVAIQKYDPYINVDPGTMSPYQHGEVYVTDDGAETDLDLGHYERFLDEATSQQSNLTMGRVYKSVIDKERQGEYLGGTVQVVPHVIDEIKERMGELAKNSNLDILITEIGGTIGDIESLPFLEAMRQLKLDFGPKNMLNIHLTLVPYIKAACELKTKPTQHSVKMLLETGIQPDILVCRSEKPLSREIKNKVGHFCNLHELDVIGLSDCDTIYGVPLMLLNEKLDIRVLKKLGLKKYKEPDLAYWKEFCNKVQHPTDGEVTIAICGKYTEYPDAYKSILESLVHAGADNNVRVHVRLIRAEDAEENGSDVKTALEGVHGVLVAPGFGDRGIEGKIRFVQYARENNIPFLGICLGMQCASIEFARNVCGLSEANSTEFSKRCRQPVIDLMEHQKKVKEKGGTMRLGSYPCILKEGTKAHQAYDKFLINERHRHRYEFNNEYRRLFEDNGMVFSGTSPNGELVEIVEISNHRWFVAVQFHPEYKSRVHCVHPLFSGFVAAAKEFAHGARQLSFEPEAPSFQVMPGAEN

SEQ ID NO: 31168 - DNA, 1860 bp, Kineococcus radiotolerans SRS30216
  CDS (1)..(1860): transl_table=11
gtgagctgcccgacggggccgcggcgctggcccaggtgctggccgtccacgcccgggcccggggctgatcccgaccctcgccggaaccggcgccggcggggcgggcgcgggggaccgccgcgtccggtacgatcgaactccgtggcgaaccgcagcactcccgagtcccccacccaacacgtcttcgtgaccgggggggtggccagctccctcgggaaggggttgacggcctccagcctcggccgactcctccgggctcgcggcctgcgggtggcgatgcagaagctcgacccctacctcaacgtcgaccccggcacgatgaacccgttccagcacggggaggtcttcgtcaccgacgacggtgcggagaccgacctcgacatcggccactacgagcgcttcctcgacgtgcgcttcgacgcctccgcgaacgtcacgaccggtcaggtctactcctcggtcatcgccaaggagcgtcgcggggagtacctcggcgacaccgtccaggtcatcccgcacatcaccaacgagatcgtcgaccggatgcgcgcgcaggcccgcgacgacatcgacatcatcatcaccgaggtcggcgggaccgtcggcgacatcgaatcgctgccgttcctcgaggccgcgcgccaggtgcgccagcgcctcgggcgcgacaacgtgttcttcgtccacgtctccctggtgccctacatcggccccagcggtgagctgaagacgaagcccacccagcactccgtggcccagctgcgcaacatcggcatccagcccgacgcgatcgtgtgccgcgccgaccgggagatccccgagggggtcaagcgcaagatcgcctcgatgtgcgacgtggacgacgaggccgtcatcgcctgcgtggacgcgccctcgatctacgacatccccaaggtcatccaccgcgagggcctggacgcctacctcgtccgcaagctgggcctgagcttccgcgacgtggactggtccacctgggacgacctgctgcgccgggtgcacaacccccgccgccgcgtcgagatcgccctggtgggcaagtacatcgacctgcccgacgcctacctgtcggtcaccgaggcgctgcgcgccggcggtttcgccgaggacgcgaaggtggacatccgctgggtggcctccgacgagtgccggaccccggagggggcccagaagcagctgcacggcgtcgacgcgatctgcgtccccggcggtttcggcgtgcgcggcatcgagggcaagctcggcgcgctgcgctgggcgcgcgagaacggcgtccccacgctgggtctgtgcctgggtctgcagtgcatggtcatcgagtacgcccgcaacgtcgccgggctggaggacgccagctccacggagttcgagccgacgtccaagcagcccgtcatcgccacgatggccgagcagcgcgacatcgtctccggcgagggcgacatgggcggcacgatgcgcctggggtcctacgaggcggtcctgcagcagggttccgtcgtcgccacgacctacggcagcgagcggatctccgagcgccaccggcaccgctacgaggtcaacaactcctaccgcgagcagctgtccgcgaagggcctggtgttctccggcacctccccggaccgcgagctcgtcgagttcgtcgagctcccggccgacgtgcacccgtactacgtcggcacccaggcgcacccggagttcaagtcccgcccgacccgggcgcacccgctgttctccggtctcgtcgccgccgccctgcgccgccagcgcgagggtcagctcatcgacgtggagccggagccggccgaggccaccgcggacgtcctgacggaggcgaccgcgtga

SEQ ID NO: 31169 - protein, 619 aa, Kineococcus radiotolerans SRS30216
MSCPTGPRRWPRCWPSTPGPGADPDPRRNRRRRGGRGGPPRPVRSNSVANRSTPESPTQHVFVTGGVASSLGKGLTASSLGRLLRARGLRVAMQKLDPYLNVDPGTMNPFQHGEVFVTDDGAETDLDIGHYERFLDVRFDASANVTTGQVYSSVIAKERRGEYLGDTVQVIPHITNEIVDRMRAQARDDIDIIITEVGGTVGDIESLPFLEAARQVRQRLGRDNVFFVHVSLVPYIGPSGELKTKPTQHSVAQLRNIGIQPDAIVCRADREIPEGVKRKIASMCDVDDEAVIACVDAPSIYDIPKVIHREGLDAYLVRKLGLSFRDVDWSTWDDLLRRVHNPRRRVEIALVGKYIDLPDAYLSVTEALRAGGFAEDAKVDIRWVASDECRTPEGAQKQLHGVDAICVPGGFGVRGIEGKLGALRWARENGVPTLGLCLGLQCMVIEYARNVAGLEDASSTEFEPTSKQPVIATMAEQRDIVSGEGDMGGTMRLGSYEAVLQQGSVVATTYGSERISERHRHRYEVNNSYREQLSAKGLVFSGTSPDRELVEFVELPADVHPYYVGTQAHPEFKSRPTRAHPLFSGLVAAALRRQREGQLIDVEPEPAEATADVLTEATA

SEQ ID NO: 31170 - DNA, 1665 bp, Xylella fastidiosa Ann-1
  CDS (1)..(1665): transl_table=11
atgactcctcttatttttgttactggcggtgttgtttcttcccttggcaagggcatcgcggcggcttcccttgcgtccatccttgaagcgcgtggtttgaaggtgacgatggtgaagttggatccttacattaacgtggatcctgggacgatgagtccgttccaacatggtgaggtttatgtcactgacgatggtgctgagactgatctggatttgggccattacgagcgttttgtacgcacgcgtttgtcgcgtaaaaattcggtcactactggcaggatttaccagaatgtgatttgcaaggagcgccgcggtgactatctcggtgcgaccgtacaggtgatccctcacattaccgacgagattcgccgttgcattgatgaggctacagcaagctttgatgtggcgttggtggagattggcggcactgtcggggatattgaatcgctgcctttcttggaggcgatccgtcaagtgcggattgagcgcggtgcggagaggacgatgttcatgcacctgacgctggtgccgtatattgccgctgctggggaactcaagacaaaaccgactcagcattctgtcaaagagctgcgttcgatcggtattcagccggatgtgttgttgtgtcgttccgagcaggtgattccggattcagagcgacgcaaaattgcattgtttaccaatgtttccgaacgggcagtgattggctgtcctgatattgacgtgttgtatgggatgcctttggagctgcgtcgccagggtcttgatgaaattgtgattgatcagttcaaactaagcggaacagcgagtttggctgatttgtccgaatgggaggatgtggtcgacgcgattaagcgtcctctggatgaagtcactatcgctgttgtcggcaagtacgtcgattatcaggatgcctataagtccgtgggtgaggcactcaagcatggtggcctgcgtcaacgtactaaggtcaatctgaagtgggttgaggctcaggacttggaggggagcgatatggctgctcttaaagacattgacggtattttggtgccggggggattcggtgatcgtggttttgaggggaaggtgctcgcctccaggtacgcgcgtgagcagcgggtgccatatttcggtatttgctatggtatgcaggcggcggtggtggattacgcgcgccatgttgccgggcttgagggtgccaatagtactgagaatgatcgccagtcgtctcaccctgtcattgctttgattaccgagtggcggaccacaacaggtgaggttgagcgtcgtgatgagaagtccgatctaggcggtacgatgcgtcttggtttgcaggagcaacgtctcaaggcagggacactggcgcgcgagttgtatggaagggatgtggttggtgagcgtcatcggcatcgttatgaatttaataatcgctaccggactcagttggaggatgccggtttggtgatcgctgctaaatcaatggacgacactttggtggagatgatcgagttaccacgtgagatgcatccttggtttctggcgtgccaggcgcatcctgagttcttgtcgactccacgggatggtcatccgctctttattggttttgtgaaggcgacgcgcgcgcacaaggctggaggcaaattgctcagggaagtctgcgtttga

SEQ ID NO: 31171 - protein, 554 aa, Xylella fastidiosa Ann-1
MTPLIFVTGGVVSSLGKGIAAASLASILEARGLKVTMVKLDPYINVDPGTMSPFQHGEVYVTDDGAETDLDLGHYERFVRTRLSRKNSVTTGRIYQNVICKERRGDYLGATVQVIPHITDEIRRCIDEATASFDVALVEIGGTVGDIESLPFLEAIRQVRIERGAERTMFMHLTLVPYIAAAGELKTKPTQHSVKELRSIGIQPDVLLCRSEQVIPDSERRKIALFTNVSERAVIGCPDIDVLYGMPLELRRQGLDEIVIDQFKLSGTASLADLSEWEDVVDAIKRPLDEVTIAVVGKYVDYQDAYKSVGEALKHGGLRQRTKVNLKWVEAQDLEGSDMAALKDIDGILVPGGFGDRGFEGKVLASRYAREQRVPYFGICYGMQAAVVDYARHVAGLEGANSTENDRQSSHPVIALITEWRTTTGEVERRDEKSDLGGTMRLGLQEQRLKAGTLARELYGRDVVGERHRHRYEFNNRYRTQLEDAGLVIAAKSMDDTLVEMIELPREMHPWFLACQAHPEFLSTPRDGHPLFIGFVKATRAHKAGGKLLREVCV

SEQ ID NO: 31172 - DNA, 1665 bp, Xylella fastidiosa Ann-1
  CDS (1)..(1665): transl_table=11
atgactcctcttatttttgttactggcggtgttgtttcttcccttggcaagggcatcgcggcggcttcccttgcgtccatccttgaagcgcgtggtttgaaggtgacgatggtgaagttggatccttacatcaacgtggatcctgggacgatgagtccgttccaacatggtgaggtttatgtcactgacgatggtgctgagactgatctggatttgggccattacgagcgttttgtacgcacgcggttgtcgcgtaagaattcggtcactactggcaggatttaccagaatgtgatttgtaaggagcgccgcggtgactatctcggtgcgaccgtacaggtgatccctcacattaccgacgagattcgccgttgcattgatgaggctacagcaagctttgatgtggcgttggtggagattggcggcactgtcggggatattgaatcgctgcctttcttggaggcgatccgtcaagtgcggattgagcgtggtgcggagaggacgatgttcatgcacttgacgctggtgccgtatattgccgctgctggggaactcaagacaaaaccgactcagcattctgtcaaagagctgcgttcgatcggtattcagccggatgtgttgttgtgtcgttccgagcaggtgattccggattcagagcgacgcaaaattgcattgtttaccaatgtttccgaacgggcagtgattggctgtcctgatattgacgtgttgtatgggatgcctttggagctgcgtcgccagggtcttgatgaaattgtgattgatcagttcaaactaagcggaacaacgagtttggctgatttgtccgaatgggaggatgtggtcgacgcgattaagcatcctctggatgaagtcactatcgctgttgtcggcaagtacgtcgattatcgggatgcttataagtcggtgggtgaggcactcaagcatggtggcctgcgtcagcgtactaaggtcaatctgaagtgggttgaggctcaggacttggaggggagcgatatggctgctcttaaagacattgacggtattttggtgccggggggattcggtgatcgtggttttgaggggaaggtgctcgcctccaggtacgcgcgtgagcagcgggtgccgtatttcggtatttgctatggtatgcaggcggcggtggtggattacgcgcgccatgttgccgggcttgagggtgccaacagtactgagaatgatcgccagtcgtctcaccctgtcattgctttgattaccgagtggcggaccacaacaggtgaggttgagcgtcgtgatgagaagtccgatctaggcggtacgatgcgtcttggtttgcaggagcaacgtctcaaggcagggacactggcgcgcgagttgtatggaagggatgtggttggtgagcgtcatcggcatcgttacgaatttaataatcgctaccggactcagttggaggatgccggtttggtgatcgctgctaaatcgatggacgacaccttggtggagatgatcgagttaccacgtgagatgcatccttggtttctggcgtgccaggcgcatcctgagttcttgtcgactccacgggatggtcatccgctctttattggttttgtgaaggcgtcgcgcgcgcgcaaggctggaggcaaattgctcagggaagtctgcgtttga

SEQ ID NO: 31173 - protein, 554 aa, Xylella fastidiosa Ann-1
MTPLIFVTGGVVSSLGKGIAAASLASILEARGLKVTMVKLDPYINVDPGTMSPFQHGEVYVTDDGAETDLDLGHYERFVRTRLSRKNSVTTGRIYQNVICKERRGDYLGATVQVIPHITDEIRRCIDEATASFDVALVEIGGTVGDIESLPFLEAIRQVRIERGAERTMFMHLTLVPYIAAAGELKTKPTQHSVKELRSIGIQPDVLLCRSEQVIPDSERRKIALFTNVSERAVIGCPDIDVLYGMPLELRRQGLDEIVIDQFKLSGTTSLADLSEWEDVVDAIKHPLDEVTIAVVGKYVDYRDAYKSVGEALKHGGLRQRTKVNLKWVEAQDLEGSDMAALKDIDGILVPGGFGDRGFEGKVLASRYAREQRVPYFGICYGMQAAVVDYARHVAGLEGANSTENDRQSSHPVIALITEWRTTTGEVERRDEKSDLGGTMRLGLQEQRLKAGTLARELYGRDVVGERHRHRYEFNNRYRTQLEDAGLVIAAKSMDDTLVEMIELPREMHPWFLACQAHPEFLSTPRDGHPLFIGFVKASRARKAGGKLLREVCV

SEQ ID NO: 31174 - DNA, 1605 bp, Streptococcus suis 89/1591
  CDS (1)..(1605): transl_table=11
atgacaaagtatatttttgtaacaggtggcgttgtttcctctatcggcaaagggattgtagcagccagcctgggtcgtttattgaagaaccgaggtctcaaggtaacaatccaaaaatttgatccatacatcaatattgacccgggaacaatgagtccgtatcaacacggtgaagtttttgtgacggacgacggcgcagaaaccgacttggaccttgggcattatgagcgtttcatcgacattaacctgaacaaatattcaaatgttacaacaggtaaaatttatagcgaagtcctccgtaaagagcgtaaaggggaatacttaggggcaacagttcaagttattccacacattacagatgctttgaaagacaaaatcaagcgtgcagctcgtactacagatgcagatgtcatcattacggaagtgggtggtacagtaggtgatattgaaagcttgccattccttgaagcgcttcgtcagatgaaggcagatgtcggttcagacaatgttatgtatatccatacaacactcttgccttatctcaaagcagcaggcgaaatgaaaactaagccaacacaacattctgtaaaagagttgcgtggtctaggtattcagcccaacatgttggtaattcggacagagcagcctgctggacaaggaattaaaaataaactggcacaattctgtgatgttgcaccagaagcagttattgagtccttggatgtcgaacatctttaccaaatcccattaaatatgcaagcgcagaacatggatcaaattgtttgcgatcacttgaagctcgacgtacctccagcagatatgacagagtggacagcgatggtaaacaaggttcttaatctccagaaaaaagtaaaaatcgctttagttggtaagtatgtagaattacaagatgcctatatttctgtagttgaagctctaaaacactcaggatatgcaaatgatgctgctatcgaattggactgggtcaatgcaaatgatttgacagcagaaaacgtagctgaacgtctaggacaagcacaaggaattatcgttcctggtggctttggacaacgtggtacagaagggaaaatacaagccattcgttatgctcgtgagaatgacgtgccaatgctaggggtctgcttgggaatgcagctgacctgtgtagaatttgctcgtcacgttctcggtttagaaggtgctaacagctttgaattagacccagaaaccaaatatccaattattgacatcatgcgtgatcaaattggagtggaagatttaggaggaactctccgtttaggtctttatccaagcaagctcaaacgtggctccaaggctgcagctgcttatgataatcaagaagttgtacaacgtcgccatcgtcatcgttatgagtttaataatgacttccgtgaacaatttgaaaaagcaggttttgttttctcaggtgtgtcaccagacaaccgtttggtagaaattgttgaaattccagaaaataaattcttcgttgcctgccaataccatccagaactacaatctcgtcctaatcgccctgaaggtttgtatacagcctttgtttcagcagctatagagaatgaaaaataa

SEQ ID NO: 31175 - protein, 534 aa, Streptococcus suis 89/1591
MTKYIFVTGGVVSSIGKGIVAASLGRLLKNRGLKVTIQKFDPYINIDPGTMSPYQHGEVFVTDDGAETDLDLGHYERFIDINLNKYSNVTTGKIYSEVLRKERKGEYLGATVQVIPHITDALKDKIKRAARTTDADVIITEVGGTVGDIESLPFLEALRQMKADVGSDNVMYIHTTLLPYLKAAGEMKTKPTQHSVKELRGLGIQPNMLVIRTEQPAGQGIKNKLAQFCDVAPEAVIESLDVEHLYQIPLNMQAQNMDQIVCDHLKLDVPPADMTEWTAMVNKVLNLQKKVKIALVGKYVELQDAYISVVEALKHSGYANDAAIELDWVNANDLTAENVAERLGQAQGIIVPGGFGQRGTEGKIQAIRYARENDVPMLGVCLGMQLTCVEFARHVLGLEGANSFELDPETKYPIIDIMRDQIGVEDLGGTLRLGLYPSKLKRGSKAAAAYDNQEVVQRRHRHRYEFNNDFREQFEKAGFVFSGVSPDNRLVEIVEIPENKFFVACQYHPELQSRPNRPEGLYTAFVSAAIENEK

SEQ ID NO: 31176 - DNA, 1620 bp, Croceibacter atlanticus HTCC2559
  CDS (1)..(1620): transl_table=11
atggcgcaacaaaccaagtatattttcgttacgggaggcgtttcctcttcattaggaaaaggcattatagccgcatcacttgctaagttacttcaagcaagaggctacaaaacaaccatacaaaaattagatccctacataaatgtagatccaggaacactaaacccttatgaacatggcgaatgttatgttacagaagatggtgcagaaacagatttagatctaggtcattatgagcgatttctaaatgtaaatacgtctcaggaaaataacgttactactggtcgcatttatcaaagtgttatagaaaaagagcgtcgtggagagtttttaggtaagactgtgcaagtagttcctcatataaccaatgaaattaaggaacgtatacaaatgctaggtaagcacggtgattatgatattgtgattactgagattggaggtactgttggagatattgagtctttaccatacatagaaagtgtaaggcaattaaagtgggaactaggagatgataatgcattagttattcacttaacattaatcccttacttatctgcagctggagagttaaagacaaaaccgacacaacatagcgtaaaaacattaatggaaagcggtataaaagccgatattcttgtttgtagaacagagcatgaattgtctgatgaccttcgtgataaactagcattattttgtaatgtaaagcgtgaagccgttatacaatctattgatgcttctacaatatatgatgttcctaaccttatgttagaagaaggtttagatgttattactttagataaattaaaactttctaaggacacccaaccagatcttacacattggaatgcctttttaaaacgacataaaaatccgacttgtgaagtaactgttggtttggtaggtaagtatgttgagctgcaagattcttataaatctattttagaagcatttattcatgctggagcagagaatgaggtaaaagtgaatatagaaagcatacactcagaatttattgatgatgctactataaaagacaaaatatctcatttagatggtatcttagttgcacctggttttggagaacgtggtatagaaggaaaggtagatgctgtaaaatttgcaagagaaaataacttaccattttttggtatttgtttaggtatgcaaatggctgttatagagtatgcaagaaatgtacttaacctttcagatgctaattctatcgagatggatgacagtactaaaaaccctgttatcgcaataatggaagatcaaaagaacattacccaaatgggtggcacaatgcgattaggttcttgggaatgtaaattaaaagatggttctaaaatccatgagatttacaactctcaaaccatacacgagcgtcacagacatcgttatgaatacaataataaatataaggagcaattagaagctgcaggtttaattagtacaggtataaatccagatacaggtttagttgaaacaattgagcttaaagaccatccttggtttataggtgtgcaataccatccagaatataaaagtacagtagcaaatccgcatccattatttgttggctttgttgaagcttgtaaacaatattctcaaaacagataa

SEQ ID NO: 31177 - protein, 539 aa, Croceibacter atlanticus HTCC2559
MAQQTKYIFVTGGVSSSLGKGIIAASLAKLLQARGYKTTIQKLDPYINVDPGTLNPYEHGECYVTEDGAETDLDLGHYERFLNVNTSQENNVTTGRIYQSVIEKERRGEFLGKTVQVVPHITNEIKERIQMLGKHGDYDIVITEIGGTVGDIESLPYIESVRQLKWELGDDNALVIHLTLIPYLSAAGELKTKPTQHSVKTLMESGIKADILVCRTEHELSDDLRDKLALFCNVKREAVIQSIDASTIYDVPNLMLEEGLDVITLDKLKLSKDTQPDLTHWNAFLKRHKNPTCEVTVGLVGKYVELQDSYKSILEAFIHAGAENEVKVNIESIHSEFIDDATIKDKISHLDGILVAPGFGERGIEGKVDAVKFARENNLPFFGICLGMQMAVIEYARNVLNLSDANSIEMDDSTKNPVIAIMEDQKNITQMGGTMRLGSWECKLKDGSKIHEIYNSQTIHERHRHRYEYNNKYKEQLEAAGLISTGINPDTGLVETIELKDHPWFIGVQYHPEYKSTVANPHPLFVGFVEACKQYSQNR

SEQ ID NO: 31178 - DNA, 1644 bp, Roseovarius nubinhibens ISM
  CDS (1)..(1644): transl_table=11
atggcgcgttttatcttcatcacaggtggggtcgtctcgtcccttggcaaaggtctcgcatcggcggcgctcggctcgctcctgcaggcccgcggcttctcggtgcgcctgcgcaagctcgatccctatctgaatgtcgatcccggcacgatgtcgccctttgagcatggcgaagtcttcgtcaccgatgatggcgccgaaaccgatctcgacctcggccattacgaacgcttcaccggcgtccccgcccggatgagcgattccgtctcctcgggccgcatctattccgacgtgctcgaaaaggaacggcgcggcgattacctcggcaagacgatccaggtcgtcccccatgtcaccaaccagatcaaggaattcatctcgatcggcgaggacgaggtcgatttcatgctctgcgaaatcggcggcaccgtcggcgacatcgagggcctgcccttcttcgaggcaatccgccaattcagccatgaccagccgcgcggccaatgcatcttcatgcacctgacgctgctgccctatctctcggccagcggcgagctcaagaccaaaccgacccagcactcggtcaaggaattgcaatccatcggcatcgcgcccgacatcctcgtctgccgctccgaacagccgatccccgaaaaggaacgcgagaaaatcgccctcttctgcaacgtccgcaaagaggcggtggtcgcggcctatgacctcaaatccatctacgaggcgccgcttgcctatcaccgcgaaggtctcgatcaggcggtgctcgatgcctttgccatctcgcccgcgccgcgccccgatctgaccatctggcaggatgtctatgaccgcatccacaacaccgatggcgaggtcaacatcgccatcgtcggcaaatatattcagctcgaagatgcctataaatccatcaaagaggcgctgacccacggcggcatggcgaaccgggtcaaggtcaatgtcgaatgggtcgatgccgagatcttcgaccgcgaagaccccgcgccccatctcgaaggcttccacgcgatcctcgtccccggcggctttggcgaacgcggcaccgaaggcaagatccgcgccgccgaattcgcccgcacccgcaagatcccctatctcggcatctgcctcggcatgcaaatggcggtgatcgaggcggcacgcaacgtggccgggctcaaagacgcgggctccgaggaattcgaccacgaggccggcgaaaagcgcttcacccccgtggtctaccacctcaaggaatgggtgcagggcaaccgcaaggtcaagcgcaaggtctccgacgacaagggcggcaccatgcgtctcggcgcctatgacgcgacgctcaaggacggctcccgcgtggcccagatctatggcaccacgggtatcgacgaacgtcaccgccaccgctacgaggtcgacacgacctatcgcgaacagctcgaaaaatgcggcctgaccttctcgggcatgtcccccgacgggcggctgccggaaatcgtcgaatgggccgatcacccgtggttcatcggcgtgcaattccaccccgagctgaaatcgaaacccttcgcgccgcatccgctctttgccgatttcgtgcgcgccgcgctggacaacagccgcctcgtctaa

SEQ ID NO: 31179 - protein, 547 aa, Roseovarius nubinhibens ISM
MARFIFITGGVVSSLGKGLASAALGSLLQARGFSVRLRKLDPYLNVDPGTMSPFEHGEVFVTDDGAETDLDLGHYERFTGVPARMSDSVSSGRIYSDVLEKERRGDYLGKTIQVVPHVTNQIKEFISIGEDEVDFMLCEIGGTVGDIEGLPFFEAIRQFSHDQPRGQCIFMHLTLLPYLSASGELKTKPTQHSVKELQSIGIAPDILVCRSEQPIPEKEREKIALFCNVRKEAVVAAYDLKSIYEAPLAYHREGLDQAVLDAFAISPAPRPDLTIWQDVYDRIHNTDGEVNIAIVGKYIQLEDAYKSIKEALTHGGMANRVKVNVEWVDAEIFDREDPAPHLEGFHAILVPGGFGERGTEGKIRAAEFARTRKIPYLGICLGMQMAVIEAARNVAGLKDAGSEEFDHEAGEKRFTPVVYHLKEWVQGNRKVKRKVSDDKGGTMRLGAYDATLKDGSRVAQIYGTTGIDERHRHRYEVDTTYREQLEKCGLTFSGMSPDGRLPEIVEWADHPWFIGVQFHPELKSKPFAPHPLFADFVRAALDNSRLV

SEQ ID NO: 31180 - DNA, 1644 bp, Oceanicola batsensis HTCC2597
  CDS (1)..(1644): transl_table=11
atggcgcggtatatcttcatcacgggcggcgtcgtgtcgtccctcggaaaagggctggcctcggccgccctcggcgcattgctccaggcccgcggctactccgtccgcctgcgcaagctcgacccctatctcaacgtcgatcccggcacgatgtcgcccttcgaacacggcgaggtcttcgtgaccgacgacggggccgaaaccgacctggacctcgggcattacgaacgcttcacgggtgtcgcggcgcgaatgacggattccgtctcctcggggcgcatctattcgaacgtgctcgaaaaggaacgccggggcgactatctgggcaagacgatccaggtgatcccgcacgtcaccaacgagatcaaggatttcatcaacgtcggcgacgacgaggtcgatttcatgctctgcgagatcggcggcaccgtcggcgatatcgaggggctgcccttcttcgaggcgatccgccagttcagccaggacaagccccgggggcagtgcatcttcatgcacctgacgctgctgccctggctggcggcgagcggcgaactcaagaccaagcccacgcagcactcggtcaaggaactgcggtccatcgggcttcagccggacatccttgtctgccggtcggaacagccgatccccgacaaggaacgcgacaagctggcgcttttctgcaacgtgcggcccgaggcggtgatcgcggcctatgatctcaagtcgatctacgaggcgccgctggcctatcaccgcgaggggctggaccaggcggttctggacgccttccagatcgcgccggcgccgcgccccgacctgagggtgtggcaggacgtctatgaccggatccacaataccgacggctcggtgaacgtggcggtggtgggcaagtacacgcagctcgaggacgcctacaagtcgatcaaggaagcgctgatccacggcgggatggccaaccggatcaaggtgaacgtccaatgggtcgacgccgaggtgttcgagaacaaggacgcggccccctacctcgaaggctatcatgcaatcctcgtccccggcggcttcggcgaacgcggaaccgagggcaagatcaaggcggccgaattcgcgcggacgcgcaacatcccctacctcgggatatgcctggggatgcagatggccgtgatcgaggccgcccgcaacctcgccgggctcgacaaggccggttcggaagagttcgaccacgaggccggacagaagcggttcgagccggtggtctatcacctcaaggaatgggtgcagggcaatcacgcggtgaaacgcaaggtcgacgacgacaagggcgggacgatgcgactgggcgcctataccgcgtcgctggccgaggggtcgaaagtctccgaggtctacggcgcgaccgcgatcgaggaacggcatcgccatcgctacgaggtcgacgtggcgtatcgtgacaagctggaggagtgtgggttgtggttctcgggcatgtccccggacggccgcctgcccgaaatcgtcgaagtccggggccatccctggttcatcggcgtgcagttccaccccgagctgaagtcgaaacccttcgacccgcatcccctgttcaaggatttcgtccgcgcggcgaaagaggtgtcgcggctggtctga

SEQ ID NO: 31181 - protein, 547 aa, Oceanicola batsensis HTCC2597
MARYIFITGGVVSSLGKGLASAALGALLQARGYSVRLRKLDPYLNVDPGTMSPFEHGEVFVTDDGAETDLDLGHYERFTGVAARMTDSVSSGRIYSNVLEKERRGDYLGKTIQVIPHVTNEIKDFINVGDDEVDFMLCEIGGTVGDIEGLPFFEAIRQFSQDKPRGQCIFMHLTLLPWLAASGELKTKPTQHSVKELRSIGLQPDILVCRSEQPIPDKERDKLALFCNVRPEAVIAAYDLKSIYEAPLAYHREGLDQAVLDAFQIAPAPRPDLRVWQDVYDRIHNTDGSVNVAVVGKYTQLEDAYKSIKEALIHGGMANRIKVNVQWVDAEVFENKDAAPYLEGYHAILVPGGFGERGTEGKIKAAEFARTRNIPYLGICLGMQMAVIEAARNLAGLDKAGSEEFDHEAGQKRFEPVVYHLKEWVQGNHAVKRKVDDDKGGTMRLGAYTASLAEGSKVSEVYGATAIEERHRHRYEVDVAYRDKLEECGLWFSGMSPDGRLPEIVEVRGHPWFIGVQFHPELKSKPFDPHPLFKDFVRAAKEVSRLV

SEQ ID NO: 31182 - DNA, 1668 bp, Prochlorococcus marinus str. MIT 9211
  CDS (1)..(1668): transl_table=11
atgccaaaatttgtcttcgtcacaggtggagttgtatcaagcatcggcaaaggcatagttgccgcaagtcttggacgactacttaaatcgaggggttacaacgtatccattttaaaattagatccctacttaaatgtagaccctggaaccatgagcccttttcagcatggggaggtctttgtcacagaagatggtgcagaaacagacttggatttagggcattatgagagatttacagatacagccttatcacgattaaacagcgttactacagggtctatatatcaatcagtcataaacaaagagcggcgaggtgattatgatggaggcacagtgcaagtaattccacatataacccaagagatccgtgagcgaatacatcgagtcggtgccaatagtaatgcagacgttgtcataacagagatcggaggaactgttggagacattgaatcacttcctttcctagaagcaattcgtgaatttaaaggtgatgtagggaaaaaagatattgcttatattcatgtaacgcttttaccgtttattggcacatctggagaacttaaaacaaagcctactcaacactcagtgaaagagttgagatctattggtatccaaccagatcttttaatttgtagaagtgacaggccaatcaatgacaatctaaaaaataaaatcagtggtttttgcggggtcaataacgaagctgtcattccagctctagatgctgacagcatatattcagtacctctagctctcaaagcagaagggttgtgtaaagaggttttagagttcttagatttaactgatcacgaatgtaaccttgagaagtggcaagagctggtgcataaattaaggaaccctgggccatcagtaaaagtagctgtagtaggtaaatatgttcaactgaatgatgcctacctatcagtagttgaagcactgcgacatgcctgtattgagaacgacgcatctttagaccttcattggatctgtgctgaaaagatagaagaagaaggatctaatgatcttttaacagggatggacgccatagtagtacccggaggatttggaagtaggggtgttgatggaaaaatcgcagccattcaatgggcaagagagcagcgtgttcctttccttgggctttgtcttggtatgcaatgtgcagtgatcgaatgggcaagaaatctagctgggcttaaagaagcaactagtttcgaacttgatcaaagtacccctcatccagtaattcacttacttccagaacaacaagatgttgtagatctaggaggaacaatgaggttgggagtatatccatgcagattacaagcagaaacaatgggccaaaaattatatggcgagcaagtagtttatgaacgtcatcgacaccgatatgagtttaacaacgcatatcgcaatctatttatcgaatctgggtataccattagcggcacttcacctgatggtcgcctagtcgaattaattgaattaaaaggacatccattctttactgcttgtcaatatcatcctgagtttttatctagacctggaaaaccacatcccctttttaaaggtttgatagcagctgcacaatcacgtttaccgagatcacctcaagaagctttaaagcaaacacaaattaattctccgaaccaatcaaaaaacaacccttaa

SEQ ID NO: 31183 - protein, 555 aa, Prochlorococcus marinus str. MIT 9211
MPKFVFVTGGVVSSIGKGIVAASLGRLLKSRGYNVSILKLDPYLNVDPGTMSPFQHGEVFVTEDGAETDLDLGHYERFTDTALSRLNSVTTGSIYQSVINKERRGDYDGGTVQVIPHITQEIRERIHRVGANSNADVVITEIGGTVGDIESLPFLEAIREFKGDVGKKDIAYIHVTLLPFIGTSGELKTKPTQHSVKELRSIGIQPDLLICRSDRPINDNLKNKISGFCGVNNEAVIPALDADSIYSVPLALKAEGLCKEVLEFLDLTDHECNLEKWQELVHKLRNPGPSVKVAVVGKYVQLNDAYLSVVEALRHACIENDASLDLHWICAEKIEEEGSNDLLTGMDAIVVPGGFGSRGVDGKIAAIQWAREQRVPFLGLCLGMQCAVIEWARNLAGLKEATSFELDQSTPHPVIHLLPEQQDVVDLGGTMRLGVYPCRLQAETMGQKLYGEQVVYERHRHRYEFNNAYRNLFIESGYTISGTSPDGRLVELIELKGHPFFTACQYHPEFLSRPGKPHPLFKGLIAAAQSRLPRSPQEALKQTQINSPNQSKNNP

SEQ ID NO: 31184 - DNA, 1638 bp, Erythrobacter sp. NAP1
  CDS (1)..(1638): transl_table=11
atggcgcggtacatttttatcaccggcggcgtggtctcctcgcttggcaaaggtctcatggcagcatcgcttgctgccctcctccaagcgcgcggctacaaggtccgcattcgtaagttcgacccctatctcaacgtcgatccgggcacgatgagcccgtatcagcacggtgaggtctatgtcactgacgacggggcagaaaccgatctcgaccttggccactatgaacgctttaccggcgtgtctgcgcggcagagcgacaacatcacgagcgggcgtgtctatcgcgacatcatcgccaaggaacgtcgcggcgactatctcggtgcgaccgtgcaggtgatcccgcacgtgaccgacgcgatcaaggaattcgctctcgcggatcaggacgatcacgattttatcctgtgcgagattggcgggacggtcggcgatattgaatcgctgccattcatggaagcgatccgccagatccgaaacgagcttgagccgttccagaccttgagcgtccacgtgacgctcgtgccgtatatcgcggcggccggcgagctgaagacgaagccaacccagcactcggtgcgcgaactggcatcgcttggcatcaagccggacgtactgctgtgccgcgcagagcatccaatccccgatggcgagcgtcagaagatcgcgaacttctgtaacgtgcgcaaggaagccgtgatccccgcgctcgatgcgccttcgatctactcggtcccgctgcaatatcatgaggaaggactcgacgcagaggttctgcgcggcttcggtatcacggacgcgcctgcgcctgaccttgcgcgctggaacgacgtgaccgaccgctacttcaatcctgaaggcgaggtcacgattggcgtggttggcaaatatgtcggcctccccgatgcctataagagcctcaacgaagcgctcgtccatggtggcttagccaaccgtgtgaaggtcaacatcaagtggatcgatgctgaaatcttcgaaggcgaagacgaggcggagattgtttctgcgctcgagccgatgcacggcatccttgtgcctggcggctttggcgagcgcggcagcgagggaaaaatctcgagcgtgaggttcgcgcgccagcgtaaagttccgttctttggcatttgtctggggatgcagatggcctgcatcgagggtgcgcgtgccgccggtttcgagaatgcgtcatcgaccgagtttggcgagacgaaagaacccgttgtcggcatcatcagcgaatggatgagcgaagaaggcctccagcagcgcgaagaaggcggtgaccttggtggtacgatgcggcttggcgcttacgaggccaagcttgcgggcaacagccacacctcgtcgatctatggcggtgccgaagaaatctctgaacggcatcgtcaccgctacgaggtcaacagcgcttacatcgagccgctggaaaagcagggtctggtgtttgcagggatgtcacccgacgggctgctccctgaaatcgtcgagcgtccagaccacccctggtttgtcggagttcagtttcatcctgaactgaaatcgaagccgttcgacccccatccgctcttcgcaggcttcattgctgcagcgctcgagcaatcgcggttggtctga

SEQ ID NO: 31185 - protein, 545 aa, Erythrobacter sp. NAP1
MARYIFITGGVVSSLGKGLMAASLAALLQARGYKVRIRKFDPYLNVDPGTMSPYQHGEVYVTDDGAETDLDLGHYERFTGVSARQSDNITSGRVYRDIIAKERRGDYLGATVQVIPHVTDAIKEFALADQDDHDFILCEIGGTVGDIESLPFMEAIRQIRNELEPFQTLSVHVTLVPYIAAAGELKTKPTQHSVRELASLGIKPDVLLCRAEHPIPDGERQKIANFCNVRKEAVIPALDAPSIYSVPLQYHEEGLDAEVLRGFGITDAPAPDLARWNDVTDRYFNPEGEVTIGVVGKYVGLPDAYKSLNEALVHGGLANRVKVNIKWIDAEIFEGEDEAEIVSALEPMHGILVPGGFGERGSEGKISSVRFARQRKVPFFGICLGMQMACIEGARAAGFENASSTEFGETKEPVVGIISEWMSEEGLQQREEGGDLGGTMRLGAYEAKLAGNSHTSSIYGGAEEISERHRHRYEVNSAYIEPLEKQGLVFAGMSPDGLLPEIVERPDHPWFVGVQFHPELKSKPFDPHPLFAGFIAAALEQSRLV

SEQ ID NO: 31186 - DNA, 1602 bp, Synechococcus sp. RS9917
  CDS (1)..(1602): transl_table=11
atggccaaattcgtcttcgtcaccggtggcgtggtctccagcatcggcaagggaatcgtggccgccagcctggggcgcctgctcaaatcccgcggctacaacgtttcgatcctgaagctggatccctatctgaatgtggatccgggcacgatgagtccgtttcagcatggtgaggtgttcgtcacggaagacggcgccgaaaccgacctcgacctgggccattacgagcgcttcaccgacacggcgatgtcgcgcctcaacagcgtgaccaccggttcgatctaccaagcggtgatcaacaaggaacggcggggcgactacaacggcggcacagtgcaggtgatcccccacatcaccggtgagattcgcgaacgcatccatcgcgtcgccgccaactcaggcgccgacgtggtgatcaccgagatcggcggcaccgtgggcgacatcgaatcgctgccttttctggaagcgatccgagagttccggggcgatgtgggccggcatgacctggcctacatccatgtgaccctgctgccctacatcggcacctcgggggaactgaaaaccaaacccacccagcactcggtgaaggagctgcgctccatcggtatccagcccgatctactcgtgtgccgcagcgaccgggagatcaacgacgaactcaaacgcaagatcggcggcttctgcggagtgccgcagcgggccgtgattccctcgctcgacgccgacagcatctacgccgtgcccctgaccctcgaggaggagggcctctgccgcgaggtgctggatgtgctgcaactcactgatcatgagagcgacatgaccggctggtcccagctggtgcacaagctgcgcaaccccggccccgccgtgaaggtggcgctggtggggaagtatgtgcagctcaacgatgcctacctgtcggtggtggaagcgttgcgccacgcctgcctggcccaggatgcctccctggatctgcactgggtctgcgctgaggagatcgagggccgcgggcccgagcctctactgcagggcatggatgcggtggtggtgcccggtggcttcggcaaccggggggtggatggcaaggtggcggcgattcgctgggcccgtgaacagcgggtgcccttcctgggcctctgccttggcatgcaaaccgccgtgatcgagtgggcccgcaaccaggcggggctgagcggcgcctccagcgccgagctggatccgggcacgacccatccggtgattcacctgctgcccgaacaacaggatgtggtggatctggggggcacgatgcgactcggtgtgtatccctgccgtctggcgccgggcacgatggccgcgcggctgtatggcgccgaggtggtgtacgagcggcatcgccaccgctacgaattcaacaacgcctatcgcagcctgttcctggaatcgggctatgcgatcagcggcacctcaccggatgggcgcctggtggaactgatcgaactgccggatcatcccttcttcaccgcttgccagtaccacccggaatttctctcccggccagggcgcccccatcccctcttccgcggcctgatcgaagcagcgcagcagcggttggcatga

SEQ ID NO: 31187 - protein, 533 aa, Synechococcus sp. RS9917
MAKFVFVTGGVVSSIGKGIVAASLGRLLKSRGYNVSILKLDPYLNVDPGTMSPFQHGEVFVTEDGAETDLDLGHYERFTDTAMSRLNSVTTGSIYQAVINKERRGDYNGGTVQVIPHITGEIRERIHRVAANSGADVVITEIGGTVGDIESLPFLEAIREFRGDVGRHDLAYIHVTLLPYIGTSGELKTKPTQHSVKELRSIGIQPDLLVCRSDREINDELKRKIGGFCGVPQRAVIPSLDADSIYAVPLTLEEEGLCREVLDVLQLTDHESDMTGWSQLVHKLRNPGPAVKVALVGKYVQLNDAYLSVVEALRHACLAQDASLDLHWVCAEEIEGRGPEPLLQGMDAVVVPGGFGNRGVDGKVAAIRWAREQRVPFLGLCLGMQTAVIEWARNQAGLSGASSAELDPGTTHPVIHLLPEQQDVVDLGGTMRLGVYPCRLAPGTMAARLYGAEVVYERHRHRYEFNNAYRSLFLESGYAISGTSPDGRLVELIELPDHPFFTACQYHPEFLSRPGRPHPLFRGLIEAAQQRLA

SEQ ID NO: 31188 - DNA, 1635 bp, Synechococcus sp. WH 5701
  CDS (1)..(1635): transl_table=11
atggcgaaattcgtcttcgtcaccggcggtgtggtctcgagcatcggcaaagggattgtggcggcgagcctggggcggctgctcaaatcccggggctacagcgtttcgatcctcaagctcgatccctatctgaatgtggatccgggcacgatgagcccgtatcagcacggcgaggtgttcgtcacccaggacggcgccgagaccgacctcgacctgggccactacgagcgcttcaccgacaccgccatgtcacgcctcaacagcgtgaccaccggctcgatctaccaggcggtgatcaacaaggaacgccgcggcgactacaacggcggcacggtgcaggtgatcccccacatcaccggtgagatccgcgagcgcatccaccgggtggccgccgacagcggcgtggatgtggtcatcaccgagatcggcggcaccgtgggtgacatcgaatcgctgccgttcctggaggccatccgtgagttccgcggggatgtgggccgccacgatttggcctacgtccacgtcaccctgctgccctacatcggcacctccggggagatcaagaccaagcccacccagcactcggtcaaggagctgcgctcgatcggcatccagcccgatctgctggtctgccgctgcgaccggccgatcagcgaggagctcaaggccaagatcggcggcttctgcggcgtccagcgcgaagcggtgatcgcggcccgcgatgccgacagcatctacgcggtgccgattgccctggagcgggaggggctctgccgtcaggtgctggatgtgctgggcctggaggatcgcgacagtgacatggagcgctgggaggccctggtgcagaaactgcgcaaccccggtgcggcggtgaaggtggcgctggtgggcaagtacgtgcagctcaacgacgcctacctctcggtggtggaggccctgcgccacgcctgcatcgaccgggatgccagcctcgacctgcactggatctccgccgagcagatcgagacccagggcgccgagtctctgctgcgtggcatggacgcggtggtggtgccgggcggcttcggtcaccggggcgtggacgggaaggtggcggcgatccgctgggcccgggaggagcgtgtgcccttcctcgggctctgcctgggcatgcagtgcgccgtgatcgagtgggcgcgcaacctggccggtctggcgggcgccaccagcgctgaactggaccccgacagcccccacccggtgatcaacctgctgccggagcagcaggacgtgatcgacctgggcggcaccatgcgcctgggggtctatccctgccggctgacggcgggcaccatggccgccagcctgtatggggaggaggtggtctacgagcggcaccgccaccgctatgagttcaacaatgcctaccgcaacctcttccaggcgggcggctacaccatcagcggcacctcgcccgatggccggctggtggagctgatcgagcgggaggatcaccccttcttcgcggcctgccagtaccacccggaattcctgtcgcgaccaggtaagcctcatcccctcttccgcggactgatcgcggcggcgcagcgacaggaggtggaagccgtgtcccaggagatacccgtgcgggcgtaa

SEQ ID NO: 31189 - protein, 544 aa, Synechococcus sp. WH 5701
MAKFVFVTGGVVSSIGKGIVAASLGRLLKSRGYSVSILKLDPYLNVDPGTMSPYQHGEVFVTQDGAETDLDLGHYERFTDTAMSRLNSVTTGSIYQAVINKERRGDYNGGTVQVIPHITGEIRERIHRVAADSGVDVVITEIGGTVGDIESLPFLEAIREFRGDVGRHDLAYVHVTLLPYIGTSGEIKTKPTQHSVKELRSIGIQPDLLVCRCDRPISEELKAKIGGFCGVQREAVIAARDADSIYAVPIALEREGLCRQVLDVLGLEDRDSDMERWEALVQKLRNPGAAVKVALVGKYVQLNDAYLSVVEALRHACIDRDASLDLHWISAEQIETQGAESLLRGMDAVVVPGGFGHRGVDGKVAAIRWAREERVPFLGLCLGMQCAVIEWARNLAGLAGATSAELDPDSPHPVINLLPEQQDVIDLGGTMRLGVYPCRLTAGTMAASLYGEEVVYERHRHRYEFNNAYRNLFQAGGYTISGTSPDGRLVELIEREDHPFFAACQYHPEFLSRPGKPHPLFRGLIAAAQRQEVEAVSQEIPVRA

SEQ ID NO: 31190 - DNA, 1632 bp, Synechococcus sp. WH 7805
  CDS (1)..(1632): transl_table=11
atggccaagttcgtcttcgtcaccggtggagtggtctccagcatcggcaaaggcatcgtggccgccagccttgggcggttgctgaagtcacgcgggtacagcgtgtcgatcctgaaactggatccttacctgaatgttgatccaggcaccatgagcccgtatcagcacggtgaggtattcgtcaccgaggacggtgccgagaccgatcttgacctcggccattacgaacgcttcaccgacacggcaatgtctcgcctcaacagcgtgaccacgggctcgatctatcaatcggtgatcaacaaagaacgccggggcgactacaacggcggcactgttcaagtgatcccacacatcacaggtgagatccgcgatcgcattcaccgcgtggccgccaacagcaatgcggatgtggtgatcacagaaatcggcggcacagtcggcgacatcgaatccctgcccttcctcgaggccatccgcgagttcaggggcgatgtgggtcgccatgatctggcctacatccacgtgacattgctgccttacatcggcacctccggcgaactgaaaaccaaacccacccagcactccgtgaaggagctgcgctcgatcggtatccagccggacgtgctggtgtgccgaagcgaccgagagattaacgctgaactcaaacgcaagattggcggattctgtggcgtgcacgaacgggccgtgatcccctcactcgatgccgacagcatctatgccgtgccccagaccctcgaagaacaggggctgtgccgagaagtactggatgttctcaatctcaccgaccatgagagcgatatgagcgcatggcagcagttggtgcacaagatgcgcaaccccggtccggccgtaaaggtggcgctggttggcaagtacgtgcagctcaatgacgcctatctctcggtggtcgaggccctgcgtcatgcctgcctggcccaagatgcctccctcgatctgcactgggtctgcgcagaagagatcgaaaaccgtggcgctaatgcactactgcatgggatggatgccgtggtagtgccaggcggcttcggcaaccgtggcgtagatggcaaggtggcggccatccgctgggccagggaacaacgcattccgttcctggggttgtgcctgggcatgcagtgcgcggtgatcgaatgggcccgcaacctggctggtttgccggatgccaccagcgccgaactggagcccggcaccagtcatccggtgattcatctcctgccggaacaacaggacgttgtggatctgggcggcaccatgcgccttggggtgtacccctgcaggatcgccgagggctccatggccgatcggctctatggcgatgaagtggtgtatgagcggcaccgtcatcgctacgagttcaacaatgcctaccgcaatctctttcttgaatcggggtatcggatcagcggcagctctcccgacggccgcctagtggaactgatcgaactgccggagcatccgttcttcactgcttgccaataccaccctgaattcctctcccggccgggccaaccccatcccctgttccgtggcttgatcgaagccgcccaacaacgactgcccaacagtcccagcgaaatcagaaccacagcgtga

SEQ ID NO: 31191 - protein, 543 aa, Synechococcus sp. WH 7805
MAKFVFVTGGVVSSIGKGIVAASLGRLLKSRGYSVSILKLDPYLNVDPGTMSPYQHGEVFVTEDGAETDLDLGHYERFTDTAMSRLNSVTTGSIYQSVINKERRGDYNGGTVQVIPHITGEIRDRIHRVAANSNADVVITEIGGTVGDIESLPFLEAIREFRGDVGRHDLAYIHVTLLPYIGTSGELKTKPTQHSVKELRSIGIQPDVLVCRSDREINAELKRKIGGFCGVHERAVIPSLDADSIYAVPQTLEEQGLCREVLDVLNLTDHESDMSAWQQLVHKMRNPGPAVKVALVGKYVQLNDAYLSVVEALRHACLAQDASLDLHWVCAEEIENRGANALLHGMDAVVVPGGFGNRGVDGKVAAIRWAREQRIPFLGLCLGMQCAVIEWARNLAGLPDATSAELEPGTSHPVIHLLPEQQDVVDLGGTMRLGVYPCRIAEGSMADRLYGDEVVYERHRHRYEFNNAYRNLFLESGYRISGSSPDGRLVELIELPEHPFFTACQYHPEFLSRPGQPHPLFRGLIEAAQQRLPNSPSEIRTTA

SEQ ID NO: 31192 - DNA, 1635 bp, Pseudoalteromonas tunicata D2
  CDS (1)..(1635): transl_table=11
atgagtacaaaatttatcttcgtaacgggtggtgttgtatcctccttgggtaaaggtattgccgcagcttcattggccgctatcttagaggcacgtggtttaaaagtcaccatgctaaagctcgatccatacatcaatgtagacccaggcacgatgagcccaatccaacacggtgaagtattcgtcacagaagacggtgcagagacagatctggatttaggtcattatgagcgttttattcgcactaaaatgaccaagaaaaacaacttcacacaaggtcgtgtatttgaagatgtactacgtcgtgagcgtcgtggtgaattcttaggtgcaacgatccaagtgatcccacatatcactaacgatattaaacgtcgtgtacttgaaggtgcagaaggctgtgacattgcgattgttgaaatcggcggcacagtaggtgatatcgaatcacaaccgtttttagaagcaattcgccagttaggtacagaattgggccgtgaagcggcactttatatgcacttaacgctagtaccacatttaggtgctgctggtgagctaaaaactaaaccaactcagcactcagtaaaagagctgcgctcaattggtattcaaccagatatcttaatttgtcgttcagaccgtgcaattcctgccaatgagcgtgcaaaaattgcgttatttactaacgtagaagaaaaagcggttatttcactcaaagatgtatcgagtatttaccaaatcccatcgattttaaaaactcagggtttagatgacctagtttgtcgtcgtttctacttagattgtcctgaagccgacttagctgaatgggaacaagtattgtatcaagagtcgaaccctacgggtgaagtgaccattggtatggtaggtaaatacatcgaattacctgatgcgtacaaatcagtaaacgaagcgctaaaacatgcgggtcttaaaaaccgtgtgacggtaaacattcaatatgttgattctcaagatgttgaaagtaaaggcgtagaaattttatctggtttagatgcgatattagtaccaggtggttttggccatcgtggtgttgaaggtaagattttagcggctaaatatgcacgtgaaaacaaagtaccttaccttggtatttgtttagggatgcaagtagcgttaattgaatatgcgcgaaatgttgcaggccttgccggtgctaactcaactgaatttgacccagcaagcccacacccagttgttggtttaattactgagtggttagatgcagaaggtaatgttgaattacgtgatgaagcatctgatttaggtggcaccatgcgtttaggttcgcagttatgtcatttaactgaaggctcaaaagtgcatcaggtttacggttcagctgaaattgtagagcgtcatcgtcaccgttatgaagttaataacaactacgttgagcgtttagaacaagctggccttgcatttactggcttatctgaagataaaaagttagtcgaaattattgaaaacaaagatcacccttggtttatcgcggctcagttccatcctgagttcacgtcaacacctcgtgatggtcaccctctgtttgaagggtttgtagctgccgctcgtgactttcaaaaagcgtcatcataa

SEQ ID NO: 31193 - protein, 544 aa, Pseudoalteromonas tunicata D2
MSTKFIFVTGGVVSSLGKGIAAASLAAILEARGLKVTMLKLDPYINVDPGTMSPIQHGEVFVTEDGAETDLDLGHYERFIRTKMTKKNNFTQGRVFEDVLRRERRGEFLGATIQVIPHITNDIKRRVLEGAEGCDIAIVEIGGTVGDIESQPFLEAIRQLGTELGREAALYMHLTLVPHLGAAGELKTKPTQHSVKELRSIGIQPDILICRSDRAIPANERAKIALFTNVEEKAVISLKDVSSIYQIPSILKTQGLDDLVCRRFYLDCPEADLAEWEQVLYQESNPTGEVTIGMVGKYIELPDAYKSVNEALKHAGLKNRVTVNIQYVDSQDVESKGVEILSGLDAILVPGGFGHRGVEGKILAAKYARENKVPYLGICLGMQVALIEYARNVAGLAGANSTEFDPASPHPVVGLITEWLDAEGNVELRDEASDLGGTMRLGSQLCHLTEGSKVHQVYGSAEIVERHRHRYEVNNNYVERLEQAGLAFTGLSEDKKLVEIIENKDHPWFIAAQFHPEFTSTPRDGHPLFEGFVAAARDFQKASS

SEQ ID NO: 31194 - DNA, 1641 bp, Photobacterium sp. SKA34
  CDS (1)..(1641): transl_table=11
atgactacgaattacatttttgttacgggcggagtagtttcctctctaggtaaaggcattgctgctgcatcacttgcagcgattttagaagcacgtggtcttaacgtgactatgatgaagcttgacccttacatcaacgttgatccaggcacaatgagcccaattcaacacggcgaagtattcgttacggaagacggtgcagagactgacctagacttaggtcactacgagcgtttcattcgtaccaagatgaccaagcgtaataactttactgctggtcgtgtgtacgcagacgtattacgcaaagagcgtcgtggtgattacttaggtgcaacgattcaggtaattcctcatatcacgaatgaaatcaaatctcgcgtattagcgggtgctgaaggtcatgatgtagcaatcgttgaagtaggcggtactgtaggtgatattgaatcactaccatttatggaagctatccgtcaattagcagtagagcaaggtcgtgaaaacaccatgttcatgcacttgacacttgttccttacctagcagcagctggcgaagtgaaaaccaagccaactcagcactcagtaaaagaacttctttctatcggtattcagccagacatcttagtgtgtcgttctgatcgtatgattcctgcaaatgagcgtgcaaaaattgccctgttctgtaacgtgcaggaaaaagctgttatctcaatgaaagatgtagattcaatctacaaaatcccacaattaattaaggctcaaggtcttgatgacttagtgtgtaagcgttttggtattacagcaccagaagccgatctttctgaatgggaacaagttatttatgaagaagcgaaccctacctccgaagtagttattggtatggttggtaagtacattgaactgcctgacgcatacaaatcagttaatgaagcgcttaaacacgcgggtctgaaaaaccgtttatcagtaaaaattaaatacatcgattctcaagatgttgagtcaaaaggtacagaggtactagccggccttgacgcaatcttggttcctggtggttttggtagccgtggtgttgaaggtaagatccttactgctcaatacgcacgtgaaaataatattccatacctaggtatttgtttaggtatgcaggtagcattaatcgagtttgctcgaaatgtagccaagatggctgatgcgcattcaactgaatttaatgctgaaactaaatatccagtcgttggtcttattactgagtggattgatagtgaaggtaaagttgaagagcgtactgagaaatcagatctaggcggtacaatgcgtcttggctctcagttatgtcatctacaagatggttctaaggcgcgtacgttatacggtcagccaacgatccatgagcgtcaccgtcaccgttatgaagtaaacaacactttactacctaagcttgaaaaagcgggtctaaaagtatctggtttgtctgctgacaagaaacttgttgaaattattgaagttccgaatcacccttggttcgtagctgcacagttccaccctgagttcacatcgacacctcgtgatgggcacccattgtttgaaggttttgtaaaagcggcgggtgcataccaccgtggtgagcttaaccagtaa

SEQ ID NO: 31195 - protein, 546 aa, Photobacterium sp. SKA34
MTTNYIFVTGGVVSSLGKGIAAASLAAILEARGLNVTMMKLDPYINVDPGTMSPIQHGEVFVTEDGAETDLDLGHYERFIRTKMTKRNNFTAGRVYADVLRKERRGDYLGATIQVIPHITNEIKSRVLAGAEGHDVAIVEVGGTVGDIESLPFMEAIRQLAVEQGRENTMFMHLTLVPYLAAAGEVKTKPTQHSVKELLSIGIQPDILVCRSDRMIPANERAKIALFCNVQEKAVISMKDVDSIYKIPQLIKAQGLDDLVCKRFGITAPEADLSEWEQVIYEEANPTSEVVIGMVGKYIELPDAYKSVNEALKHAGLKNRLSVKIKYIDSQDVESKGTEVLAGLDAILVPGGFGSRGVEGKILTAQYARENNIPYLGICLGMQVALIEFARNVAKMADAHSTEFNAETKYPVVGLITEWIDSEGKVEERTEKSDLGGTMRLGSQLCHLQDGSKARTLYGQPTIHERHRHRYEVNNTLLPKLEKAGLKVSGLSADKKLVEIIEVPNHPWFVAAQFHPEFTSTPRDGHPLFEGFVKAAGAYHRGELNQ

SEQ ID NO: 31196 - DNA, 1629 bp, Oceanospirillum sp. MED92
  CDS (1)..(1629): transl_table=11
atgacgcgatatatcttcgtcacaggcggtgttgtgtcctcattgggcaaaggcatcgcatccgcttctttggctgcaattttggaagccagagggcttaaagtaactatgttgaaactggatccatatatcaatgtggacccagggactatgagcccaattcagcacggtgaagtttttgtcacagaggatggtgcagaaactgacctcgaccttggtcactacgaacgttttattcgtacgaccatgagtaaacgtaacaacttcaccgctggacgtatttatcagcatgtattgcgtaaagaacgtcgtggcgattatctgggtggaactgttcaggttattccgcatatcactgatgaaattaagcgccgtgtgattgaaggtgcaggtgatgcggatgtggcgctggtggaaatcggcggtacagtaggtgatattgaatcactaccatttatggaagcagtccgtcagttgaaagctgagctaggttcagcacgtgcgatgtttatgcacctgacattggttccatacattgcgacagcgggcgaaataaagacgaaaccatctcagcactctgttaaagagctgcgttctatcggtattcagcctgatattctggtttgtcgttctgattttcctttgcctgattcttcacgccgtaagctttcattgtttaccaacgttgaagagcgtgcagtggtatctctgccagatgcagacacgatctataacatccctcgtatgctttcggagcaggggcttgacgatattgttgttgagcgtttccatcttgagtgtactgaagcggaccttggcgaatgggatcgcgtagctgatgctcaccttaacccagaaggcgaagttaagatcgctatggtgggtaagtatatggagctgctggacgcttataagtcgctgatcgaagcgatctctcacgcaggtatcgcactgaagaaaaaagtgcgcatcgaatgtattgattcagaacgtgttgagcgcgaaggtgttgaaatccttgagggtgctagtgcgattctggtaccaggtgggtttggtgagcgcggtgttgaaggcaaaattgctgctgttcgttatgcgcgtgagaataaagttccttatttgggtatctgtctgggtatgcaagttgcggtgattgaatttgctcgccacgttgcaggccttgaaggtgctacctcttctgaatttgataaagaagctgaacatcaggttatcggcctgataaccgagtgggcgacctcagaaggtggtgttgaaactcgcggagaagccgatgatcttggcgggactatgcgtcttggtgctcaggtttgtcatctggctgaaggctctacagcagctaaagcgtacggtaatactgaaattactgaacgtcatcgtcaccgttatgaagtaaacaacaattatgtggctaagttggaagaagctggcttgcgcatctcgggtcgttcagtagatggcgaactggtagaagtcgttgaagttgcagaccacccttggtttgtggcgtgtcagttccatcctgaatttacctccactcctcgtgatggtcacggtttgtttactggcttcattcaggctgctcttgataagcaggcgcaaaagtaa

SEQ ID NO: 31197 - protein, 542 aa, Oceanospirillum sp. MED92
MTRYIFVTGGVVSSLGKGIASASLAAILEARGLKVTMLKLDPYINVDPGTMSPIQHGEVFVTEDGAETDLDLGHYERFIRTTMSKRNNFTAGRIYQHVLRKERRGDYLGGTVQVIPHITDEIKRRVIEGAGDADVALVEIGGTVGDIESLPFMEAVRQLKAELGSARAMFMHLTLVPYIATAGEIKTKPSQHSVKELRSIGIQPDILVCRSDFPLPDSSRRKLSLFTNVEERAVVSLPDADTIYNIPRMLSEQGLDDIVVERFHLECTEADLGEWDRVADAHLNPEGEVKIAMVGKYMELLDAYKSLIEAISHAGIALKKKVRIECIDSERVEREGVEILEGASAILVPGGFGERGVEGKIAAVRYARENKVPYLGICLGMQVAVIEFARHVAGLEGATSSEFDKEAEHQVIGLITEWATSEGGVETRGEADDLGGTMRLGAQVCHLAEGSTAAKAYGNTEITERHRHRYEVNNNYVAKLEEAGLRISGRSVDGELVEVVEVADHPWFVACQFHPEFTSTPRDGHGLFTGFIQAALDKQAQK

SEQ ID NO: 31198 - DNA, 1605 bp, Flavobacteria bacterium BBFL7
  CDS (1)..(1605): transl_table=11
atggcacacgcaaaatacatttttgtaaccggtggagttacctcttctttaggtaaaggaattatagccgcatctcttgcaaaactgcttcaggcgcgtggttttagagtaactatacaaaagcttgatccctatattaatgtagatccaggaacacttaatccatatgaacatggagaatgttatgtaactgaagatggcgcagaaaccgatctagatttaggtcactatgagcgatttttaaacgtgaatacctctcaggctaacaacgttaccactggtagaatttatcaaagcgttattcaaaaagagcgtcgtggtgaatttttaggtaagaccgttcaggttattcctcatatcacagacgaaatcaaacaccgaatccagattttaggtaaatcaggtgaatatgatatcgtgattactgaaataggtggtacggtaggtgatattgaatcattaccatatatagaaagtgtaagacaattaagttgggaactaggagaacataactctatggttattcacttaacgctgattccattcttaagcgcagctggggaattaaaaactaaacctactcaacacagtgtaaaaacattgatggaaagtggagtacaggcagacatattagtatgccgtacagagcatgaattatctgaagaaattaagactaaactagcacgtttttgtaacgtgcgacgtgaggcagtcatacaatctatcgatgtagagactatatatgatgttcctaataaaatgctggcggaaggtctagataaagtagttctagaggaactaaatttagatattcaaaaagctccagaccttactaattggaatgaatttgtgcaacgtcacaaaaatcctaagagtgaagtgactattggattaataggaaagtatgtagagcttcaggattcctataaatctattttagaatcctttattcatgcaggagctgcaaatgaagttaaggttaatatagaatctattcatagtgaatttcttgaagtggataatatagacgccaagttgtcgcatctagatgggttgttggtagcaccaggttttggagaacgtggtatagaaggtaagatagaggcagtacgatatgctcgagtaaataagatgccattctttggaatttgtttaggaatgcaaatggctgttatcgagtatagtaggaatgtgttaggacttcaagatgctaattctgttgagatggatgagaagaccgcaaatcctgttatttctctaatggaagagcaaaaaaacattaccaatatgggaggaaccatgcgtctaggtgcatgggattgtgagttaaacggtggcaatgtggcagatatctatggttcgggcatgatttctgaacgtcacagacatcgttatgagtataataatgaatataaggaacagctagaaaaagctggattaaaatctacaggtgttaatcctaagactggattagttgagattattgagatagaagatcacccatggtttatcggtgttcaatatcatccagaatataaaagtaccgtggcaaatccacatcctttatttaaatcatttgtagcggcagcagctgcgagaaagtaa

SEQ ID NO: 31199 - protein, 534 aa, Flavobacteria bacterium BBFL7
MAHAKYIFVTGGVTSSLGKGIIAASLAKLLQARGFRVTIQKLDPYINVDPGTLNPYEHGECYVTEDGAETDLDLGHYERFLNVNTSQANNVTTGRIYQSVIQKERRGEFLGKTVQVIPHITDEIKHRIQILGKSGEYDIVITEIGGTVGDIESLPYIESVRQLSWELGEHNSMVIHLTLIPFLSAAGELKTKPTQHSVKTLMESGVQADILVCRTEHELSEEIKTKLARFCNVRREAVIQSIDVETIYDVPNKMLAEGLDKVVLEELNLDIQKAPDLTNWNEFVQRHKNPKSEVTIGLIGKYVELQDSYKSILESFIHAGAANEVKVNIESIHSEFLEVDNIDAKLSHLDGLLVAPGFGERGIEGKIEAVRYARVNKMPFFGICLGMQMAVIEYSRNVLGLQDANSVEMDEKTANPVISLMEEQKNITNMGGTMRLGAWDCELNGGNVADIYGSGMISERHRHRYEYNNEYKEQLEKAGLKSTGVNPKTGLVEIIEIEDHPWFIGVQYHPEYKSTVANPHPLFKSFVAAAAARK

SEQ ID NO: 31200 - DNA, 1659 bp, delta proteobacterium MLMS-1
  CDS (1)..(1659): transl_table=11
atgaagcctgccaacagcaaaccgcgtaccaagtttatctttatcaccggcggggtgctctcctccctgggtaaggggctggccgccgccgccatcggcgccctgctcgaaagccgggggctgaagatcaccttccagaagcttgatccctacatcaacgtcgatcccggcaccatgaaccccttccagcacggcgaggtttacgtcaccgacgatggggcggaaaccgatctcgatctgggccattatgagcgctatacctcggtgagcctgggtcagcgtaacaactacacctccggccggatctatcatacggtgatcagcaaggagcgccggggcgaatacctgggcggtaccgtccaggtgattccccatgtcaccgacgagatcaaggcggcggtacggcaactggaaggcgaggtggacgtggcgatcatcgaaatcggcggcaccatcggcgatatcgaatccctgcccttcctggaggcgattcgccagttacgcggcgatctcggccgtgacaacaccctctatctccacgtcaccctggtgccctatatcaagaccgccggcgaggtcaagaccaagcccacccagcacagcgtcaaggagttgcgggccatcggcattcagcccgatatcctgctctgtcgtaccgagactaccttggcggatgacttgaaggccaagatcgcccttttttgcaatgtcgagtccgacgcggtgatcaccgcccgtgatgtggacgatatctatgaggtgccgctttatctgcatgaagaggggctggacaacaaaatcctgcaactgctcaatatctggaccggcgctccccagttggagccctggcggcaactggtcgccaggatcaagcagcccgccgccacggtgccgattgccattatcggcaagtatgtcgaattaaaagaatcctacaagagcctccacgaagccctggtccatggcggggtggccaataacgcccgggtggagctccattacgtcagtgccgaggatatcgaagaacagggggccgcgcccctgctggcccactgccacggcatcctggtgcccggtggcttcggcggccggggagtggccggcaagctggcggccatcacctacgctcgccagcagaaggtaccctttttcgggatctgcctggggatgcagttggcagtggtggaatttgcccgccatcttgccggcctggccgacgccgacagtaccgagttcaatcccaccacctcccatccggtgatctactttatcaaggagtggtacgattaccgtaccagtcagttacagattcgcgacgaggccggtgagttgggcggtaccctgcggctgggggcttatccctgtgttttgcgggagggcaccttcgcccgggctgcctataaagtcgccgagatcagcgaacgccatcgccaccgctatgaattcaacaacgagtactgccagcagttggttgacgccggcctggtgattgccggcagttcgccggatgaaaaactggtggaaatcgtcgaactggctgaccatccctggtttctgggctgccagttccaccccgagttcaagtcccggccgatgcggccccatcccctcttcgtcgatttcatcaaagccgccctggggcatcagggggcaaattag

SEQ ID NO: 31201 - protein, 552 aa, delta proteobacterium MLMS-1
MKPANSKPRTKFIFITGGVLSSLGKGLAAAAIGALLESRGLKITFQKLDPYINVDPGTMNPFQHGEVYVTDDGAETDLDLGHYERYTSVSLGQRNNYTSGRIYHTVISKERRGEYLGGTVQVIPHVTDEIKAAVRQLEGEVDVAIIEIGGTIGDIESLPFLEAIRQLRGDLGRDNTLYLHVTLVPYIKTAGEVKTKPTQHSVKELRAIGIQPDILLCRTETTLADDLKAKIALFCNVESDAVITARDVDDIYEVPLYLHEEGLDNKILQLLNIWTGAPQLEPWRQLVARIKQPAATVPIAIIGKYVELKESYKSLHEALVHGGVANNARVELHYVSAEDIEEQGAAPLLAHCHGILVPGGFGGRGVAGKLAAITYARQQKVPFFGICLGMQLAVVEFARHLAGLADADSTEFNPTTSHPVIYFIKEWYDYRTSQLQIRDEAGELGGTLRLGAYPCVLREGTFARAAYKVAEISERHRHRYEFNNEYCQQLVDAGLVIAGSSPDEKLVEIVELADHPWFLGCQFHPEFKSRPMRPHPLFVDFIKAALGHQGAN

SEQ ID NO: 31202 - DNA, 1662 bp, Rickettsiella grylli
  CDS (1)..(1662): transl_table=11
atggcgacacgatatctatttattactggcggcgtagtttcttctttaggaaaagggattgctgccgcttccttaggcgccattttagaatccagaggacttaaaattagcttattaaaattggatccttacctcaatttagacccagggacgatgagtccttatcaacatggggaagtgtttgtcaccgaagatggtgctgaaaccgatttagacttgggtcattatgaacgttttgtccgtactaaaatgacgaaagataataatttcaccgcaggccaaatttatgctcgagtccttcgcaaagaacgtcgtggagattatttaggcggtacggtgcaggttattcctcatgtgaccgatgaaataaagcaagcgatattaaaaggtgcgcaaggcgctgatattgctttagtggaaattgggggaaccgtaggcgatattgaatctttaccgttcttagaagccattcgtcagttacggattgaacttggaaatcgctatacattatttattcatttaacgctcgtgccttatattagtacggcaggcgaaatcaaaacgaagccgacgcaacattccacgaaagaattgcgctctatcggtatacaagccgatatgttgatttgccgcgctaaagaagagattcccgaacacgcccgcgaaaaaattgctttatttacgaatgtagaattgtcaggtgttatttccttgccggatgtgaatacgatttatcgaattcctttattgctacatcagcaatgtgtggatgaaaacgtattgcaacgttttggtttgaagaattacccgcctgctgatttaaaagcatgggcggaagtggttgcagccaaagaaaatccaacggctgaagtaaaaattggtatggtcggaaaatatatgggacttgcggactcctataaatccttaagtgaagcattagtccatgcgggtataaaaacgcatacccatgtgaacgtcatttatatcgatgcagaggcgctcgaacaacaaggtgtaaaattactggagccattagatgctattttagtacccggcggatttgggaaaaggggaatagcgggtaaaattctcgctgcacagtatgcccgtgaaaataatatcccttacctgggtatttgtttagggatgcaaactgccttcattgaattcgcgcgccatgttgcgggtttaacccatgcgcatagtacagaatttgatccagagacgccttatcccgtggttgcgttagtaaccgaatggacgacggttgatggtcatgttgaaaaacgcgataaaaattctgatttaggcggtacgatgcgtttaggggggcaacgttgttacttaaaacacgaaacaaaagcaagcgctttatatcaccaagacagtattattgagcgccatcgacatcgctatgaagtgaataatcaactattaccttgtttagaagagaaaggacttatcgtttcgggtcgttccgaagatggaaatttagtagaaatgattgaattagaaaatcacccgtggtttataggatgccaatttcatccggaatttacatcgaatccgcgcgatggccatccgttgtttgttggttttgttgaagcagcaaaattacagcataaacagttaacaaaaatgcccaattcctatacacactag

SEQ ID NO: 31203 - protein, 553 aa, Rickettsiella grylli
MATRYLFITGGVVSSLGKGIAAASLGAILESRGLKISLLKLDPYLNLDPGTMSPYQHGEVFVTEDGAETDLDLGHYERFVRTKMTKDNNFTAGQIYARVLRKERRGDYLGGTVQVIPHVTDEIKQAILKGAQGADIALVEIGGTVGDIESLPFLEAIRQLRIELGNRYTLFIHLTLVPYISTAGEIKTKPTQHSTKELRSIGIQADMLICRAKEEIPEHAREKIALFTNVELSGVISLPDVNTIYRIPLLLHQQCVDENVLQRFGLKNYPPADLKAWAEVVAAKENPTAEVKIGMVGKYMGLADSYKSLSEALVHAGIKTHTHVNVIYIDAEALEQQGVKLLEPLDAILVPGGFGKRGIAGKILAAQYARENNIPYLGICLGMQTAFIEFARHVAGLTHAHSTEFDPETPYPVVALVTEWTTVDGHVEKRDKNSDLGGTMRLGGQRCYLKHETKASALYHQDSIIERHRHRYEVNNQLLPCLEEKGLIVSGRSEDGNLVEMIELENHPWFIGCQFHPEFTSNPRDGHPLFVGFVEAAKLQHKQLTKMPNSYTH

SEQ ID NO: 31204 - DNA, 1632 bp, Oceanobacter sp. RED65
  CDS (1)..(1632): transl_table=11
atgtcgactcgttttatattcgtcacaggcggtgttgtgtcctcattgggcaaaggcattgcatccgcttctcttggggctatcctcgaagcacgcggactcaaagttaccatgctcaaattggatccctacatcaatgtggatccaggcaccatgagcccattccagcatggtgaggtgtttgttaccgaagatggcgcggaaaccgacctagatttaggtcactatgagcgtttcattcgtaccactatgagtagccgtaataacttcaccacaggtcgcgtataccaagatgtattgcgcaaagaacgtcgtggtgattatctaggtggtacggttcaggttatccctcacatcacagatgaaattaagcgtcgtgtttattccggtgccgaaggcgccgacgtcgctttggttgagatcggtggcaccgtaggtgatatcgagtcgttacctttccttgaagcagtgcgtcagctcaaagttgagctaggtagcaagcgtgcactatccatgcatctaaccctagtgccattcatcgccactgcgggcgaaaccaaaaccaagccaactcagcacagtgtaaaagaactgcgcagcattggtttgcaacctgacattctcgtttgtcgttctgatcaccgcattgattcaggttctcttcgtaaaatcgccctgttcaccaacgttgaagagcgcgcggttatcccattagaagacgcagataccatctatcgtattcctgagttgcttaagcaaaccggtcttgacgattacgtcatcgacaaatttggtttggaatgcgatgaagcggatcttagcgagtgggatgaggtgatcgatgctaaattgaatccagagcatgaaatcaatatcgccatggtaggtaaatacatggagttattggatgcatataaatccttgatcgaagccattgatcatgccggtttgaagaaccgtactaaggtgaacatcgagtacattgactcagagatcattgagcgtgacggcgctgatgtactggcagggaaagacgcgattcttgttcctggtggctttggtaaccgcggtgtagaaggtaaaattcgcacggtacaatacgctcgtgagaacaaaattccgtatttgggtatctgtttaggcatgcaaagcgcggttatcgaattcgctcgtaatgtgtgcggcttagaagatgcccatagtactgagttttccagctctactaagaatcctgtcgtcggcctaatcaccgagtggaccaccgcagaaggtgagaccgagcagcgtactgaagattccgatctcggtggcactatgcgtcttggtggccaagagtgccgcttaacgcctgagtcgctatctgcgcaagcgtatggtcaagaggtgattgttgagcgtcaccgtcaccgctacgaagtaaacaataatttcctagagactctagaaaaaaatggtttacgcatagcaggtcgttcaatggacggcaagctagtcgaagtggtagaagtggctgaccacccatggtttgtagcctgtcaattccaccctgaattcacttcgactccgcgcgatggtcatggcctatttacggcatttgttgcggcgggtttgaagcaagcaggtaaagcgtaa

SEQ ID NO: 31205 - protein, 543 aa, Oceanobacter sp. RED65
MSTRFIFVTGGVVSSLGKGIASASLGAILEARGLKVTMLKLDPYINVDPGTMSPFQHGEVFVTEDGAETDLDLGHYERFIRTTMSSRNNFTTGRVYQDVLRKERRGDYLGGTVQVIPHITDEIKRRVYSGAEGADVALVEIGGTVGDIESLPFLEAVRQLKVELGSKRALSMHLTLVPFIATAGETKTKPTQHSVKELRSIGLQPDILVCRSDHRIDSGSLRKIALFTNVEERAVIPLEDADTIYRIPELLKQTGLDDYVIDKFGLECDEADLSEWDEVIDAKLNPEHEINIAMVGKYMELLDAYKSLIEAIDHAGLKNRTKVNIEYIDSEIIERDGADVLAGKDAILVPGGFGNRGVEGKIRTVQYARENKIPYLGICLGMQSAVIEFARNVCGLEDAHSTEFSSSTKNPVVGLITEWTTAEGETEQRTEDSDLGGTMRLGGQECRLTPESLSAQAYGQEVIVERHRHRYEVNNNFLETLEKNGLRIAGRSMDGKLVEVVEVADHPWFVACQFHPEFTSTPRDGHGLFTAFVAAGLKQAGKA

SEQ ID NO: 31206 - DNA, 1659 bp, Synechococcus sp. RS9916
  CDS (1)..(1659): transl_table=11
atggccaaattcgtcttcgtcaccggtggtgttgtttccagcatcgggaaggggatcgtggccgccagcctcggacggctgctgaaggcacggggctacagcgtctcgatcctgaagctggatccttacttgaatgtggacccgggcacgatgagcccgttccagcacggtgaggtgttcgtcaccgaagacggcgccgagaccgacctcgacttgggccactacgaacgcttcaccgacacggccatgtcacgcctcaacagcgtgaccaccggctcgatctaccagtcggtgatcaacaaggaacgccgcggcgactacaacggcggcaccgtgcaggtgatcccccacatcaccggtgagatccgcgagcgcattcaccgggtggcctccaacagcggcgccgatgtggtgatcaccgagatcggcggcaccgtgggtgacatcgaatcgctgcccttcctcgaggccatccgcgaattccgaggcgatgtgggccgcaacgacctggcctacatccacgtcaccctgctgccctacatcggcacatccggtgagctgaaaaccaagcccacccagcactccgtgaaggagctgcgctcgatcggcattcagcccgacgtgctggtgtgccgcagcgaccgcgacatcaacgacgagctgaagcgcaagatcggcggcttctgcggcgtgccccagcgggccgtgatcccatcactggatgccgacagcatctatgcggtgccgctgacgctggaagaggagggtctctgccgcgaagtgctggatgtgctccagctgcaggaccacgacagcgacatgaccagctgggcccagctggtgcacaaactgcgcaaccccggccccaccgtgaaggtggccctggttggcaaatacgtgcaactcaacgatgcctacctctcggtggtggaggccctgcgccacgcctgcatcgcccaggacgcctccctggatctgcactggatctgcgccgagcagatcgaaagcgatggtgccgacacgctcctgaagggcatggatgcggtggtggtgcccgggggcttcggcaaccgcggcgtcgacggcaaggtggcagcgattcgctgggcccgcgagcaacgggtgcccttcctcggcctctgcctgggcatgcaaaccgccgtgatcgagtgggcccgcaaccaagccggcctcaccggcgcctccagcgccgagctcgatcccgagacgccccatccggtgattcacctgctgcccgagcagcaggacgtggtggatctgggcggcaccatgcgcctgggggtttatccctgccgcatcgcggaaggaacgatggcggagcggctctacgccgatgaggtggtctatgagcgccaccgccaccgctacgagttcaacaacgcctaccgcaacctgttcctggaatccggctaccgcatcagcggcacgtcccccgatggccgcctggtggaactgatcgaactgcccgggcatcccttcttcacggcctgccagtaccaccccgaattcctctcccggccgggtcaaccccatcccctgttccgcggcctgatcgaagcggcccagcagcggctgccgtccagcccaagcgaggccctgcgacaggccgaacaggcgaccactagcaccagcctttga

SEQ ID NO: 31207 - protein, 552 aa, Synechococcus sp. RS9916
MAKFVFVTGGVVSSIGKGIVAASLGRLLKARGYSVSILKLDPYLNVDPGTMSPFQHGEVFVTEDGAETDLDLGHYERFTDTAMSRLNSVTTGSIYQSVINKERRGDYNGGTVQVIPHITGEIRERIHRVASNSGADVVITEIGGTVGDIESLPFLEAIREFRGDVGRNDLAYIHVTLLPYIGTSGELKTKPTQHSVKELRSIGIQPDVLVCRSDRDINDELKRKIGGFCGVPQRAVIPSLDADSIYAVPLTLEEEGLCREVLDVLQLQDHDSDMTSWAQLVHKLRNPGPTVKVALVGKYVQLNDAYLSVVEALRHACIAQDASLDLHWICAEQIESDGADTLLKGMDAVVVPGGFGNRGVDGKVAAIRWAREQRVPFLGLCLGMQTAVIEWARNQAGLTGASSAELDPETPHPVIHLLPEQQDVVDLGGTMRLGVYPCRIAEGTMAERLYADEVVYERHRHRYEFNNAYRNLFLESGYRISGTSPDGRLVELIELPGHPFFTACQYHPEFLSRPGQPHPLFRGLIEAAQQRLPSSPSEALRQAEQATTSTSL

SEQ ID NO: 31208 - DNA, 1635 bp, Alteromonadales bacterium TW-7
  CDS (1)..(1635): transl_table=11
atgagtacaaaatttatcttcgttactggcggggttgtttcttcgttgggtaaaggtattgcagcagcatcgttggcggctattttagaagcccgtggcttaaatgttactattttaaagctggatccttacatcaacgttgacccaggcacaatgagcccaattcaacacggtgaagtatacgttacagaagacggcgcagagactgatcttgatttaggtcactacgaacgttttattcgcaccaaaatgactagccgaaataacttcacacaaggccgcgtatatgaagacgtattacgtcgcgagcgtcgtggtgaatacttaggcgcaactattcaggttatccctcatatcactaacgatattaaacagcgtgtttacgaaggcgctgaaggccatgatatagcaattgttgaaattggtggcacagtaggtgatatagaatcacaaccgtttatcgaagcaattcgtcaaatgggcacagagataggtcgcgaacgcgcactctttattcacttaacgttagtgcctttcttaggccctgcaggcgaagtgaaaacgaaaccaacacagcactcagttaaagaacttcgctctgttggtattcagccagatattctaatttgtcgttcagaccgtaagttacctaacaatgagcgtgcaaaaattgcattgtttaccaatgtagaagaaaaagcggtaatttcactacccgatgtagacagtatttataaaattccagcactgttaaaatcacaagaactagacaactttgtatgtcgtcgttttcacttagacgcacctgaagctgatttagttgagtgggaacaagtattgtaccaagagtctaaccctacgggtgaagtaaccattggtatggttggtaaatacattgaattacccgatgcatacaagtcggttaacgaagctttaaaacatgcgggccttaaaaaccgtttaactatcaacattgaatatgttgattcacaagatttagaaagcaaaggtgtagagctgctttctcaccttgatgctattttagtaccaggcggttttggtggtcgtggcgttgaaggtaaaattttagcggccaaatacgcacgtgaaaataaagtgccttacttaggtatttgtttaggtatgcaagtggcgcttattgagtatgcacgtaatgttgcaggcttaaccgatgcaaactctacagaatttaatgctaaatcagcagcgcctgttgtaggtttaatcactgagtggttagacgccgaaggtaaagtagaagttcgtgacgagaaatcagatcttggtggcacaatgcgcttaggcgctcaaaaatgtcacttagcaccaggctctaaggtacacgaagtttacggtagcgacgaaattgtagaacgtcaccgtcaccgttatgaagttaataacaactttgtagaccaacttgaaaaagcaggtttaacattctctggtttatctgaagataaaaagctagtagaaattattgaaaataaagatcacccttggtttattgccgcgcagttccacccggaattcacgtcaacaccacgtgatggccacccgctatttgaaggatttgtagcagcagcgcatatccaccaaaaagcgtcgtcgtaa

SEQ ID NO: 31209 - protein, 544 aa, Alteromonadales bacterium TW-7
MSTKFIFVTGGVVSSLGKGIAAASLAAILEARGLNVTILKLDPYINVDPGTMSPIQHGEVYVTEDGAETDLDLGHYERFIRTKMTSRNNFTQGRVYEDVLRRERRGEYLGATIQVIPHITNDIKQRVYEGAEGHDIAIVEIGGTVGDIESQPFIEAIRQMGTEIGRERALFIHLTLVPFLGPAGEVKTKPTQHSVKELRSVGIQPDILICRSDRKLPNNERAKIALFTNVEEKAVISLPDVDSIYKIPALLKSQELDNFVCRRFHLDAPEADLVEWEQVLYQESNPTGEVTIGMVGKYIELPDAYKSVNEALKHAGLKNRLTINIEYVDSQDLESKGVELLSHLDAILVPGGFGGRGVEGKILAAKYARENKVPYLGICLGMQVALIEYARNVAGLTDANSTEFNAKSAAPVVGLITEWLDAEGKVEVRDEKSDLGGTMRLGAQKCHLAPGSKVHEVYGSDEIVERHRHRYEVNNNFVDQLEKAGLTFSGLSEDKKLVEIIENKDHPWFIAAQFHPEFTSTPRDGHPLFEGFVAAAHIHQKASS

SEQ ID NO: 31210 - DNA, 1632 bp, marine gamma proteobacterium HTCC2143
  CDS (1)..(1632): transl_table=11
atggcgacccgatttatcttcgtcactggtggtgttgtatcgtctttaggcaaaggcatagcctctgcttcactggccgcaattcttgaggcccgcggcctgaaagtcaccatgctaaagctcgatccctacatcaatgttgaccccggaacgatgagcccattccagcatggtgaggtatttgtcaccgaagacggggctgaaactgatttggatctggggcattacgagcgctttattagaacgaagatgggtaagcggaataacttcaccaccggtcgggtatacgaaacggtgttacggaaagaaagaagaggtgattatcttggcggaaccgtgcaagtgatcccccatatcaccgacgaaataaagcgccgagtgatagaaggtgcgggtgatgctgaagttgccatcgtcgagattggcggcaccattggtgatatcgaaggtctgccattttttgaggcagcacgccagctgaaagttgatcttgggcccagcagggcgatgttgatgcacttaacgttagtgccctatattgccaccgcgggagaaaccaaaactaagccgacgcaacactcggttaaagagctacgctcgattggccttcagcctgatattctcttgtgccgttcggatcatgagattgatgagggctcgctgaaaaaaatatcgtccttcaccaacgttgaactgcgagccgttatacctctgcaagacgctgacagtatctatcgcatccccaatgccctcaaacaacgcggtttggatgatctgatcgtcgaaaaattcggcttgcagtgcggccctgctgacttgtccgagtgggatagagtggttgatggcgcgctaaatcctgagaaggaaatcaccattgccatggtcggtaagtacatggaattaatcgatgcttacaaatcactcaatgaagccttagatcacgcaggtattaacactcgcactaaagtgaacattcgctacgttgattcccaaaagctggaagacgatggtttgagcgtgttggaaggggttgatggtattttggtgcccggtggctttggtaaccgtggtgtcgaaggaaaaattgcgacggttcagttcgcccgtgagaacaacataccctttttgggcatttgtttaggcatgcaggtggctgttatcgagtttgcccgtaatgttgccagcttggcggatgccaacagctcagaattcaacgcacaaacgaaatttccagttattgctctgattaccgaatgggttgatgctgatggcatcactgagacccgtgacgagaacgcagatctcggcggcaccatgcgtttgggcggtcaggaatgtcgtttggtcgacggttccaaagccaaagccacttacgacgccgacctgattattgaacgtcatcgtcaccgctacgaagtgaataacaccttcgttgaccagctgcagcaagcgggcatgcgaattggtggctggtcagccgacgactcgctggttgaagtgattgagttaccggatcatccctggtttattgcttgccaatttcaccctgaattcacctcgaccccccgtgatgggcatccgctgtttagcggttttgtgaatgcagccgtcgattattcgaaacactcctag

SEQ ID NO: 31211 - protein, 543 aa, marine gamma proteobacterium HTCC2143
MATRFIFVTGGVVSSLGKGIASASLAAILEARGLKVTMLKLDPYINVDPGTMSPFQHGEVFVTEDGAETDLDLGHYERFIRTKMGKRNNFTTGRVYETVLRKERRGDYLGGTVQVIPHITDEIKRRVIEGAGDAEVAIVEIGGTIGDIEGLPFFEAARQLKVDLGPSRAMLMHLTLVPYIATAGETKTKPTQHSVKELRSIGLQPDILLCRSDHEIDEGSLKKISSFTNVELRAVIPLQDADSIYRIPNALKQRGLDDLIVEKFGLQCGPADLSEWDRVVDGALNPEKEITIAMVGKYMELIDAYKSLNEALDHAGINTRTKVNIRYVDSQKLEDDGLSVLEGVDGILVPGGFGNRGVEGKIATVQFARENNIPFLGICLGMQVAVIEFARNVASLADANSSEFNAQTKFPVIALITEWVDADGITETRDENADLGGTMRLGGQECRLVDGSKAKATYDADLIIERHRHRYEVNNTFVDQLQQAGMRIGGWSADDSLVEVIELPDHPWFIACQFHPEFTSTPRDGHPLFSGFVNAAVDYSKHS

SEQ ID NO: 31212 - DNA, 1653 bp, marine gamma proteobacterium HTCC2080
  CDS (1)..(1653): transl_table=11
atgacgcgttatgtgttcgttacaggtggggtagtgtcttccctaggcaaaggtattgctgcggcttcgctcgccgccgttttggaggcccgggggctcaaggtcacgctgctcaaactagatccctatataaatcttgaccccggaacgatgagccctttccagcacggcgaggtcttcgtgaccgatgatggtgcagaaaccgatttggatctagggcactacgagcgctttacccgaaccaccatgaccaagcgcaataacttcaccacgggacgtgtctatgatgccgtgcttcgcaaagagcgccgtggtgattacttgggtggcacggtacaagttattcctcatgtcaccgatgaaattaagcgcagggtcattaagggcgctgatggtgctgacgtggcggtcgttgaagttggtggcactgcgggtgacattgaaagccagccgtttctcgaggctgttcgccagcttaaactggagctagggcctacccgagcgctgctcatgcacctcaccttaataccgtatatagctacggcaggagagataaagaccaagcccactcagcattcagtcaaagagttacgttcaatcggccttcagcctgacgtattgctttgtcgctgcgctgtagatgtcgatgaaggtgcccgtcgtaaaatctctttgtttaccaatgttgagtttcgagcggtgattccgctcctcgatgctgattccatttataaaattccgggaaacctaaatgcgaatggcctcgatgattatgtattagaccaatttcagctcgatagtcccacagctgacctttcagagtgggatgaagtcgttgcgagggagttcagtaaaaccagaggcaccgttacggttggcatggtgggtaaatatgtcgatttggccgacgcttacaaaagcttgaatgaagcgctgcagcatgcggggcttcagaccctggcgaaagtcgatattcgatacattgacgctgaagatattgagtctgacggcgtcgcgctgctgaaaaatcttgatgccattttggtgcctggtggttttggtgatcgaggcataaacggcaaaattgaagctgtgcgctacgcccgtgaaaataacattccatttttgggcatctgtttgggtatgcatatggccatgattgagtacggtcggcatatctgtggtctcactggggcgcattcttcggagatggagcccacaacaccccatcccgtcgttgcgttgatcaccgagtggcaggatgccgatggcagcctggaaaagcgagatgcgcagtcagacttaggtggcactatgcgtttgggagcccaaacgtgtcatttggtcgaaggaagcctcgctcaaaaggtatatggcgcatccgaaattcgtgaaaggcatcgacaccgctacgaaattaacaacaattatgtcgctcagattgaagcagcgggtcttcgcgtgggggggtggtctcaggaccgggagctggtcgaaatggtcgagttaccctcgcatccttggtttttggcctgccagtttcaccctgagttcacctcaagacctcgggggggccaccctttgttcaccagctatattgaggctgcgctgcgacacactgaggcgcagtcagcaacagaggccacgagctga

SEQ ID NO: 31213 - protein, 550 aa, marine gamma proteobacterium HTCC2080
MTRYVFVTGGVVSSLGKGIAAASLAAVLEARGLKVTLLKLDPYINLDPGTMSPFQHGEVFVTDDGAETDLDLGHYERFTRTTMTKRNNFTTGRVYDAVLRKERRGDYLGGTVQVIPHVTDEIKRRVIKGADGADVAVVEVGGTAGDIESQPFLEAVRQLKLELGPTRALLMHLTLIPYIATAGEIKTKPTQHSVKELRSIGLQPDVLLCRCAVDVDEGARRKISLFTNVEFRAVIPLLDADSIYKIPGNLNANGLDDYVLDQFQLDSPTADLSEWDEVVAREFSKTRGTVTVGMVGKYVDLADAYKSLNEALQHAGLQTLAKVDIRYIDAEDIESDGVALLKNLDAILVPGGFGDRGINGKIEAVRYARENNIPFLGICLGMHMAMIEYGRHICGLTGAHSSEMEPTTPHPVVALITEWQDADGSLEKRDAQSDLGGTMRLGAQTCHLVEGSLAQKVYGASEIRERHRHRYEINNNYVAQIEAAGLRVGGWSQDRELVEMVELPSHPWFLACQFHPEFTSRPRGGHPLFTSYIEAALRHTEAQSATEATS

SEQ ID NO: 31214 - DNA, 1662 bp, Candidatus Desulfococcus oleovorans Hxd3
  CDS (1)..(1662): transl_table=11
atgacgtcaaaatccaaattcatcttcgtcacgggcggcgtggtatcatcgctgggaaagggcctggcatcggcatccatcggcgctcttctggagagccggggccttaccgtcaccattcagaagctggacccttacatcaacgttgaccccggcaccatgaacccctttcagcacggcgaggtctttgtcaccgacgacggcaccgaaaccgacctggacctgggccactatgagcggtttacccacgcggtcatgggccgcaacaacaacttcaccaccggcaagatctaccactcggtcatttccaaggaacgccggggcgactacctgggcggcaccgttcaggtgattccccatatcaccgacgagatcaagcgcagcatccgcatggtggaaaacgacgccgacatcgtcatcaccgagatcggcggcaccatcggcgacatcgagagcctgccctttctggaggccattcgccagatgcgcaccgacatgggaaaggaaaacgtgctttacattcacctgaccctggtgccctacatccccacggccaaggaggtgaagaccaagcccacccagcacagcgtcaaggagctgcgcagcatcggcattcagccggatatcctgttgtgccggaccagcggcctgctttccgacgagcttaaggccaagatcgcccttttctgtgatgtgagcaaggacgcggtgatcacggccaaggacgtggacaacatctacgaagtgcccctgaacttcaaccgggaggggctggatgacaagatcgtcgagctgctgcatatatggacccgggcgccccgcctggacttctgggaaaacctgtcgagtgccatcaaggcgccggaacacgacgtgaccatcgccatcgtcggcaaatacaccaacctcaccgagtcttacaagagcttaaacgaggccctctaccacggcgggtttgccaacaaaagcagggtgaatctccagtttatcgactcggagaccatcacaaaagaaaacgtggccgaggtcctcaaggacgcccacggcattctggtgcccggcggtttcggcccccgcggcattgagggcaaaatcgcggcctgcgaatacgcccggacccggaaggttccctatttcggcatctgcctgggcatgcagatcgcggtggtgacgtttgcccgccacgtggcgggcctggccggagcccacagcaccgaattcgacaagaacacgccggacccggtgatctacctgatgcgcgaatggtttgacgagcggctcaacacgatccagaagcgggacgtggattcggacatgggcggcaccatgcgcctgggcgcgtacacctgcgccgttgcgcccgactctctggcccacaccgcctatggacggacgaccatctccgagcgccatcgtcaccggtacgagttcaacaacgactacaaggccacgctgcaggaaaagggcctgatcatcagcggcacgtcaccgaacggcgagctggtggagattgtggaggcaggggaccatccctggtttctgggatgccagttccacccggaattcaagtcccggccggaagacccccacccgttgttccgggaattcataaaggcggccctggcttataaaaccggcaaccctgccgacaacccggattga

SEQ ID NO: 31215 - protein, 553 aa, Candidatus Desulfococcus oleovorans Hxd3
MTSKSKFIFVTGGVVSSLGKGLASASIGALLESRGLTVTIQKLDPYINVDPGTMNPFQHGEVFVTDDGTETDLDLGHYERFTHAVMGRNNNFTTGKIYHSVISKERRGDYLGGTVQVIPHITDEIKRSIRMVENDADIVITEIGGTIGDIESLPFLEAIRQMRTDMGKENVLYIHLTLVPYIPTAKEVKTKPTQHSVKELRSIGIQPDILLCRTSGLLSDELKAKIALFCDVSKDAVITAKDVDNIYEVPLNFNREGLDDKIVELLHIWTRAPRLDFWENLSSAIKAPEHDVTIAIVGKYTNLTESYKSLNEALYHGGFANKSRVNLQFIDSETITKENVAEVLKDAHGILVPGGFGPRGIEGKIAACEYARTRKVPYFGICLGMQIAVVTFARHVAGLAGAHSTEFDKNTPDPVIYLMREWFDERLNTIQKRDVDSDMGGTMRLGAYTCAVAPDSLAHTAYGRTTISERHRHRYEFNNDYKATLQEKGLIISGTSPNGELVEIVEAGDHPWFLGCQFHPEFKSRPEDPHPLFREFIKAALAYKTGNPADNPD

SEQ ID NO: 31216 - DNA, 1629 bp, Pseudomonas putida GB-1
  CDS (1)..(1629): transl_table=11
atgacgcgctacatattcgtcacgggcggtgttgtttcttcattggggaaaggcattgcctcggcttccctggcggccatcctggaagcgcggggcctgaaggtcaccatgctcaagctggatccgtacatcaacgtcgatccgggcaccatgagcccgttccagcatggtgaagtgttcgtcacccacgatggcgccgagaccgacctcgacctgggccactacgagcggttcatccgcaccaccatgacccagaacaacaacttcaccaccggccgtatctacgagcacgtgctgcgcaaggagcgccgtggtgattacctgggcgcgaccatccaggtcatcccgcacatcaccgacgaaatcaagcgtcgcatcatcaagggcgccggcgatgccgacgtggccctggtggaaatcggcggtaccgtgggtgacatcgagtcgcagccgttcctcgaggccattcgccagctgcgcgtcgaagtgggttccaagcgcgccatgctgatgcacctgaccctggtcccgtacatcgccaccgctggcgaaaccaagaccaagccgacccagcactcggtcaaggagctgcgctccatcggcctgcagcctgatgtgctgatctgccgctccgaccacccggtcgatgcctcgtcgcgtcgcaagatcgcgctgttcaccaacgttgaagagcgtgcggtgatttcgctggaagacgtcgacaccatctacaagatcccgggcgtactgcacgcacagggcctggacgacttcgtcgtcgagcgcttcggcctgcagtgcaatggcgccgacctgtccgagtgggacaaagtggtcgatgccaagctcaacccagagcacgaagtgaccattgccatggtcggcaagtacatggaactgctggatgcgtacaagtcgctgatcgaggcaatgagccacgccggcatcaccaaccgcaccaaggtcaacctgcgctacatcgactcggaagacatcgagaaccagggcaccagcctgctcgaaggcgccgatgccatcctggtgcctggcggtttcggcctgcgcggcgtggaaggcaagattaccgcggtgcaatacgcccgtgagaacaaggtgccgtacctgggtatctgcctgggcatgcaagtggcggtgatcgaattcgcccgtaacgtgatgggttggaaagacgccaactccaccgaattcgaccgtaacagcggccaccctgtggtcggcctgatcaccgagtgggccgatgccaccggtgccgtcgagacccgcgacgaggcttccgacctgggcggtaccatgcgcctgggtgctcaggactgccagctggctgccggttccaaggtgcacgactgctacggcaaggacgtgatcaccgagcgtcaccgtcaccgctacgaagtgaacaacaacctgctgccgcagctggtcgacgcaggcctggtggtttccggtcgttccgaagacggcgcgctggtggaagtggtcgagtccaaggaccacccatggttcgtcgcttgccagttccacccagaattcacttcgaccccacgtgacggccacccgctgttcagtggtttcgtcaaggcagctctggctcagaagaacaaggcctga

SEQ ID NO: 31217 - protein, 542 aa, Pseudomonas putida GB-1
MTRYIFVTGGVVSSLGKGIASASLAAILEARGLKVTMLKLDPYINVDPGTMSPFQHGEVFVTHDGAETDLDLGHYERFIRTTMTQNNNFTTGRIYEHVLRKERRGDYLGATIQVIPHITDEIKRRIIKGAGDADVALVEIGGTVGDIESQPFLEAIRQLRVEVGSKRAMLMHLTLVPYIATAGETKTKPTQHSVKELRSIGLQPDVLICRSDHPVDASSRRKIALFTNVEERAVISLEDVDTIYKIPGVLHAQGLDDFVVERFGLQCNGADLSEWDKVVDAKLNPEHEVTIAMVGKYMELLDAYKSLIEAMSHAGITNRTKVNLRYIDSEDIENQGTSLLEGADAILVPGGFGLRGVEGKITAVQYARENKVPYLGICLGMQVAVIEFARNVMGWKDANSTEFDRNSGHPVVGLITEWADATGAVETRDEASDLGGTMRLGAQDCQLAAGSKVHDCYGKDVITERHRHRYEVNNNLLPQLVDAGLVVSGRSEDGALVEVVESKDHPWFVACQFHPEFTSTPRDGHPLFSGFVKAALAQKNKA

SEQ ID NO: 31218 - DNA, 1629 bp, Marinobacter sp. ELB17
  CDS (1)..(1629): transl_table=11
atgacgcgttatattttcgtcaccggcggtgttgtgtcctcacttgggaaaggaatcgcatcggcctctctggctgcgattcttgaggcacgcggcctgaaggtaactatcctcaagctggacccgtacattaatgtagacccgggaacaatgagcccgttccaacacggtgaagtgtttgtcaccgacgacggcgccgaaaccgatctcgacctgggccattacgagcgctttattcgcaccccgatgacccgccggaacaacttcactgccggtcgcgtttacgaagaagtgattcgtaaagaacgccgtggcgattatcttggtggcactgtgcaggttattccccacattaccgatgaaatcaaacgccgtgtcattgaaggcgccgcaggcgtagacgtggctctggttgaagtaggcggcaccgtaggcgacatcgaatccttgccgtttttggaggcctgtcggcaactgaaagtggaagtaggctccagccgcgctttgtttatgcaccttaccctggtgccctacattgccacggctggcgaaataaaaaccaaaccgacccaacactcggtgaaggaaatgcgctccatcggcctgcagccagacattctgctgtgccgctccgatcacgaagtggatgccagttcgcgacgcaaaatcgctctgtttaccaacgttgaagagcgtgcggttattcctatgcgcgatgccaagtcgatttatgtcatcccgcgtatgctgcacgaccatggcctggaccagctagtgatcgagcatttcaacctggatgcccgcgaagccgacctaagcgaatgggacaacgtggttgaatccctgatgaatccgcagcacgaagtgaccattgccatggttggcaaatacatggagctgctggaagcctacaaatcgctgattgaatccctgctacacgccggaatcaaaacccgcaccaaggttaatattaactacatcgactcggaagatattgagcgcgacggcaccggtgtcctggaaaatgttgatgctattttggtgcctggcggttttggcgaacgcggtgtggaaggtaaaatccgtaccgtacagtacgcccgcgagaataaagtgccttacctgggtatctgtctgggtatgcaggtagcggtgattgaatacgcccgcaacatggctggtctgacagacgctcacagcaccgaattccgtccccacagccccgaaccggtcgttggcttgatcaccgaatggctggatgccagtggtgagcgtgaagagcgtaccggtgactccgaccttggcggtaccatgcgcttggggggccaggattgcgtgctggccgagggttccaatattgctaactgctacggacgcaaaaccattcgcgagcgtcatcgtcaccgttacgaagtgaacaaccactttctgccgcgcctggaagaagccggtctgaaagtgtcaggtcgttctaccgatggcaaattggtggaagtggtagaagtggaagaccacccctggtttgtggcgtgtcagttccacccggaattcacttctacaccccgcgatggccatccgttgttcaagggttttgtggaagccgccctggcacatcgcaaggagcactga

SEQ ID NO: 31219 - protein, 542 aa, Marinobacter sp. ELB17
MTRYIFVTGGVVSSLGKGIASASLAAILEARGLKVTILKLDPYINVDPGTMSPFQHGEVFVTDDGAETDLDLGHYERFIRTPMTRRNNFTAGRVYEEVIRKERRGDYLGGTVQVIPHITDEIKRRVIEGAAGVDVALVEVGGTVGDIESLPFLEACRQLKVEVGSSRALFMHLTLVPYIATAGEIKTKPTQHSVKEMRSIGLQPDILLCRSDHEVDASSRRKIALFTNVEERAVIPMRDAKSIYVIPRMLHDHGLDQLVIEHFNLDAREADLSEWDNVVESLMNPQHEVTIAMVGKYMELLEAYKSLIESLLHAGIKTRTKVNINYIDSEDIERDGTGVLENVDAILVPGGFGERGVEGKIRTVQYARENKVPYLGICLGMQVAVIEYARNMAGLTDAHSTEFRPHSPEPVVGLITEWLDASGEREERTGDSDLGGTMRLGGQDCVLAEGSNIANCYGRKTIRERHRHRYEVNNHFLPRLEEAGLKVSGRSTDGKLVEVVEVEDHPWFVACQFHPEFTSTPRDGHPLFKGFVEAALAHRKEH

SEQ ID NO: 31220 - DNA, 1602 bp, Bacillus sp. SG-1
  CDS (1)..(1602): transl_table=11
atgacaaagtatatttttgtaacaggcggtgtagtttcctcattaggaaaaggaatcacggctgcatcacttggaagactattaaaaaatcgcgggttgaaagtaacaactcagaaatttgatccatacatcaacgttgacccgggtacaatgagcccatatcagcacggtgaagttttcgtaacagatgatggtgctgaaacagaccttgatttaggacattacgagcgttttatcgatatcaacctgaataaatacagctctgtgacaacagggaaaatctactccactgtattgaaaaaagaacgccgcggggactacttgggcggaacggttcaggttattccacatattacaaatgaaatcaaagaaagagtattccgtgccggtcgtgaaacaaatgcagatatcgtcatcacggaaatcggcggaacagtaggggacatcgaatccctcccattccttgaagccatccgccagattaagaacgatgtcggccgtgacaatgttatgtacatccactgtacacttgtgccttacatcaaagctgccggtgaaatgaaaacaaaaccgacgcaacacagtgtaaaagaactgagaagccttggtatccagccaacggtaatcgttgtgcgtacagaaatgccgatgacgcaggatatgaaagacaaaattgctttgttctgtgacatcgatcagcgtgcggtaatcgaagcgatggatgccgatacattatatgcggtacctctcgctcttcaagaacaaaagcttgatcagttgacatgcgagcatttgaaacttgattgcggcgaagcagatatgacggagtggaatgaacttcttcacagagtgcgcaacctgagcaagaaaacgaaaattgcccttgtcggtaaatatgttgaacttcaagatgcttatatttcagtagtagaagctcttagacatgcaggctataacttcgacgctgatgttgaagtgaaatggctgaactccgaattggtcaatgctgaaaatgttgatgaattgatgagcgacgtggacggtatccttgtcccaggcggattcggcgatcggggagtcgaagggaagattgtcgtaacgaaatatgcgcgtgagaacaaagttcctttccttggcatctgccttggcatgcagctggcgtctgttgaatatgcccgccatgtattaggttatgaaacggcgcactccgctgaattgaaccctgaaacaccttatccaatcattgatttgcttcctgagcaaaaagatgtcgaggaccttggcggaacgctgcgccttggactgtacccatgtaaactcatcccaggtacaaaagcatacgaagcttatgcaggcgaagttgtttacgaacgtcaccgtcaccgttatgagtttaacaatcacttcagagacgaaatggaagcagcaggcttcatcttctctggtacaagccctgacggccgattggttgaaatcgttgagcttgcggaccacccatggtttgtggcatcccaattccatccggagttcacatctcgtccaacccgcccgcagccattattccgtgatttcatcaatgcggctttgaagaatgggaaataa

SEQ ID NO: 31221 - protein, 533 aa, Bacillus sp. SG-1
MTKYIFVTGGVVSSLGKGITAASLGRLLKNRGLKVTTQKFDPYINVDPGTMSPYQHGEVFVTDDGAETDLDLGHYERFIDINLNKYSSVTTGKIYSTVLKKERRGDYLGGTVQVIPHITNEIKERVFRAGRETNADIVITEIGGTVGDIESLPFLEAIRQIKNDVGRDNVMYIHCTLVPYIKAAGEMKTKPTQHSVKELRSLGIQPTVIVVRTEMPMTQDMKDKIALFCDIDQRAVIEAMDADTLYAVPLALQEQKLDQLTCEHLKLDCGEADMTEWNELLHRVRNLSKKTKIALVGKYVELQDAYISVVEALRHAGYNFDADVEVKWLNSELVNAENVDELMSDVDGILVPGGFGDRGVEGKIVVTKYARENKVPFLGICLGMQLASVEYARHVLGYETAHSAELNPETPYPIIDLLPEQKDVEDLGGTLRLGLYPCKLIPGTKAYEAYAGEVVYERHRHRYEFNNHFRDEMEAAGFIFSGTSPDGRLVEIVELADHPWFVASQFHPEFTSRPTRPQPLFRDFINAALKNGK

SEQ ID NO: 31222 - DNA, 1635 bp, Erythrobacter sp. SD-21
  CDS (1)..(1635): transl_table=11
atggcgcggtatattttcatcaccggcggcgtggtctcctcgcttggcaaaggtctcatggcagcatcgcttgctgccctcctccaggcgcgtggctacaaggtccgcattcgtaagttcgacccctacctcaatgtcgatccgggcacgatgtccccgtatcagcacggcgaggtctatgtgaccgacgacggggcggaaaccgacctcgacctcggccattacgagcgcttcacaggtgtctcggcgcaccagggcgacaacatcaccagcggccgcgtctaccagcagatcatcgccaaggaacgccgcggcgactatctcggcgcgacggtgcaggtggttccgcacgtcaccgacgcgatcaaggaattcgcgctcgccggccaggacgatcacgatttcatcctgtgcgaaatcggcggcacggtgggcgacatcgaaagcctccccttcatggaagcgatccgccagctcaggaacgaactagagccgatgcaatcgctcagtgtccacgtgacactggtgccttacatcgcggctgcgggcgagctgaagaccaagccgacccagcactcggtccgcgaactggccagcctcggcatcaaacccgacgtgctgctgtgccgcgccgagcaccccattcccgatggcgagcgccagaagatcgccaacttctgcaacgtgcgcatggaagccgtcatccccgcgctcgacgcgccctcgatttattcggtgccgctgcagtaccacgccgaaggtctcgacaccgaggtcctgcgcggtttcggcatcgccgatgcgcccaagccggacctctcgcgctggtacgatgtggtggaccgccactcgaaccccgaaggcgaagtgaccatcggcgttgtcggcaagtatgtcggcctgcaggacgcatacaagtcgctcaacgaagcgctcgtccacggcggcatggcgcatcgcgtcaaggtcaacatcaagtggatcgacgccgaggtgttcgagcagagcagtgcggatatcgccgcccagctcgaaccgatgcacggcatcctcgtccccggcggtttcggcgagcgcggcagcgagggcaagatcgcgagcgtccgcttcgcgcgcgagcgcaaggtaccgttcctcggcatctgtctcggcatgcagatggcctgcgtcgaaggcgcgcgcaacgccggtttcggaaaggcgagctcgaccgagttcggcagtaccgaggaaccggtggtcggcatcatcaccgaatggatgaccgaagaaggcctccagacccgcgaagcgggtggggatcttggtggaaccatgcgcctcggcgcctatgatgcgaagctcgcggcaaacagccacgtctcgtcgatctacggcggccagaccgacatttccgaacgccatcgtcaccgctacgaggtgaacggcaagtatatcgagcagctcgagaagcagggcctgattttctccggcatgtcgcccgatggcttgctgccggaaatcgtcgagcgccccgaccatccgtggttcgtcggtgtccagttccaccccgaactgaagtccaaaccattcgacccgcaccccctgtttgccggctttattggagcggcactcgaacaggcacgccttgtctga

SEQ ID NO: 31223 - protein, 544 aa, Erythrobacter sp. SD-21
MARYIFITGGVVSSLGKGLMAASLAALLQARGYKVRIRKFDPYLNVDPGTMSPYQHGEVYVTDDGAETDLDLGHYERFTGVSAHQGDNITSGRVYQQIIAKERRGDYLGATVQVVPHVTDAIKEFALAGQDDHDFILCEIGGTVGDIESLPFMEAIRQLRNELEPMQSLSVHVTLVPYIAAAGELKTKPTQHSVRELASLGIKPDVLLCRAEHPIPDGERQKIANFCNVRMEAVIPALDAPSIYSVPLQYHAEGLDTEVLRGFGIADAPKPDLSRWYDVVDRHSNPEGEVTIGVVGKYVGLQDAYKSLNEALVHGGMAHRVKVNIKWIDAEVFEQSSADIAAQLEPMHGILVPGGFGERGSEGKIASVRFARERKVPFLGICLGMQMACVEGARNAGFGKASSTEFGSTEEPVVGIITEWMTEEGLQTREAGGDLGGTMRLGAYDAKLAANSHVSSIYGGQTDISERHRHRYEVNGKYIEQLEKQGLIFSGMSPDGLLPEIVERPDHPWFVGVQFHPELKSKPFDPHPLFAGFIGAALEQARLV

SEQ ID NO: 31224 - DNA, 1611 bp, unidentified eubacterium SCB49
  CDS (1)..(1611): transl_table=11
atgactactacaaaatatatcttcgttacgggaggagtttcatcatcattaggaaaaggaattatcgcagcatctttagctaagttactacaagctagagggtaccgtgtaacgattcaaaaattagatccatacataaacgttgatccagggacacttaatccttatgagcatggagaatgctatgtaacggatgatggtgcagaaacagatctagatttaggtcactatgagcgttttttaaacacacctacctctcaagctaataatgttacaacgggaagaatttatcaaagcgttatcgaaaaagaacgtcgtggtgaatttttaggtaaaacagttcaggttgttcctcatattacaaacgaaattaaagaacgtatccagattttaggtaagagcggtgattatgatatcgtgattacagaaataggaggtacagtaggtgatatagaatcgttaccttatatagaatctgttagacaattaaagtgggagctaggtgatgataatgcattagtgattcatttaacacttataccttatttatctgcggcaggtgagttaaagacaaaaccaacacagcattctgtaaaaactttaatggaaagtggtatcaaagcagatatacttgtttgcagaactgagcatgaactaagtcaagatttgaaaaataaattggcacttttctgcaatgttcagaaagaagccgttattcaatctattgatgcgtctacaatttatgatgttcctaatttaatgttagaagaaggtctagatgtagtaaccttacataaattaaagttattaaacaccgttgagcctaaccttaaagaatggaacgagtttttagatagacataaaaatccaaaggcagaagttactattggtttagtaggtaaatatgttgagcttcaagatagttataagtctatattagaggcttttactcacgcaggagcagaaaatgaaatgaaagtaaatgtacgctctattcatagtgagcatataaatgccgctaacatttcagaagaattaaaaggactaaatgcccttcttgttgcacctggttttggagagcgcggaattgaaggtaaaattgaagcagtgcgttatgcacgtgaaaataacttaccatttttaggaatttgtctaggtatgcagatggctgtaattgagtattctagaaatgtacttggattaaaagatgcaaatagtatcgagatggatcctgacacatcaaaccctgtaattaacttgatggaagatcaaaaaaatattacagaaatgggtggaactatgcgtttaggttcatggaaatgtgacctgattaaggatagtaaagtatatgatgtgtatggttctggaactattgatgagcgtcatagacatcgttatgagtataataataaatacaaagaagcacttgaagaagctggtttagcgactacaggtgtaaacccaaaaacaggacttgttgagatagtagaaattccgacacatccattttttgtgggagtacaataccatccagaatataaaagtacggttgtaaatccacatcctttatttgttgcttttgtgaaagcggcatacgagcagtcaaaataa

SEQ ID NO: 31225 - protein, 536 aa, unidentified eubacterium SCB49
MTTTKYIFVTGGVSSSLGKGIIAASLAKLLQARGYRVTIQKLDPYINVDPGTLNPYEHGECYVTDDGAETDLDLGHYERFLNTPTSQANNVTTGRIYQSVIEKERRGEFLGKTVQVVPHITNEIKERIQILGKSGDYDIVITEIGGTVGDIESLPYIESVRQLKWELGDDNALVIHLTLIPYLSAAGELKTKPTQHSVKTLMESGIKADILVCRTEHELSQDLKNKLALFCNVQKEAVIQSIDASTIYDVPNLMLEEGLDVVTLHKLKLLNTVEPNLKEWNEFLDRHKNPKAEVTIGLVGKYVELQDSYKSILEAFTHAGAENEMKVNVRSIHSEHINAANISEELKGLNALLVAPGFGERGIEGKIEAVRYARENNLPFLGICLGMQMAVIEYSRNVLGLKDANSIEMDPDTSNPVINLMEDQKNITEMGGTMRLGSWKCDLIKDSKVYDVYGSGTIDERHRHRYEYNNKYKEALEEAGLATTGVNPKTGLVEIVEIPTHPFFVGVQYHPEYKSTVVNPHPLFVAFVKAAYEQSK

SEQ ID NO: 31226 - DNA, 1818 bp, Medicago truncatula
  CDS (1)..(1818)
atgaagtatgttttggtgactggtggtgttgtgagtggacttggaaaaggagttactgctagcagtattggacttcttcttcaagcatgtggtcttcgagttacttctatcaagattgatccctacctgaacactgatgcggggacaatgtctccttttgaacatggagaagtgtatgtcctagatgatggtggtgaggttgaccttgatcttggaaactatgaacgtttcttggacatcaaattgacccgcgacaataacatcactactggaaaaatttatcagtctgttattgagaaggagagaagaggagattatcttggaaagactgttcaggttgttccacacataacagatgccatccaagagtggatagagcgtgtagcacagattccggttgatggtaaagaagggcctgccgatgtttgtgtcatcgaattgggtggaactataggggatattgagtctatgccttttattgaagcacttggtcaattttcttaccgcgtaggccctggaaacttttgtttggttcatgtcagccttgttcctattctcaacgttgttggcgaacagaaaacaaagccaactcagcacagtgttcgccaactcagaggattaggtttattccccaatcttcttgcttgtcgctgttcaaaggaacttgacgacaatgctaaggcaaaacttgctcaattttgtcatgtgccgttatcaaacgtacttactctccatgatgttccaaatatttggcacattcccttgctattgaaagaccagaaggcgcatgagtcgatcctgaaagcattaaacctgccaggtgttgctacaaagcctaatttgaaggagtggactgttaggacaaagaattatgacaagtgtcatgaaactgttagaattgctatggtgggaaaatataccggtctttcagatgcatatctttctgttcttaaggcacttttgcatgcttctgttgctcacaatcgtaaacttattgtggactgggttccagctggggatcttgaagatgttacctatggcgaggatccaaatgcttatagagctgcttggagtcttttgaagggtgcaaatggagttctagttccaggtggttttggtgacagaggagtgcaagggaaaattcttgctgctaagtatgctcgagaacataatgttccatatctcggcatttgcttgggaatgcaaattgctgttattgagtttgcacgatctgttctcgatctccatgacgctactagtacagaattcgatcctgaagccaagaccccttgtgtcatatttatgccagaaggttcaaagacacatatgggcggaactatgcgtcttggttcaaggacaacttatttccaagttgatgactgcaaatctgcaaaattgtatggtaatgcaagctctgttgatgagcgacatcggcatagatatgaggtaaatcctgacatggtatctcagctagagagtgccggtctatcttttgttggtaaagatgaaaccgggagtcgcatggagattgttgaactgcctagccatccattttttattggcgttcagtttcaccctgagttcaagtccagaccagggaaaccttctcccctcttctcaggattaatagaagcagcttgtgagccaaagaggccagtgctgagtaacggccacgccaagttaactaatggaatatataatggacactcaccaatcctgaaagcacaccaaaatggaaacggtttcatatcatccaatggatccctaaacggcgtgtttaccaatggcaacggagtgtatgtggatggtagttgttag

SEQ ID NO: 31227 - protein, 605 aa, Medicago truncatula
MKYVLVTGGVVSGLGKGVTASSIGLLLQACGLRVTSIKIDPYLNTDAGTMSPFEHGEVYVLDDGGEVDLDLGNYERFLDIKLTRDNNITTGKIYQSVIEKERRGDYLGKTVQVVPHITDAIQEWIERVAQIPVDGKEGPADVCVIELGGTIGDIESMPFIEALGQFSYRVGPGNFCLVHVSLVPILNVVGEQKTKPTQHSVRQLRGLGLFPNLLACRCSKELDDNAKAKLAQFCHVPLSNVLTLHDVPNIWHIPLLLKDQKAHESILKALNLPGVATKPNLKEWTVRTKNYDKCHETVRIAMVGKYTGLSDAYLSVLKALLHASVAHNRKLIVDWVPAGDLEDVTYGEDPNAYRAAWSLLKGANGVLVPGGFGDRGVQGKILAAKYAREHNVPYLGICLGMQIAVIEFARSVLDLHDATSTEFDPEAKTPCVIFMPEGSKTHMGGTMRLGSRTTYFQVDDCKSAKLYGNASSVDERHRHRYEVNPDMVSQLESAGLSFVGKDETGSRMEIVELPSHPFFIGVQFHPEFKSRPGKPSPLFSGLIEAACEPKRPVLSNGHAKLTNGIYNGHSPILKAHQNGNGFISSNGSLNGVFTNGNGVYVDGSC

SEQ ID NO: 31228 - DNA, 1671 bp, Herbaspirillum seropedicae
  CDS (1)..(1671): transl_table=11
atgaccaagtttgtatttgtcactggcggcgtcgtgtcttccctcggtaaagggattgccgccgcgtccctggctgcgatcctcgaatcgcgcggcctcaaagtcaccctcctcaagctcgacccctacatcaacgtcgaccccggcacgatgagcccgttgcagcacggtgaagtgttcgtcaccgacgacggcgccgagaccgacctcgacctgggtcactacgagcgcttcatctcggccaagatgaagaaggtgaacaacttcaccaccggccaggtgtatgaatcggtgatccgcaaggaacgccgtggcgaatacctgggcaagaccgtccaggtgatcccgcacatcaccaacgagatccaggaattcatccatcgcggcgccgaaggcttcgaggtcgcgctggtggaaatcggcggcaccgtcggcgacatcgagtcgctgcccttcctggaagcggcgcgtcagctgagcctgcgttcgggccgcaacgccaccgccttcgtgcacctgaccctggttcccttcctggcctcggccggcgaactcaagaccaagcccacccagcacagcgtgcaaaagctgcgcgagatcggcatcttgcccgacgcgctgctgtgccgcgccgaccgccgcatccccgacgacgaacgcgacaagatctcgctgttctccaacgtcgcggctgacgccgtcatctcggtgtgggacgccgacagcatctacaagatcccgcagatgctgcacgaccagggcctggacaccatcatctgcgaaaagctgggcctctcgcccaagccggccgacctgtccatttgggataagctgatcgatgcgcagaacaatccctcgcacgaagtcaccatcggcatggtcggcaagtatgtcgacctgaccgagtcctacaagtcgctgaccgaagcgctgcgccacgccggtatccataccggcagccgcgtcaatatcgagtacctggattcggaagagatcgaagccaacggcaccgacagcctggacaagtacgacgccatcctggtgcctggcggcttcggcaagcgcggcgtggaaggcaagattgccgccgcccgctatgcccgtgagaacaaggttccctacctgggcatctgcctgggcatgcaagtggcgctgctggaatatgcgcgcaacaaggccggcctgtccaaggccaattcgaccgagttcgatcccgacaccgagcaaccggtggtggccctgatcgacgaatggcaaaaccatgacggcaaggtcgagcgccgcgacgccaactcggacctgggcggcaccatgcgcctgggcgcgcagacctgcgcggtcaagccgggcaccctcgccgccgagatctacggcgacagcgtcaccgaacgtcaccgtcatcgttatgaagccaacaacttctacctgagccgcgtggaagaggctggcatggtggtctcggcccgcaccccgaccgaagacctgtgcgagatcatggaactgccgcgcaccggcgagaacgctcacccgttctatatcggcgtgcagtaccaccccgagttcaagtccacgccgcgtgacggccacccgctgttcatttcctacatccgtgcagccctggcgcatcacgcccaggcgcagcaggatgccgctgcaaagggcaaagcatga

SEQ ID NO: 31229 - protein, 556 aa, Herbaspirillum seropedicae
MTKFVFVTGGVVSSLGKGIAAASLAAILESRGLKVTLLKLDPYINVDPGTMSPLQHGEVFVTDDGAETDLDLGHYERFISAKMKKVNNFTTGQVYESVIRKERRGEYLGKTVQVIPHITNEIQEFIHRGAEGFEVALVEIGGTVGDIESLPFLEAARQLSLRSGRNATAFVHLTLVPFLASAGELKTKPTQHSVQKLREIGILPDALLCRADRRIPDDERDKISLFSNVAADAVISVWDADSIYKIPQMLHDQGLDTIICEKLGLSPKPADLSIWDKLIDAQNNPSHEVTIGMVGKYVDLTESYKSLTEALRHAGIHTGSRVNIEYLDSEEIEANGTDSLDKYDAILVPGGFGKRGVEGKIAAARYARENKVPYLGICLGMQVALLEYARNKAGLSKANSTEFDPDTEQPVVALIDEWQNHDGKVERRDANSDLGGTMRLGAQTCAVKPGTLAAEIYGDSVTERHRHRYEANNFYLSRVEEAGMVVSARTPTEDLCEIMELPRTGENAHPFYIGVQYHPEFKSTPRDGHPLFISYIRAALAHHAQAQQDAAAKGKA

SEQ ID NO: 31230 - DNA, 1626 bp, Magnetospirillum gryphiswaldense
  CDS (1)..(1626): transl_table=11
atgacgcgtttcatctttatcactggcggcgtcgtgtcgtccttgggcaagggcttggcttcggctgccctgggtgcctgtttgcaggctcgtgggttcaaggtgcgcctgcgcaagcttgatccctatctcaacgtcgatcccggcaccatgagcccctatcagcacggcgaggtctacgtcaccgacgacggggccgagaccgatcttgatctgggccattacgagcgtttcaccggggtggcgtcgcgcaagagcgacaacatcaccaccggtcgcatctattccgacgtcatcgcccgcgaacgtcgcggcgattatctgggtgccaccgtccaggtcattccgcacgttaccaacgccatcaaggaattcgtcaagtcggacgtcaccgacgaggatttcatcctgtgtgaaatcggcggcacggtgggcgacatcgaatcgctgcccttcctggaagccatccgtcagttggccaatgaactggggcgcgaagccaccatgttcatccacttgacgctgctgccttatattccgtcggcgggcgagttgaagaccaagccgacccagcattcggtcaaggaattgctgagcgtcggcatccagcccgatctgttgatgtgccggtccgaccgcgacatccccgaaggcgagcgccggaagatcgccctgttctgcaacgtccgcggcgaagccgtcatcccggcccttgacgtcgacaccatctatcaggtgccgatcagctaccacgagcagggcttggacgagcaggtgtgccgccatttcggcatcgagtcgaaggaacccaacctcgaccgttgggtcaacatcgtcgagcgcgtgcgccagccggaaggcgaggtgaccatcgccgtcgtcggcaagtacaccagcctgctcgacagctacaagtcgctggccgaggccttgacccatggcggcatcgccaacaatgtgcgcgtgcgcctgaactggatcgacagccagattttcgaacgcgaagacgcggtgcagcatctggaaccctgccacggcatcctggtgcccggcggtttcggcgagcgcggcgccttgggcaaggtcgaggcggtgaaattcgcccgcgaacgtcgggtgccctatttcggcatctgcttcggcatgcagatggcggtgatcgaaaccgcccgcaatctggccggcttggccaaggccagttcgaccgagttcggcccttgcgaggaaccggtggtcggtctgatgaccgaatggctgaagggcaacgccctggaaaagcgcaatgcatccggcgatctgggcggcacgctgcgtctgggcgcctatgattgcgacctcaaggccggttcacgcgtgcgtgagatttatggatccgaccgtatttccgagcgccatcgccatcgctatgaagtcaacatggattaccgcgagaagctggaagccgccggcctgaccttctcgggcctgtcgcccgacggcgtgctgccggaaatcgtcgaatacagcgaccatccgtggttcatcggtgtacaattccaccccgagctgaagtccaagcccttcgatccccatccgctgttcaccagcttcatcgaagcggcggtgcggcaatcgcgattggtgtaa

SEQ ID NO: 31231 - protein, 541 aa, Magnetospirillum gryphiswaldense
MTRFIFITGGVVSSLGKGLASAALGACLQARGFKVRLRKLDPYLNVDPGTMSPYQHGEVYVTDDGAETDLDLGHYERFTGVASRKSDNITTGRIYSDVIARERRGDYLGATVQVIPHVTNAIKEFVKSDVTDEDFILCEIGGTVGDIESLPFLEAIRQLANELGREATMFIHLTLLPYIPSAGELKTKPTQHSVKELLSVGIQPDLLMCRSDRDIPEGERRKIALFCNVRGEAVIPALDVDTIYQVPISYHEQGLDEQVCRHFGIESKEPNLDRWVNIVERVRQPEGEVTIAVVGKYTSLLDSYKSLAEALTHGGIANNVRVRLNWIDSQIFEREDAVQHLEPCHGILVPGGFGERGALGKVEAVKFARERRVPYFGICFGMQMAVIETARNLAGLAKASSTEFGPCEEPVVGLMTEWLKGNALEKRNASGDLGGTLRLGAYDCDLKAGSRVREIYGSDRISERHRHRYEVNMDYREKLEAAGLTFSGLSPDGVLPEIVEYSDHPWFIGVQFHPELKSKPFDPHPLFTSFIEAAVRQSRLV

SEQ ID NO: 31232 - DNA, 1677 bp, Vitis vinifera
  CDS (1)..(1677)
atgaagtacgtgttggtgacgggaggagtcgtcagtggactcggcaaaggagtgacggcgagcagtgtaggcgtcgttctcaaagcttgtggccttcgcgttacttccattaaaatagatccttacttgaacagggatgctggtacaatgtccccgtttgaacatggggaggtttttgttcttgatgatggtggagaggttgatttagacttgggtaactatgagaggttcctggatgtgactcttacaaaagataacaacattaccacaggaaaaatatatcagtctgtccttgagaaagaacgaagaggagattatcttggaaagactgtccaggtggttccacatgtgacagatgccattaagaattggattgaatcagtctctgtcattcctgtggatggaaaagagggaccagcagatgtgtgtgtgatagagttgggagggactgttggtgacattgaatcaatgccattcatcgaggctttgcgacaattattattttcagtcggacaagataacttttgcctcattcatgtgagccttatacctgtactgggtgttgtgggagagcaaaaaacaaagcctacacaacatagcgtgcgggaattgagagcattaggcctgactcctcatctgttggcatgtcgttctgctcagcctttattggaaactacaaaggagaaactttcacagttttgccatgttccagttggtaacattctcaatatccatgatgttccaaacatttggcatgttcctcttttgcttcggaaccaaaatgctcataattccattctaaaacagctaaatcttagcaaggctacacctcctgatttacaagaatggacgaagagggcagagaattttgatagtctcacaaattctgtgagaattgcaatggttgggaagtatgttggtctgacagattcatatctgtctgttgtgaaggcccttctgcatgcttgcattgcatgttctttgaagccatcagtggactggattgcagcttctgatcttgaagatgatagtgcaacaccagaagctcatgctactgcatggaagactctaaggaatgcagcatgtgtcctggttccaggaggctttggtgatcgtggtgtgaaaggaatgatattggctgcaaagtatgccagagagaataatgttccttatcttgggatttgcttgggcatgcagatttctgtgattgagtttgctagatctgttttgggcatggaaagggccaatagtgaagagtttgacacccagacacctgatcgtgttgtaatgttcatgccagagggttcaacaacgcatatgggaagcaccatgagactaggatctcgaagaacactgttccagactcctgattgtattactgcaaaactgtaccataattcagagtacgtggatgagcggcatcgacatagatatgaggtgaacccacatatggttggtgttctagaagaaggtggcctgaagtttgtagggaaagatgaaagtggacaaagaatggagattttagagcttcccagtcatccattctatgtgggcgtgcaatttcatccagaatttaagtcacggcctgggaggccgtcagctctctttctaggttttatattggctgcaattgggcagttggaagcatatcttagccagcatcagaatggcagttaa

SEQ ID NO: 31233 - protein, 558 aa, Vitis vinifera
MKYVLVTGGVVSGLGKGVTASSVGVVLKACGLRVTSIKIDPYLNRDAGTMSPFEHGEVFVLDDGGEVDLDLGNYERFLDVTLTKDNNITTGKIYQSVLEKERRGDYLGKTVQVVPHVTDAIKNWIESVSVIPVDGKEGPADVCVIELGGTVGDIESMPFIEALRQLLFSVGQDNFCLIHVSLIPVLGVVGEQKTKPTQHSVRELRALGLTPHLLACRSAQPLLETTKEKLSQFCHVPVGNILNIHDVPNIWHVPLLLRNQNAHNSILKQLNLSKATPPDLQEWTKRAENFDSLTNSVRIAMVGKYVGLTDSYLSVVKALLHACIACSLKPSVDWIAASDLEDDSATPEAHATAWKTLRNAACVLVPGGFGDRGVKGMILAAKYARENNVPYLGICLGMQISVIEFARSVLGMERANSEEFDTQTPDRVVMFMPEGSTTHMGSTMRLGSRRTLFQTPDCITAKLYHNSEYVDERHRHRYEVNPHMVGVLEEGGLKFVGKDESGQRMEILELPSHPFYVGVQFHPEFKSRPGRPSALFLGFILAAIGQLEAYLSQHQNGS

SEQ ID NO: 31234 - DNA, 1620 bp, Arabidopsis thaliana
  CDS (1)..(1620)
atgaagtacgtattggtgactggaggagtggtgagtgggcttggcaaaggcgttacggcgagtagtatcggcgtggtgcttaaagcttgtggccttggagttacctccattaaaattgatccatatctgaacactgatgctggtacaatgtccccttttgagcatggagaggtttttgtactcgatgatggtggagaggttgatcttgatttgggaaactacgaaagatttctcgatgtgacactaaccaaagacaacaacataaccactgggaagatatatcagtctgttcttgacaaggaacggaaaggcgactaccttgggaagactgttcaggttgttccacacattactgatgcaatcaaggattggattgagtcagtctctctgattcctgtggatggaaaggaaggccaagctgatgtttgtgttattgagttgggagggactgttggtgacatcgagtcaatgccttttatcgaggccttgagacaattgtcattctctgttggaccggataatttctgcctgattcacgtgagcttgattcccgttcttggtgttgttggggagcagaaaacaaagccaacccaacacactgtccgagaactaagagctttgggattgactcctcactttttggcatgtcgctctgctcagccactgctggaaagtaccaaggctaaattgtctcagttctgtcatgtggcggcagctaatattctcaatatccatgatgttccaaacatttggcatgttcctctcctactccgttgtaacaccaagttcaataaactcatctctttcagcgttgcgacagcacctgatctggatagctggaataagatggctgaaacttttgataacttgacaaatcatgtccaaattgctatggttggaaagtacattggtctaacggattcttatctctcggttgtgaaggcccttcttcatgcctgcattgcatgttcattgaagccacatatcgaatggatcgcagcttcagatcttgaagacgaaagtgagaaatcgactccggaggcgcatgctgctgcttggaagatcttgaagagcgcagaatgcattctggttcctggtggttttggagatcgtggtgtgagtggaatggttttagcagccaaatacgctagagagaacaaaattccttatcttgggatctgcttggggatgcaaattgcagtaattgagtttgcaagatctgttttgggtttggaaagagcaaatagcactgagttcgatgctcagacatctgaccctgttgttatatttatgccagaaggctcaagaacacatatgggaagcacaatgagacttggatcccgaagaacacatttacacaaccgagactctctcacttcaaaactatacggccaagtttcttatgtagacgaaaggcataggcaccgttacgaggtgaatccagaagtagctcaagcacttgaagaagctggtttaagatttgtgggtaaagatgatacagggaaacgtgttgaggtgattgagtttcaagatcatccattctatgttggagttcagtttcatccagaatttaagtcaagacccactagaccttctcctctgtttttaggcaagtcttga

SEQ ID NO: 31235 - protein, 539 aa, Arabidopsis thaliana
MKYVLVTGGVVSGLGKGVTASSIGVVLKACGLGVTSIKIDPYLNTDAGTMSPFEHGEVFVLDDGGEVDLDLGNYERFLDVTLTKDNNITTGKIYQSVLDKERKGDYLGKTVQVVPHITDAIKDWIESVSLIPVDGKEGQADVCVIELGGTVGDIESMPFIEALRQLSFSVGPDNFCLIHVSLIPVLGVVGEQKTKPTQHTVRELRALGLTPHFLACRSAQPLLESTKAKLSQFCHVAAANILNIHDVPNIWHVPLLLRCNTKFNKLISFSVATAPDLDSWNKMAETFDNLTNHVQIAMVGKYIGLTDSYLSVVKALLHACIACSLKPHIEWIAASDLEDESEKSTPEAHAAAWKILKSAECILVPGGFGDRGVSGMVLAAKYARENKIPYLGICLGMQIAVIEFARSVLGLERANSTEFDAQTSDPVVIFMPEGSRTHMGSTMRLGSRRTHLHNRDSLTSKLYGQVSYVDERHRHRYEVNPEVAQALEEAGLRFVGKDDTGKRVEVIEFQDHPFYVGVQFHPEFKSRPTRPSPLFLGKS

SEQ ID NO: 31236 - DNA, 1662 bp, Arabidopsis thaliana
  CDS (1)..(1662)
atgaagtatgtggttgtttcaggaggagtagtgagtggactcggcaaaggagtcacggcaagtagcatcggactcatcctcaaatcctgtggcttccgagtcaccgccattaaaatcgatccttacttaaacattgatgctgggaccatgtcacctattgaacatggtgaagtttacgtcttggatgatggtggcgaggttgatctggatcttgggaactatgagaggttcatggatattaagctgactagtgaaaacaacataactactggaaaagtttataagcatgtgcttgagaaagagaggagaggagattatcttgggaagactgttcaggttgttcctcatattactgatgctattcaaaaatggattgagcgtgcagctaggattccagtggatggacagtcaggtccagctgatgtttgtgtcatagaacttggaggaactataggagatatagagtccatgccttttattgaagctcttgggcagttctcatatcgcgtgggcactgacaatttttgcttgatccatgtcagtcttgtgcctgtattgaatgttaagactaaaccaactcaacatagcgttagagacttaagaggccttggcttgagccctaatatcttggcttgccggagcacaaagccacttgaagataatgtgaaggccaaactctctcagttttgccatgtcccgatggaaaacgttgtcactctctacgattgtcccaacatttggcacataccattgcttctcaaagtgagtaactttctcatccaccatagtttcaaagtttcagagcctgcattagaggaatggtctttgatggctaaaatgaccgacaaattgcatgttccggtaagaattgctgtggttgggaaatacactgagctcttggattcgtatctttccattcacaaggctctcttgcacgcttctgtggctaggcgcaagaaacttatcatagattggatttcagctagtgatcttgagcaaggtgcaaaaaaggagaatccggatgcatataaggccgcctggaagttactcaagggtgctgatggcgttcttgtgccgggaggttttggcagtagaggtgtagaaggaaagatgctggcagcgaaatacgccagagaaaacagaattccataccttggtatctgtctaggtatgcaactcgctgtgatcgagtatgcaagaaccatactcggtttggcagatgcaaatagcactgaacttgatcccaacaccaaaaacccctgtgttattttcatgcctgaggggtcgaaaacgcatatgggaggcactatgaggttaggctcaagaagaacttattttcattctaaggactccaaatcagcaagactatatgggaacaaaagttttgtagatgaaagacaccgacacagatatgaggtgaatccagccatggttccacgttttgagagctctggactcacattcacaggaaaagacgagacagggcagcgaatggagatcattgaactgcctaaccatccgttttacgtcggagctcagttccatcccgagtacaaatcaagacccggaaaaccatctcctctgtttctaggtgaagagaaacataaaaataatgcaaaagccctcggtttctttcttcgtgtaagcacataccttaactaa

SEQ ID NO: 31237 - protein, 553 aa, Arabidopsis thaliana
MKYVVVSGGVVSGLGKGVTASSIGLILKSCGFRVTAIKIDPYLNIDAGTMSPIEHGEVYVLDDGGEVDLDLGNYERFMDIKLTSENNITTGKVYKHVLEKERRGDYLGKTVQVVPHITDAIQKWIERAARIPVDGQSGPADVCVIELGGTIGDIESMPFIEALGQFSYRVGTDNFCLIHVSLVPVLNVKTKPTQHSVRDLRGLGLSPNILACRSTKPLEDNVKAKLSQFCHVPMENVVTLYDCPNIWHIPLLLKVSNFLIHHSFKVSEPALEEWSLMAKMTDKLHVPVRIAVVGKYTELLDSYLSIHKALLHASVARRKKLIIDWISASDLEQGAKKENPDAYKAAWKLLKGADGVLVPGGFGSRGVEGKMLAAKYARENRIPYLGICLGMQLAVIEYARTILGLADANSTELDPNTKNPCVIFMPEGSKTHMGGTMRLGSRRTYFHSKDSKSARLYGNKSFVDERHRHRYEVNPAMVPRFESSGLTFTGKDETGQRMEIIELPNHPFYVGAQFHPEYKSRPGKPSPLFLGEEKHKNNAKALGFFLRVSTYLN

SEQ ID NO: 31238 - DNA, 1596 bp, Spiroplasma citri
  CDS (1)..(1596): transl_table=4
atggcaaaatatatttttgtaactggtggagttgttagtggtttagggaaagggattacagcttcttcaattggtgttttattaaaagcaagtgggttaaatgtttttatgcaaaaatttgatccatatttaaatgttgatcctggaacaatgagcccttatcaacatggtgaagtttttgtaacaacagatggtgcagaaacagatttagatttaggacattatgaacgttttattgatgaaaatttaactaaagaatcaaatattacttcaggacgaatatataaaaatgtaattgaaaaagaacgtcgtggcgaatatgatggtggaacagttcaagttgttccacatgttacaaatgaaattaaaaagaaagtttatcatgctgcatcaacttcaaaagcagatattattattactgaaattggggggacagttggagatattgaatcgttaccttttattgaagcaattcgtcaagttcgaatggaacaaggacgagaaaatgttatttatatgcatgtttccttagttccatatattgcagcatcaaaagaatcaaagacaaagccaacccaacattcagtccgagaactattatcactggggattcaaccagatattgttgttgcccgcactgaacaagctctagatgataacgtccttgaaaaaattgctctattttgtaatatcgaaaaaagtaatgttttagtagctactgatgttgctagtatttatgaagtaccattaaaaatgtatgaacaaaatgctcaaatagtaattagtaagttattaaatttaaaaatcactaaaactgatatgtcagaatgaaaacggtttgttgaaaaaattaatcagtctcaacaagtaattgaaattaaattagttggaaaatatattgaacttccagatgcttatttatcagttagtgaatcgttgcgaattgctggatatgaaaataaggttaaaattaaaattgattgaattaaagcagaagatattaataaaaaaaattatcaacaattattaaaaaatgccaaaggcattttagttcctggtggctttggtgaacgtggttttgaagggaaaattttagcatgccaatttgctcgtgaaaataacattccgttttttggaatttgttttggaatgcaagcagctgtaattgaatttgcccgtaatgtttgtcatattcaagatgctaattcttcagaattaacagaaacaaaaaatgcaattattgacattattcgtggaaaagataaaactgatgctttaggaggaacattacgcttaggtaattataaaacaacttttgttccaaacacattagcccataaattatatggcaaaaatgaggctttagaacgtcatcgtcatcgctatgaagttaataatgattatcgtgaacaattagcgcaagcagggctagtatttagtggcctttatgttgagaaaaacttagtagaagtcattgaaatccccaaataccctttttaccttgctgctcaatatcatcccgaatttacttctcgcccaaataaaccgaatccattatttaatggttttgtgcaagcagtaattaaaaataaataa

SEQ ID NO: 31239 - protein, 531 aa, Spiroplasma citri
MAKYIFVTGGVVSGLGKGITASSIGVLLKASGLNVFMQKFDPYLNVDPGTMSPYQHGEVFVTTDGAETDLDLGHYERFIDENLTKESNITSGRIYKNVIEKERRGEYDGGTVQVVPHVTNEIKKKVYHAASTSKADIIITEIGGTVGDIESLPFIEAIRQVRMEQGRENVIYMHVSLVPYIAASKESKTKPTQHSVRELLSLGIQPDIVVARTEQALDDNVLEKIALFCNIEKSNVLVATDVASIYEVPLKMYEQNAQIVISKLLNLKITKTDMSEWKRFVEKINQSQQVIEIKLVGKYIELPDAYLSVSESLRIAGYENKVKIKIDWIKAEDINKKNYQQLLKNAKGILVPGGFGERGFEGKILACQFARENNIPFFGICFGMQAAVIEFARNVCHIQDANSSELTETKNAIIDIIRGKDKTDALGGTLRLGNYKTTFVPNTLAHKLYGKNEALERHRHRYEVNNDYREQLAQAGLVFSGLYVEKNLVEVIEIPKYPFYLAAQYHPEFTSRPNKPNPLFNGFVQAVIKNK

SEQ ID NO: 31240 - DNA, 1689 bp, Medicago truncatula
  CDS (1)..(1689)
atgaagtacgttctcatctccggcggagtcgttagcggcctcggcaaaggcgtcaccgccagcagcatcggcgtcgtcctcaaagcctgcggcctccgcgtcacttccatcaaaatcgatccgtatttgaacattgacgctggtaccatgtctccgtttgaacatggagaggtttttgttcttgatgatggcggagaggttgatttggatttgggaaattatgagcgttttcttgatgttacacttacaaaggataataatattactactggcaaaatatatcagtctgtgcttgagaaggagcgcaaaggagattatctcggaaaaactgttcaggtggttccgcatatcactgatgcaatcagaaactggattgaatcggttgctgtgatcccggttgatggaaatgaagaccctgctgatgtttgtgtgattgagcttggaggcactgtgggggatattgagtctatgccgtttattgaggctctacggcaattatcctttcaagtggggcctgacaacttctgtctcatccatgttagcctgataccagtgttgggtgtagtgggggaacaaaaaacaaagccgacacaacatagtgtcagggaactaagagcattgggcttgacgcctcatcttttagcaagtcgctctgctgagcctctgctggatagtaccaaggaaaaactctcacagttttgccatgttccagttaacaatattctgaatattcatgatgtaccaaatatttggcatattcccctgttgcttagaaatcaaaatgcccaccattcaattttacagcagcttaacttacttagccgtgctacgcctcctgatttgcggcaatggactgatatggctgagagctatgataaccttactgaatctgttaggattgccatggtgggaaaatatgttggtctaacagattcatatttatctgttgtaaaggccctactgcatgcttgtgttgcacgctcattgagaccatcaattgattggattgctgcttctgaccttgaagatgacagtgcacaatcaacaccagaagcacatgcagcagcatggaagactctgaagagtgcagcttgtgtcttggttcccggaggatttggagatcgtggcgtgagaggtatgatgctagctgccaaatatgccagagagaaccatgttccttacttggggatttgcctgggaatgcaaatttctgtaattgagttcgctagatcagttttgggctgggaaagagcgaacagtatcgagtttgatgcccaaacaccaaatccggttgtaattttcatgccagagggttctaggactcacatgggaagtaccatgagacttggatctcgaagaacactcttacagacacgtgattctatcacttctaaactgtatggcaattcggagtatgtggatgaacggcatcgtcatagatacgaggttaatccagatgttattgaaactttagaagaagctgggctaaaatttgttggcagggatgaaagcggaagacgaatggagatcttagaacatccaagtcatccatattatgtaggtgtgcagtttcatcccgaattcaaatctcgtcctgggagaccatctgctttgtttttaggtctcatattggcggcaacggggaagttggaagcacatataaccagcattcatgagaatggaagctga

SEQ ID NO: 31241 - protein, 562 aa, Medicago truncatula
MKYVLISGGVVSGLGKGVTASSIGVVLKACGLRVTSIKIDPYLNIDAGTMSPFEHGEVFVLDDGGEVDLDLGNYERFLDVTLTKDNNITTGKIYQSVLEKERKGDYLGKTVQVVPHITDAIRNWIESVAVIPVDGNEDPADVCVIELGGTVGDIESMPFIEALRQLSFQVGPDNFCLIHVSLIPVLGVVGEQKTKPTQHSVRELRALGLTPHLLASRSAEPLLDSTKEKLSQFCHVPVNNILNIHDVPNIWHIPLLLRNQNAHHSILQQLNLLSRATPPDLRQWTDMAESYDNLTESVRIAMVGKYVGLTDSYLSVVKALLHACVARSLRPSIDWIAASDLEDDSAQSTPEAHAAAWKTLKSAACVLVPGGFGDRGVRGMMLAAKYARENHVPYLGICLGMQISVIEFARSVLGWERANSIEFDAQTPNPVVIFMPEGSRTHMGSTMRLGSRRTLLQTRDSITSKLYGNSEYVDERHRHRYEVNPDVIETLEEAGLKFVGRDESGRRMEILEHPSHPYYVGVQFHPEFKSRPGRPSALFLGLILAATGKLEAHITSIHENGS

SEQ ID NO: 31242 - DNA, 1836 bp, Oryza sativa subsp
  CDS (1)..(1836)
atgaagtacgtgctggtgaccggcggggtggtgagcgggctcgggaagggcgtcacggcgagcagcatcggcgtcgtcctcaagtcgtgcgggctccgcattacctccatcaagatcgatccttaccttaacacagatgctgggaccatgtccccgttcgaacatggtgaggtttttgtgcttgatgatggtggcgaggtggacttggatcttgggaattacgagaggtttcttgacattaaactaaccagggacaataatataaccacaggaaagatctaccagtccgttcttgaaaaggaaaggaagggggaatacttgggaaagactgttcaggttgtcccgcatatcacaaatgccatacaagagtggattgagcgtgtcgcaatggtacctgtagatggcaaggagggaccagctgatgtttgtgtgatagaacttgggggtactataggggatattgaatctatgccatttatcgaagctttgggccaattctcatatcgtgttggtcctggtaacttttgtttggtgcatgttagtcttgttccagttctgaatgttgttggtgaacagaaaactaagccgactcaacatagtgtccgtggattaaggggtcttgggctcacaccaaatattttagcctgtcgcagtactaaggaactggaagaaaatgtgaaggagaaactctctcagttctgccatgtaccggcagctaacattgtcactctgtatgatgtttccaacatttggcgtattcctttgttgctacgggaccaaaaggcacatgaagccattcttaaagtgctgaaccttgatagctttgctcgggggccaaagttggatgaatgggtcgcaagagctacgttatttgatgcacttcaggatactgtgaggattgctatggttgggaagtatactggtctatctgattcatacctctctgtgttgaaggcactcttgcatgcttctgttgattgccgcaggaagcttcttgttgattgggttgcttctactgatctcgaagactccactgccattgaggcgcctgatgcttataaagcagcatgggatttactgaagggtgccaatggtgttttagtacctggtggctttggagatagaggtattcaagggaagattttggctgccaagtatgcccgtgaaaacaatgtaccatatcttggcatatgccttggaatgcaacttgctgtggttgaatttgctcgaagtgtcatgaatctccctgaagcaaacagcacagaatttgatcccaatgccaagaccccatgtgttatttttatgcctgagggttctaaaacacatatgggtggcacgatgcgcctaggatcaaggaggacatttttcgaggttgctgattgcaagtctgctaaattgtatggcaatgtcagttatgtagatgagaggcatcggcacagatatgaggtgaatccagatatggtgccagagtttgaaaatgctggacttcagtttgttgggaaagatgagactggaaggagaatggagataattgaaatccccaatcaccgatattttgttggtgcacaattccatcctgaattcaagtcaagaccttcaaaaccgtctccactctttgtcggactaattgctgcctcatctgggcaactggatagattgctgcaaggcagctgcaatggccacgtggtttctactaaacattctctgagcaatggtgcttacacatctacagtacaccaaaatgggcacgcaaagaagcttgccaatggaagaaaaaatgttcttgtgctcgatgcggactgtgcgaaggatggtgctcgttcggtgggtttttga

SEQ ID NO: 31243 - protein, 611 aa, Oryza sativa subsp
MKYVLVTGGVVSGLGKGVTASSIGVVLKSCGLRITSIKIDPYLNTDAGTMSPFEHGEVFVLDDGGEVDLDLGNYERFLDIKLTRDNNITTGKIYQSVLEKERKGEYLGKTVQVVPHITNAIQEWIERVAMVPVDGKEGPADVCVIELGGTIGDIESMPFIEALGQFSYRVGPGNFCLVHVSLVPVLNVVGEQKTKPTQHSVRGLRGLGLTPNILACRSTKELEENVKEKLSQFCHVPAANIVTLYDVSNIWRIPLLLRDQKAHEAILKVLNLDSFARGPKLDEWVARATLFDALQDTVRIAMVGKYTGLSDSYLSVLKALLHASVDCRRKLLVDWVASTDLEDSTAIEAPDAYKAAWDLLKGANGVLVPGGFGDRGIQGKILAAKYARENNVPYLGICLGMQLAVVEFARSVMNLPEANSTEFDPNAKTPCVIFMPEGSKTHMGGTMRLGSRRTFFEVADCKSAKLYGNVSYVDERHRHRYEVNPDMVPEFENAGLQFVGKDETGRRMEIIEIPNHRYFVGAQFHPEFKSRPSKPSPLFVGLIAASSGQLDRLLQGSCNGHVVSTKHSLSNGAYTSTVHQNGHAKKLANGRKNVLVLDADCAKDGARSVGF

SEQ ID NO: 31244 - DNA, 1605 bp, uncultured archaeon GZfos9C4
  CDS (1)..(1605): transl_table=11
atgaaatacatcgtagtaaccggaggcgtgatgagcgggcttggaaaaggcatcacaatggcttccatcggcaggatactgaagaaccgcggatacaaactcgtgcctataaaaattgacccgtacataaacatcgatgctggcacgatgaatccataccagcatggcgaagtatatgtgctggcagatggcgcggaggttgaccttaacctggggcattacgagaggtttacagatgtggagttagggcgggagcacaatataaccacgggggctgtctattccgcagtgatagaccgagagcgaaggggcgattatctgggacagacggtgcagataattccgcatgtaacgaatgagataaaggcacgaataagaggagttgcagcgaaaagtggtgcagacgtatgcctggtggaagtaggcggcacggtaggcgacatagagagcatgccgtttcttgaagcggtgaggcagatgaaattagaggagcatgagaacgatttcctttttgttcacgttactttagtaccttccacaacgatgcacgagcaaaaaacgaagcccacgcaacactcggtgaaggcgctgcgtgagttagggcttcaaccagatataatcgtgtgtcggagcaaagaggcattaaaagaggatgtaaaagcgaaaatagcaatgttctgtaacgtgaagatggaggcggtgatcagtgcagcggatgccgaagacctatacgcggtgccgctgatgcttgaacgagaaggcatctggacgtacataagcgaaaagctgcagctagaccagtcgaaggtagaccgtgcatgggagaaaatggtggagcggagaagttcatgcaggggcaataaattttttatcgcaatagtggggaagtatgcggaattagaggattcatatttaagtataaaagaagcgataaatcatgccgctacggagctggggtataacgcggatacaaaatggatagaagcggaggatttagaaggcgaaaaggaggtgggctcgttttttgatggcgttcggggaatacttattccgggaggatttggcgttagaggtgcggaaggaaaaataaaagcgatagaatatgcgagggtaaataagattccgtttcttgggctttgttttggattccaattagccgtgatagaggtagcgagggacgtcgcaaaattagaggatgcgaatagcgctgaactcagtgaaacatcgcacccggtgatagacctgttagaagagcagaaagaagtggttgaaaagggggggacaatgagattgggcgattacgaggtgttcataaggggcgatacgttggcgaagaaggtgtatggaaaaaagaagatagtggagcggcacaggcatcgttacgaggtaaatccctcttttatagaccagatagaaagagaaggagtggtgttctcgggcacggacagaagtggcacgaggatggagatactggagatttctcaagataagcatccttttttccttgccacgcagtttcatcctgaattccggtcgagaccaaatagaccttcaccaccgttcaaggcgtttttggaagcttgtataaaatctaaaaggaaataa

SEQ ID NO: 31245 - protein, 534 aa, uncultured archaeon GZfos9C4
MKYIVVTGGVMSGLGKGITMASIGRILKNRGYKLVPIKIDPYINIDAGTMNPYQHGEVYVLADGAEVDLNLGHYERFTDVELGREHNITTGAVYSAVIDRERRGDYLGQTVQIIPHVTNEIKARIRGVAAKSGADVCLVEVGGTVGDIESMPFLEAVRQMKLEEHENDFLFVHVTLVPSTTMHEQKTKPTQHSVKALRELGLQPDIIVCRSKEALKEDVKAKIAMFCNVKMEAVISAADAEDLYAVPLMLEREGIWTYISEKLQLDQSKVDRAWEKMVERRSSCRGNKFFIAIVGKYAELEDSYLSIKEAINHAATELGYNADTKWIEAEDLEGEKEVGSFFDGVRGILIPGGFGVRGAEGKIKAIEYARVNKIPFLGLCFGFQLAVIEVARDVAKLEDANSAELSETSHPVIDLLEEQKEVVEKGGTMRLGDYEVFIRGDTLAKKVYGKKKIVERHRHRYEVNPSFIDQIEREGVVFSGTDRSGTRMEILEISQDKHPFFLATQFHPEFRSRPNRPSPPFKAFLEACIKSKRK

SEQ ID NO: 31246 - DNA, 1632 bp, Western X phytoplasma
  CDS (1)..(1632): transl_table=11
atgaataaaaataaaaaacaacctaaatttattttcgtgacaggtggagtagtttctggtttaggcaagggcattattgcttcgtctattggtcaaattttaaaacaacgcggtttaaaagtgtttatgaaaaaatttgatccttacattaacgttgattcaggcactatgagccctaatcaacatggggaagtttttgtgactaatgatggagctgaaacagatttagatttaggtcattatgaaaggtttttagatgaaaacttatcaagagaatctaacgtcactacaggacaaatataccaatctgtaattaataaagaaagaaaaggggaatatttaggtaaaactattcaagtcattcctcacattactaacgaaattaagtatagaattttaactatcgctcaaaacgctgattatgatattattatcattgaaataggtggaactgttggagatattgagtctttaccttttttagaatctattaggcaaatgcgttatgatttaggctttcataatgttctttatttacacaatactttaattccttatttaaaatcttccaacgaaacgaaaactaaacctactcaacacagtgtgaaagaattaagatctttaggaatacaaccacaaattttaattttaagaagtgaaaaaataatcactccagaaatgaagcaaaaaatatctattttatgtgatgttcaaaaaaacgctatttttgataacacagatgttgatattttatataaaattattcttaatttacacggacaaaaaatagatgattttattttagatcatttccaaattaaaaatgttcctgtttctgatttatcccagtggaaacaattaattcataaaatagaacacttaaaacgcacaatcactattggtttagtaggaaaatacatcgattctcatgatgcttatttatctatcgaagagtctttgaaacatgcttcatacactcatgatgtgaaagttgaaattaaatggattgatgcggaatatttaactaatgataatatccaaaaacagttaaatacttgtgatggtattttattgcctggtggttttggttttagagcggttgaagggaaaattaaagccgttaaatacgctcgtgaaaacgatatcccttttttcggtatttgttttggtatgcaaatagcggtgatagaatatgctcgtaatgttttaaaattagaacaagccaattcctcagaagtagattctaaaacgccttatcccgttattactcaaaaaatatataatacacaattaggcggttctttaagattaggtctttattcttcagaattaaaaaaagatagtagaagttatgccatttatcaacaagaagtgattaacgaaagacatcgtcatcgctatgaaatgaatttagaatatctccctctttttgataaagatccttatttcaatgtttctggctttaatcaagaagaaaaagtccctgaaatagtggaattaaaaaatcacttttggtttgtaggggttcaattccatccagaatttttatctcgtcctctgaagccacatcctttatttaaagattttattaagtttgctattaaatacaatacaaataaaaatacacaataa

SEQ ID NO: 31247 - protein, 543 aa, Western X phytoplasma
MNKNKKQPKFIFVTGGVVSGLGKGIIASSIGQILKQRGLKVFMKKFDPYINVDSGTMSPNQHGEVFVTNDGAETDLDLGHYERFLDENLSRESNVTTGQIYQSVINKERKGEYLGKTIQVIPHITNEIKYRILTIAQNADYDIIIIEIGGTVGDIESLPFLESIRQMRYDLGFHNVLYLHNTLIPYLKSSNETKTKPTQHSVKELRSLGIQPQILILRSEKIITPEMKQKISILCDVQKNAIFDNTDVDILYKIILNLHGQKIDDFILDHFQIKNVPVSDLSQWKQLIHKIEHLKRTITIGLVGKYIDSHDAYLSIEESLKHASYTHDVKVEIKWIDAEYLTNDNIQKQLNTCDGILLPGGFGFRAVEGKIKAVKYARENDIPFFGICFGMQIAVIEYARNVLKLEQANSSEVDSKTPYPVITQKIYNTQLGGSLRLGLYSSELKKDSRSYAIYQQEVINERHRHRYEMNLEYLPLFDKDPYFNVSGFNQEEKVPEIVELKNHFWFVGVQFHPEFLSRPLKPHPLFKDFIKFAIKYNTNKNTQ

SEQ ID NO: 31248 - DNA, 1743 bp, Fusarium sp
  CDS (1)..(1743)
atgaaggttgttcttgtgagcggtggagttatctccggtgtcggcaaaggcattatcgccagtagcgctggtctccttctcaagactcttggtcttcgcgttactgcgatcaaaaccgacccttatatcaacaccgacgccggtcttcttaaccctctagagcacggcgagtgcttcgttcttgacgatggaggagagaccgatctcgatctcggaaactacgagcgatacctcggtatccaattgagccgtgacagcaacattaccactggcaagatctacaagcaggtcatcgagaaagagcgacgaggagattacttgggaaagactgttcaggtcgttcctcacatcacagacgctattcaagattggatcgagcgcgtcgccaagatccccgtggacgcctcaggagaagcgccagatgtttgcatcattgaacttggtggtacaattggtgatcttgaatctggtcctttcgttgaggctctttcgcaattgcgacaccgacttggccgggaaaacttcctgagcatcagcgtttcctacgtccctattatcaatggagaggagaagacaaagcctactcagcatgctattcgacaagtgcgaagcgccggtctgatccctgatgtgattgcctgccgttgtgagcgagagctggaccaggccaccatcacaaagatcgcccgaagctgccaagtcgaagacgagcaggtcatcggtgtccgcaacatggacaccatttaccaggttcctcttctcctcgagcaggagggtcttcttaagctgctgcgcaagggcctggccctcgagaactgccaggtgactcctcccatggcccagaagggtcaggctctctgggatctctggaagaagactgtcgtccccgaccgacacctcgagcccgtcaacatcgtcttggttggcaaatacgtcagccttgacgactcatacctcagtgtccacaaggcgcttgagcactcagcaatgcgatgcaagcgcaagctgaaccttgtttctgttgactcagagcatctcgagcctgagatgcaggagaaggaccctcgcaagtaccacgaggcgtgggcccatgttgtccgggcacaaggtatcatcgtccctggaggctttggaacacgaggaatccgcggtatggttgaggttgccaagtgggctcgtgagcgaaagctcccttacctgggtatctgcttgggtatgcagactgccgttattgagtacgctcgcaacgttatgggtcttaaggaggccacatccgaggagttctctgctcaggcggagcaccgtgttgttatcttcatgcctgagggttccaaagagcaaatgggtggtaccatgcgacttggtagccgaacatcacacttcaagcctggcactgaatggagcaagcttcgaggcttgtatggaggagttgatgtcgtggaggagcgtcaccgtcaccgttacgaggttaaccccgattacatcgaggatctcgagaaggctggcctttctttgacctcaatggacgaccaaggtgttcgtgttgagacaattgagttgaaggatcaccccttcttcgttggtctccaggctcatcctgagtacaagtccaagaccctggcacccgccccttcgctgctcggtctcattgccgccagttccggatgtctcgacgagatcatcgaggctgcccacaagaagcagagtgcgactaacggagtcagcgacgtgaccaacttttag

SEQ ID NO: 31249 - protein, 580 aa, Fusarium sp
MKVVLVSGGVISGVGKGIIASSAGLLLKTLGLRVTAIKTDPYINTDAGLLNPLEHGECFVLDDGGETDLDLGNYERYLGIQLSRDSNITTGKIYKQVIEKERRGDYLGKTVQVVPHITDAIQDWIERVAKIPVDASGEAPDVCIIELGGTIGDLESGPFVEALSQLRHRLGRENFLSISVSYVPIINGEEKTKPTQHAIRQVRSAGLIPDVIACRCERELDQATITKIARSCQVEDEQVIGVRNMDTIYQVPLLLEQEGLLKLLRKGLALENCQVTPPMAQKGQALWDLWKKTVVPDRHLEPVNIVLVGKYVSLDDSYLSVHKALEHSAMRCKRKLNLVSVDSEHLEPEMQEKDPRKYHEAWAHVVRAQGIIVPGGFGTRGIRGMVEVAKWARERKLPYLGICLGMQTAVIEYARNVMGLKEATSEEFSAQAEHRVVIFMPEGSKEQMGGTMRLGSRTSHFKPGTEWSKLRGLYGGVDVVEERHRHRYEVNPDYIEDLEKAGLSLTSMDDQGVRVETIELKDHPFFVGLQAHPEYKSKTLAPAPSLLGLIAASSGCLDEIIEAAHKKQSATNGVSDVTNF

SEQ ID NO: 31250 - DNA, 1638 bp, Acinetobacter sp
  CDS (1)..(1638): transl_table=11
atgacccattttattttcgtaactggtggtgttgtttcatcactaggtaaaggtatttcagctgcttcagttgctgcacttttagaagcccgtggtttaaaagtaaccatggtaaaaatggatccatatattaatgttgatccggggacaatgagtccattccaacacggtgaagtttttgttactgaagatggtgccgaaacagatttagatttgggctattacgaacgtttcttacgtcgtgcgaaaatgaccaaattgaataactttaccagtggtcgtgtttatcaagacgttttaaataaagaacgtcgtggcgattacttaggcggtacggttcaagttattccacatattaccgataacatcaaagagcgtgttcttgcagctggtgaaggctacgatgttgcgattgtcgaaatcggtggtacggttggtgatatcgaatctttaccatttatggaatctgtacgtcagttaatggtcgaacttggccataagcgtacgatgttgatgcatttgacactcctcccatatattcgttcagcagcagagttgaaaaccaaaccaactcaacattctgtgaaagaattattgtcaattggtattcaaccagatattttgatctgccgtacagagcatgatgttgacgccgacaccaaacgtaaaattgcattgtttaccaatgttgaagcacgtgcggttgtagtgtgtaaagatgcgaaaaccatctatcaaattccgcgtaacttctacgagcaaaaagtagacgacctcatctgtgagcgtttcggctacaacgatttgccacaagctgatctttcagattgggatcaggtatgcgaagcgttatttaaccctgaatacattgttcgtgtcgcaatggtgggtaaatacgttgaacttccagatgcgtataagtctgtcaatgaagctttgcttcatgcgggtattcaaaatcgcgtaaaagttcagatcgactatgtcgatgcagaaacacttgaaacccaagatatctctattttgtctacggctgatgccatccttgtaccgggtggttttggtgagcgtggaacagaaggcaagatgttggccatcaagtatgcgcgtgagcaaggtattccatttttaggaatctgcttgggcatgcagcttgcggtaattgaatatgcgcgtaatgttgcaggtttggcagaagcaacatcgactgaatttaatcgttcgaccaagttcccaatcattggtctgatcacagagtggttagacgagcgtggtgaacttcaacagcgcagcgttgagtcagatcttggtggaaccatgcgtttaggtgcacaaaaatctgaactggtcgaaggcacaaaaacacgtcaagtttatggtaaagctgagattgtagagcgtcatcgtcaccgctatgaaatgaacgaccgctttattgagccaattgaaaaagcgggtatgaaaatttcgggctattcaactgcgcaacatttggttgaaacagtcgaaattcctgaacatccttggtttattgctgtacaattccatcctgaatttacaagttcgccacgtgatggacatccattatttgctagctttatcgatgctgcgaaaaaacagcaccttaaaacgaaataa

SEQ ID NO: 31251 - protein, 545 aa, Acinetobacter sp
MTHFIFVTGGVVSSLGKGISAASVAALLEARGLKVTMVKMDPYINVDPGTMSPFQHGEVFVTEDGAETDLDLGYYERFLRRAKMTKLNNFTSGRVYQDVLNKERRGDYLGGTVQVIPHITDNIKERVLAAGEGYDVAIVEIGGTVGDIESLPFMESVRQLMVELGHKRTMLMHLTLLPYIRSAAELKTKPTQHSVKELLSIGIQPDILICRTEHDVDADTKRKIALFTNVEARAVVVCKDAKTIYQIPRNFYEQKVDDLICERFGYNDLPQADLSDWDQVCEALFNPEYIVRVAMVGKYVELPDAYKSVNEALLHAGIQNRVKVQIDYVDAETLETQDISILSTADAILVPGGFGERGTEGKMLAIKYAREQGIPFLGICLGMQLAVIEYARNVAGLAEATSTEFNRSTKFPIIGLITEWLDERGELQQRSVESDLGGTMRLGAQKSELVEGTKTRQVYGKAEIVERHRHRYEMNDRFIEPIEKAGMKISGYSTAQHLVETVEIPEHPWFIAVQFHPEFTSSPRDGHPLFASFIDAAKKQHLKTK

SEQ ID NO: 31252 - DNA, 1677 bp, Acidobacteria bacterium
  CDS (1)..(1677): transl_table=11
atgtcggcaaagtacatctttgtcaccggcggagttgtgtcgtcgctaggtaagggattggcagcagcttccatcggctgtctgctggaaatgcgtggtctcaaggtcaacatgcaaaagtttgacccgtatctcaatgtcgatcccgggaccatgtcgccgttccagcacggcgaagtcttcgtcaccgacgacggcgccgagaccgatctcgacctgggccactacgagcgctatacgcatagcaagctcacgcgcgagaacaactggaccaccggccgcatttacgagcagatcatcaccaaggaacgccgcggcgattatctcggcaagaccgtccaggtcattccgcacgtcaccaacgagatcaaggccgctatgaagcgtgccgccgtggatgtggacgttgctatcgtcgaaattggcggcacagttggcgacatcgaatcgctgccattcatcgaagccattcgccagatgcgccaggagctcggccgcgacaacacgctcttcgtacacctcacactggtgccctacattgccgctgccggcgagttgaagaccaagcccacgcagcactcggtgaaagagctgctcagcatcggaattcagcccgacatattgctgtgccgcaccgaccgcttcctgtcgaaagacatcaaaggcaagatcgcgctcttctgcaacgttgaggacgaagccgtcatcaccgcgaaagacgtggcttccatctacgaagttccgctcggctttcatcatgaaggcgtcgatcgcctggtgatgaaatatctgcgtctcgatgcgaaggaacccgacctcacccgctggcaggacatcgtccatcgcgtctacaacccgaaagacgaagtcatcattggcatcatcgggaaatacgtggagtacgaagactcctacaagtcgctgaaggaagcgctcgtccacggatcgctcgcgcacaacctcaagcttaatgtcacgtggatcgaagcagagggcctcgagaccaaggacgagagctattacgaacagcttcgccatgtggacggcatcctcgttcccggcggctttggcaagcgcggcatcgccggcatgttgaatggcatccgcttcgcgcgggagcacaaggtcccctacttcggcatctgtctcggcatgcagacggcctcgatcgaattcgcgcgcaacgtctgcggtctcgaagacgccaactccagtgagttcgatcccgctaccccgcaccgcgtcatctacaaactgcgcgaactgcgcggcgtggaagaactcggcggcactatgcgcctcggcgcgtgggcttgcaaactcgaacccggctcgcacgccgcgaaagcctacggaaccactgagatcagcgagcgacatcgccaccgctacgaattcaaccaggaataccgcgagcagatggccgctgccggactcaaattcactggcaccacgcccgacggcacctacatcgagatcgtcgagctcgaccagaatgagcatccgtacttcctcggctgccagttccaccccgaattcaagtcgaagccgctcgagccgcatccacttttcaaggcattcatcggcgcatcgtacgagcatcgcatgaagcgcacacacaccaaggagcgcgaggaagagtcggtcttcctgcgtccggagcgggtagggaagtag

SEQ ID NO: 31253 - protein, 558 aa, Acidobacteria bacterium
MSAKYIFVTGGVVSSLGKGLAAASIGCLLEMRGLKVNMQKFDPYLNVDPGTMSPFQHGEVFVTDDGAETDLDLGHYERYTHSKLTRENNWTTGRIYEQIITKERRGDYLGKTVQVIPHVTNEIKAAMKRAAVDVDVAIVEIGGTVGDIESLPFIEAIRQMRQELGRDNTLFVHLTLVPYIAAAGELKTKPTQHSVKELLSIGIQPDILLCRTDRFLSKDIKGKIALFCNVEDEAVITAKDVASIYEVPLGFHHEGVDRLVMKYLRLDAKEPDLTRWQDIVHRVYNPKDEVIIGIIGKYVEYEDSYKSLKEALVHGSLAHNLKLNVTWIEAEGLETKDESYYEQLRHVDGILVPGGFGKRGIAGMLNGIRFAREHKVPYFGICLGMQTASIEFARNVCGLEDANSSEFDPATPHRVIYKLRELRGVEELGGTMRLGAWACKLEPGSHAAKAYGTTEISERHRHRYEFNQEYREQMAAAGLKFTGTTPDGTYIEIVELDQNEHPYFLGCQFHPEFKSKPLEPHPLFKAFIGASYEHRMKRTHTKEREEESVFLRPERVGK

SEQ ID NO: 31254 - DNA, 1617 bp, Aeropyrum pernix
  CDS (1)..(1617): transl_table=11
atgtctcctagaaaatatgtaatagtgacgggtggagtgctctcgagcgtgggcaagggccttacaaccgctagcctcgccctcctcctgtcgagccgtggttacagcgttgaggccatcaagatagacccctatataaatgtggatgcggggaccatgaacccctatatgcatggcgaggtcttcgtcaccgaagacggcggcgagaccgacctagacataggccattacgagaggtttctcgggaagaacctctccaggaagcataacataacgacggggcagatctacttctccgtcatatcgaaggagaggagcggagactatctaggccagaccgtccaggttataccccatataacggatgagataaagtcgaggattaaggaggttggcgatgtatccggcgctgacgtggttatagtggagattggggggactgtgggggatatagaggggctgcccttcctcgaggcggcgaggcagatgaggctcgaggaaggcttcgacaacaccttcttcatacacgtcgccctaagcccatacctacccacaacgggggagcagaagacgaaaccagttcagcacagcatacaggagctcaggaggataggaattcagcctgacgcagtcgtggttagaagccaccagccactcgagcaggagggcctcaggaagatagccctctacgccacactcccgatggagaacgtgataaacagctacgatatagagaacatctacaggctaccgctgctcctggagaagcagggcctcgcaaggctagtcgagaggaggctcttcggtagggagaccagacccgacctctccaggtgggaggagttcgtggccctctacgagaaggcttctaggagggttaaggtagcgatggttggtaagtacactaagctgagggacagctacataagcatagtggaggccttgaaacacgcctcagcctatgagggcgtcagacccgagctcctctgggtggagagcacggatatagagaggggcgtggtggatgttgacagggtgttcgaggaggcggacggggctatagtactcccgggtttcggggtgaggggtgttgagggcaagatagaggctatacgccgcttcagagagggtaagaagcccatgctgggcatatgctttggaatgcagctctcggtcgttgagtatgctagaaacgtgctaggcctcaaggaggcacacactaccgaggtaaaccccgagacccctcatccggtggtcgacctgctgcccgagcagaggggtatagacaagctgggcggcactatgaggctcggcgcgaggcctgtcaggatagtagagggaactatactctggagcctctacggcagagaactagccagcgagaggcacaggcaccgctatgaggtcaacccaacctacgtcgacaggctagtcgaggcagggcttgttgtgagcgcgtggagccaggagggctatgtggaggctgtagagctgaggcctagagaccacccgttcttcctggcgacacagttccacccggagtttaagagtaggcctctaaaccccgcaccagtgtttaaaggcttcgtaaccgcggtagccaggctaaggggctag

SEQ ID NO: 31255 - protein, 538 aa, Aeropyrum pernix
MSPRKYVIVTGGVLSSVGKGLTTASLALLLSSRGYSVEAIKIDPYINVDAGTMNPYMHGEVFVTEDGGETDLDIGHYERFLGKNLSRKHNITTGQIYFSVISKERSGDYLGQTVQVIPHITDEIKSRIKEVGDVSGADVVIVEIGGTVGDIEGLPFLEAARQMRLEEGFDNTFFIHVALSPYLPTTGEQKTKPVQHSIQELRRIGIQPDAVVVRSHQPLEQEGLRKIALYATLPMENVINSYDIENIYRLPLLLEKQGLARLVERRLFGRETRPDLSRWEEFVALYEKASRRVKVAMVGKYTKLRDSYISIVEALKHASAYEGVRPELLWVESTDIERGVVDVDRVFEEADGAIVLPGFGVRGVEGKIEAIRRFREGKKPMLGICFGMQLSVVEYARNVLGLKEAHTTEVNPETPHPVVDLLPEQRGIDKLGGTMRLGARPVRIVEGTILWSLYGRELASERHRHRYEVNPTYVDRLVEAGLVVSAWSQEGYVEAVELRPRDHPFFLATQFHPEFKSRPLNPAPVFKGFVTAVARLRG

SEQ ID NO: 31256 - DNA, 1737 bp, Agrobacterium tumefaciens; identical to SEQ ID NO: 31050
  CDS (109)..(1737): transl_table=11

SEQ ID NO: 31257 - protein, 542 aa, Agrobacterium tumefaciens
MARYVFITGGVVSSLGKGIAAAALGALLQSRGYRVRLRKLDPYLNVDPGTMSPTQHGEVFVTDDGAETDLDLGHYERFTGRSATKTDNITTGRIYKNIIDKERRGDYLGATVQVIPHVTNEIKDFVTEGNDDYDFVICEIGGTVGDIEAMPFMEAIRQLGNDLPRGTAIYVHLTLMPYIPAAGELKTKPTQHSVKELQALGIHPDILLVRADREIPEAERRKLSLFCNVRPSAVIQALDVANIYDVPIAYHNEGLDSEVLAAFGIEPAPKPRLEQWEEVCNRIRTPEGEVTIAIVGKYTGLKDAYKSLIEALHHGGFANRVKVKLEWIESEVFEKEDPTPYLEKVNGILVPGGFGERGSEGKIMAAQFARERNVPYFGICFGMQMAVVEAARHLAGIENASSTEFGPTAEPVVGLMTEWVKGNELEKRSTKGDLGGTMRLGAYKAALKKDTKIAEIYGTTDISERHRHRYEVNVDYKDRLEECGLVFSGMSPDGVLPETVEYPDHPWFIGVQYHPELKSRPLDPHPLFASFVEAAVEQSRLV

SEQ ID NO: 31258 - DNA, 1623 bp, Alkalilimnicola ehrlichei
  CDS (1)..(1623): transl_table=11
atgacccgatacattttcatcaccggcggtgtcgtatcgtccctgggaaagggcatcaccgccgcttccctgggtaccatcctgcaggcccgtggcctgagtgtctccatgaccaaactggatccctacatcaatgtggatccgggcactatgagccctttccagcacggcgaggtctacgtcaccgacgacggcgcggagaccgacctggacctggggcactacgagcgtttcgtgcgcaccaccatgacccgcaacaacaactacaccaccggccggatctacgaatccgtcatccgcaaggagcgccggggtgagtatctgggcggtacggtgcaggtcatcccccacatcaccgacgagatcaagcgcagcatccagcagggtgccgacgacgcggacatcgccctgatcgagatcggcggtacggtgggcgatatcgaatcgctccccttcctggaggccatccgccagatgggcgccgagctcggccgtggccgttgcctgtttatgcacctcaccctggtgcccttcatcggtgccgcgggcgagatgaagaccaagcccacccagcactcggtcaaggaactgcgctccatcggcatccagcccgatatcctggtctgccgggccagtcagcgcatccccgaggaagagcgccgcaagatcgccctgttcaccaacgtggagccgcgggcggtggtctcctgtctggacgtggacaacatctacaagatccccgaggtgctgcaccggcaggggctggacaacatcgttgcggagaagctcggtctggagctgccgccggccagcctgcaggactggcagcgggtggtggaggccatgcagaaccccgagggcgaggtcaccatcgccatggtgggcaagtacgtggatctcaccgatgcctacatgtcgctcaacgagtcgctgcgccacgcggggatacagacccggcaccgggtcaatatccggtacatcgactccgaggagttggaacgcgaagggacccacgccttggacggggtggacgccgtcctggtgcccggtggcttcggcgagcgcggcgtggagggcaagatcctggcggcccgctacgcccgggagcgcaaggtgccttacctgggcatctgcctggggatgcaggtggcggtcatcgagtacgcccgcaacgtcgccgggctggagggggcccacagcaccgaattcacccgccacccccaccatccggtcatcggcctgatcaccgagtggatgaccgacgagggcaccgtggagcagcgtagcgaggactccgacctgggcggcaccatgcgcctgggggcccagccctgtcggctgaccgagggctcgctggcccgccaggtctacggcaaggacgtggtggaggagcgccaccgccatcgctacgaattcaacaaccactacctggaggcgctggaggcggccgggctgcggttctccggctggtcccacgaccgcaaactggtggaagtggtggagcagccggaccatccctggtttctggcctgccagttccacccggagttcacctccacgccccgcgacggccatccgctgtttgccgccttcgtgcgtgccgccatcgcccacaggggctaa

SEQ ID NO: 31259 - protein, 540 aa, Alkalilimnicola ehrlichei
MTRYIFITGGVVSSLGKGITAASLGTILQARGLSVSMTKLDPYINVDPGTMSPFQHGEVYVTDDGAETDLDLGHYERFVRTTMTRNNNYTTGRIYESVIRKERRGEYLGGTVQVIPHITDEIKRSIQQGADDADIALIEIGGTVGDIESLPFLEAIRQMGAELGRGRCLFMHLTLVPFIGAAGEMKTKPTQHSVKELRSIGIQPDILVCRASQRIPEEERRKIALFTNVEPRAVVSCLDVDNIYKIPEVLHRQGLDNIVAEKLGLELPPASLQDWQRVVEAMQNPEGEVTIAMVGKYVDLTDAYMSLNESLRHAGIQTRHRVNIRYIDSEELEREGTHALDGVDAVLVPGGFGERGVEGKILAARYARERKVPYLGICLGMQVAVIEYARNVAGLEGAHSTEFTRHPHHPVIGLITEWMTDEGTVEQRSEDSDLGGTMRLGAQPCRLTEGSLARQVYGKDVVEERHRHRYEFNNHYLEALEAAGLRFSGWSHDRKLVEVVEQPDHPWFLACQFHPEFTSTPRDGHPLFAAFVRAAIAHRG

SEQ ID NO: 31260 - DNA, 1683 bp, Anaplasma marginale
  CDS (1)..(1683): transl_table=11
atgtcaataagggacgggtgtagcgcgcgcttcatattcgtcacgggcggggttgtatcctcgctggggaaagggctagctgcagcttctataggtgcgctacttcaggcccgtggttttcgggtgcgccttagaaagcttgatccgtatctaaatgtagatccgggtactatgagccctgcacaacatggggaggtgtttgtcaccgatgacggcggcgagaccgatctagatctgggaaactacgagcggtttacgggggtcaacaccacaaaggaagacaacataaccgctgggaggatatatcagcagttgcttgccaaggaaaggcgtggagactatttgggccacactgtgcaggtgatcccgcacgtaacggaccttataatctctttcatcctgagtaatgacgatggggctgacttcataatttgtgaaataggcggtaccgttggtgacatcgaaagtcagccgtttctcgaatctatacgccaggtgagctacaggctgagtaaaaacttcacaatttttgtacacctcaccctggtaccctgcgtaggttctgctggggagttgaaaactaagcccacgcaacactcggttaaggagttgagctctttgggaatacagccagacataatactataccgcagtgcggagccgctgccacaataccagagcgcgaaaatagcaaacttctgtaacgtttctgcagataacgtaatccccgcgctcgacgtagaaagcatgtacaagttaccagttatgtatcatgcgcataagcttgatacacaaatactcagccactttgggatgggcgctccagaacctgacctaaccaagtgggcaaatgtactcacgatggtcaacaacgcacggaatgtggttactatagcaattataggcaagtacacaaaattcctagacgcctacacgtcactcacagaagcgctggaccatgcgggcatgcatagtggaatcaaaatacaagtaaagtgggtggattcccgtctaccggtaagggagtctgacttgcatgatgtggacggggtgctcatccctggcgggtttggtgatgatggagtggatggaaaagtcctagcaataggttacgcgcgcgccaatggcatccccatgttaggaatatgtatgggaatgcagcttgccgccatagaatttgcgcttaatgttgcgaagcttgaagatgcaaactccacagaatttaatcaggcctgcaaaaacccgattgttgtcgagttgccatggctgcaaaagggcgaaggagaatatcttttgggcggtagtatgaggttaggatcgtgcacataccgtctgagcgcagattctagagttgcgtctgtgtacggcagtacggtaatcaacgaacgatgccgacatcgttactgcatcaacccccagtacaaaaatgtcctggaggagcacgggttatccttcaccggcatgtcagactcgcacgggttggtggaggtactggaattgcagtcacacccgtggttcataggcgtgcaattccacccagagtttaaatccagtccgtttgcgccgcacccattgtttacatcttttgtgcaaaatgtgctgcagataaagcagcgcgggtttatgcataaatcggtgtcggctgccgctatacttgttcccggcagtagcgtcgtgtcatag

SEQ ID NO: 31261 - protein, 560 aa, Anaplasma marginale
MSIRDGCSARFIFVTGGVVSSLGKGLAAASIGALLQARGFRVRLRKLDPYLNVDPGTMSPAQHGEVFVTDDGGETDLDLGNYERFTGVNTTKEDNITAGRIYQQLLAKERRGDYLGHTVQVIPHVTDLIISFILSNDDGADFIICEIGGTVGDIESQPFLESIRQVSYRLSKNFTIFVHLTLVPCVGSAGELKTKPTQHSVKELSSLGIQPDIILYRSAEPLPQYQSAKIANFCNVSADNVIPALDVESMYKLPVMYHAHKLDTQILSHFGMGAPEPDLTKWANVLTMVNNARNVVTIAIIGKYTKFLDAYTSLTEALDHAGMHSGIKIQVKWVDSRLPVRESDLHDVDGVLIPGGFGDDGVDGKVLAIGYARANGIPMLGICMGMQLAAIEFALNVAKLEDANSTEFNQACKNPIVVELPWLQKGEGEYLLGGSMRLGSCTYRLSADSRVASVYGSTVINERCRHRYCINPQYKNVLEEHGLSFTGMSDSHGLVEVLELQSHPWFIGVQFHPEFKSSPFAPHPLFTSFVQNVLQIKQRGFMHKSVSAAAILVPGSSVVS

SEQ ID NO: 31262 - DNA, 1626 bp, Anaplasma phagocytophilum
  CDS (1)..(1626): transl_table=11
atggtgggtaagttaaatccaacacgttttatatttgttactggtggagtggtctcttcgctaggtaagggtcttgccgcagcatctataggtgcgctgctgcaggcacgcgggtttagtgtgcgcttaagaaagctcgatccgtatttaaacgtggaccctggcactatgagtcctgcccagcacggtgaggtatttgtgacctctgatggtggcgagacggacttagacctcggacattacgaacgtttcactggcgtaatgaagacaagggcagataacgtaactgctggtaaaatataccatgagcttatagtaaaggaacgtcggggagattatcttgggcagacggtacaggtgataccgcatgtgatagatttgataatctcatgtatccttcataatgatgcaggggctgactttgttatatgtgaaataggcggtactgttggtgatatagaaagtcaaccgtttctggaagcgatacgtcaggtcagttacaggttgagtaagaatctaacgatttttgtacacctaacgctagtgccgtatataggtgctgtcggggagctaaaaacaaaacctactcagcactctgtaaaggagttgagttctttggggatacagccagatattgttttgtatcgtagtagggcgcagttgccgcagtaccagtgtgctaaaatagccaacttctgtaatgtggcagaggacaacatcatagctgctcttgatgttagtaacatttacatgttgcctgtgatgtatcatgagcataggcttgatacgcaaattctcaaacattttgatgtagacagtcctgaacctgatcttacgcagtgggaaaatgtgctaagaatgtctgagactgcgtcagacaggattgtcattgctatagttggtaagtatgttacctccttggatgcttatacctctttggaggaagctttgcgtcatgcagggttgcatagtggtatccgtgtagagataaagtgggtagatgcgcgtttgcctgcttctgaaattgatcttaccgatgcggatgcaatattaattcctggtggatttggtgacaacggtatagggacaaagatttgcgctatagaatacgctcgcgtgaacaatattccgatgttgggaatatgtttggggatgcagttagcagtaattgaatttgcccttaacgttgcaggaattgaagatgcgaattctactgaattcaagtctgattgtaaaaaccccgtggtttgtgaattgccgggtttgcaagtgggagatgagtataagatgggcggaagtatgcgtctgggatcttacacatgcaatttagcgccgggttctcgtataatgtctatatacgattcttcaacagttgtggagcgtcgtaggcataggtatgggataaaccctgagtatagggatgtgctttctaagtgtggccttgcgtttactggtgctgccgaagatcgagatttgcctgaggtacttgagttgcctgatcatccttggtttattggtgtacagtttcatccggagtttcaatctactccttttaaatctcatcctctgttcctttcttttgtaaccagcactttgcaggtgaaaaaggcttcgtcccggagttag

SEQ ID NO: 31263 - protein, 541 aa, Anaplasma phagocytophilum
MVGKLNPTRFIFVTGGVVSSLGKGLAAASIGALLQARGFSVRLRKLDPYLNVDPGTMSPAQHGEVFVTSDGGETDLDLGHYERFTGVMKTRADNVTAGKIYHELIVKERRGDYLGQTVQVIPHVIDLIISCILHNDAGADFVICEIGGTVGDIESQPFLEAIRQVSYRLSKNLTIFVHLTLVPYIGAVGELKTKPTQHSVKELSSLGIQPDIVLYRSRAQLPQYQCAKIANFCNVAEDNIIAALDVSNIYMLPVMYHEHRLDTQILKHFDVDSPEPDLTQWENVLRMSETASDRIVIAIVGKYVTSLDAYTSLEEALRHAGLHSGIRVEIKWVDARLPASEIDLTDADAILIPGGFGDNGIGTKICAIEYARVNNIPMLGICLGMQLAVIEFALNVAGIEDANSTEFKSDCKNPVVCELPGLQVGDEYKMGGSMRLGSYTCNLAPGSRIMSIYDSSTVVERRRHRYGINPEYRDVLSKCGLAFTGAAEDRDLPEVLELPDHPWFIGVQFHPEFQSTPFKSHPLFLSFVTSTLQVKKASSRS

SEQ ID NO: 31264 - DNA, 1638 bp, Anabaena sp
  CDS (1)..(1638): transl_table=11
atgactaagtttatctttgttactggaggtgttgtttccagtattggcaaaggcattgtagcagcaagtctaggccgtttactcaaatcacgagattattcggtgtcgattttaaaactcgacccctatattaatattgatccgggtacaatgagtccctttcaacacggtgaagttttcgttacccaagatggcgcagaaacagatttagacttgggacattacgaacgctttaccgatacttcaatgtcacgcctcaatagtgttaccactggttcaatttaccaagcggtaatcatgcgtgagcgtcgcggtgactacaatggtggcacagtccaggtaattccccatattaccaatgaaattaaagaacggattttgtcagttgctaaagaaacaaatccctctgtagtcattaccgaaattggtgggacggtgggtgatattgaatcgctaccatttttagaagctattcgccagctacgcaaacaggtgggacggcaaaatgtgttgtatatgcacgttaccctcatgccttatattgcttcggcgggggagatgaagacgaagcctacacagcattctgtgaaggaactgagatctattggtattcaaccagatattctagtatgtcggagcgatcgccccatacctagaggattaaaacagaaattgtcagaattctgtgatgttccggtagagtgcgtcatcacttctcaagatgccagaagtatttatgaagtcccgttaattctcgaaggggaaggactggcagaacaaacactcaagttgttacaaatggaacaacgccaaccaaacctagagaaatggcaagctatggtgcaaggattatatagtcctaaacacaccgtagaaattgccattgttggtaaatatgtcagcttgggtgatgcgtatttatcagtagtagaggcgttgcgtcacgccgccattgctacccagggagacttacaattgcggtggataaattccgaagatttggaaacccaagcaccagaaacctaccttgcaggtgtagatggcatcgttgtaccaggcggctttggcacgcgtggggtagatggcaaaattgccgcgattaaatacgcacgcgatcgccagattcccttcttaggtttatgcttaggaatgcaatgttctgttattgaatgggcgagaaacgttggcgggttagctggtgctaatagtgcggaatttgattcaaccaccaaatatcctgtaattaacctgttaccagaacagcaagatgtggtggatttaggtggaaccatgcgcttaggtgtatatccttgccatattctccccaatactttagcctctaagctttaccaagcagaaatcattcaagaacgccatcgtcatcgctatgagttcaacaatgactatcgtcaactgttattagattctggctatgtcattagtggcacatctcctgatggccgcctagtggaaattgtggaatatccacaacatccattttttatctcttgccagttccacccagaatttcaatcgcggcctaacacgccccatcctttatttactggctttgtccaagctgcgatcgctcaaagtcatcctaccgctaatttccagacaccagtgaaagtgtcctaa

SEQ ID NO: 31265 - protein, 545 aa, Anabaena sp
MTKFIFVTGGVVSSIGKGIVAASLGRLLKSRDYSVSILKLDPYINIDPGTMSPFQHGEVFVTQDGAETDLDLGHYERFTDTSMSRLNSVTTGSIYQAVIMRERRGDYNGGTVQVIPHITNEIKERILSVAKETNPSVVITEIGGTVGDIESLPFLEAIRQLRKQVGRQNVLYMHVTLMPYIASAGEMKTKPTQHSVKELRSIGIQPDILVCRSDRPIPRGLKQKLSEFCDVPVECVITSQDARSIYEVPLILEGEGLAEQTLKLLQMEQRQPNLEKWQAMVQGLYSPKHTVEIAIVGKYVSLGDAYLSVVEALRHAAIATQGDLQLRWINSEDLETQAPETYLAGVDGIVVPGGFGTRGVDGKIAAIKYARDRQIPFLGLCLGMQCSVIEWARNVGGLAGANSAEFDSTTKYPVINLLPEQQDVVDLGGTMRLGVYPCHILPNTLASKLYQAEIIQERHRHRYEFNNDYRQLLLDSGYVISGTSPDGRLVEIVEYPQHPFFISCQFHPEFQSRPNTPHPLFTGFVQAAIAQSHPTANFQTPVKVS

SEQ ID NO: 31266 - DNA, 1596 bp, Aquifex aeolicus
  CDS (1)..(1596): transl_table=11
atggctaaatacatcttcatcacaggaggtgttctgtcttccctcggcaagggtattacctccgcttccatagcctccatactcgaagaaatgggctacagggttaccctccagaagctcgacccctacctcaacgtggatgccggaactatgagcccctaccaacacggagaggtttacgttacggaagacggtgcggaaactgacctagacctcggacactacgagaggttcacgaacgccgttatgacgcgggacaacaacgttaccgcagggcgcatatactacaacgttatatcaaaagaaaggaaaggggattatcttggggcaacagttcaggtcattccccatataaccgaggaaattaaagagtccataaagagggtagaaaaggacaacgacatagttatcgtggaaatcggaggaacggttggagacatagagggactaccatttttagaagcggtaagacagctttccctggaacttggcaggaaaaactctatgtttatacacctcacatatgttccctacataaaggcggcgggagaactcaaaactaaacccacccagcactccgtaaaggaactaagggcaataggtatacagccggacatgataatatgcagggctgacagggaactgccaaagggtataaagtcaaaaatagccctctttactaacgttaaagaagaggccgttatatccgcccctgaccttgagttttcctacgaagttcccctaaagctaaaggaacagggaatagacaggataataacagaaagactgaaccttgaacacagggaagttaacctcgggaagtggaagaagatagtaaacgtcctaagaaacccggaagaagaggtaaacgtcgcactcgttggaaagtatgtggaactgaaagactcctacaaaagtgttatagaggctctgatacacggcgggattgcgaataaggtaaaggtaaacgtaatccttaaaaattcagaacagctcgacatttcggagcttcaagaggacatacacgggataatggtgccgggagggtttggagagagagggataagaggaaagatagaagcccttaactttggaagggaaaacaacattcccacattcggtatatgcctcggtatgcagttgatggctatagaattcgcaaggaacgttctcggatttagtaacgcaaactcaacggagttcgaccccgatacaccgttccccgtaatagacataatggaggaacagaaaaaagtggacaagctcggcgggactatgaggctcggagcttacccctgtaaggtaaaggaaaatacactagcccacaggatttatcagaaggatttaatttacgaaaggcacaggcacaggtacgagttcaacaacaggtacagaaaggactttgagagtaaaggtgtagtcttttccggaacttctcccgacgataaacttgtagaaataatggaactcaaaaaccacatgtggtacctgggatgtcagttccaccccgagttcaagagcaaacccttcgctccccatccgctctttagggatttcataagggcatgtttagaatataagagaaagtttacgtaa

SEQ ID NO: 31267 - protein, 531 aa, Aquifex aeolicus
MAKYIFITGGVLSSLGKGITSASIASILEEMGYRVTLQKLDPYLNVDAGTMSPYQHGEVYVTEDGAETDLDLGHYERFTNAVMTRDNNVTAGRIYYNVISKERKGDYLGATVQVIPHITEEIKESIKRVEKDNDIVIVEIGGTVGDIEGLPFLEAVRQLSLELGRKNSMFIHLTYVPYIKAAGELKTKPTQHSVKELRAIGIQPDMIICRADRELPKGIKSKIALFTNVKEEAVISAPDLEFSYEVPLKLKEQGIDRIITERLNLEHREVNLGKWKKIVNVLRNPEEEVNVALVGKYVELKDSYKSVIEALIHGGIANKVKVNVILKNSEQLDISELQEDIHGIMVPGGFGERGIRGKIEALNFGRENNIPTFGICLGMQLMAIEFARNVLGFSNANSTEFDPDTPFPVIDIMEEQKKVDKLGGTMRLGAYPCKVKENTLAHRIYQKDLIYERHRHRYEFNNRYRKDFESKGVVFSGTSPDDKLVEIMELKNHMWYLGCQFHPEFKSKPFAPHPLFRDFIRACLEYKRKFT

SEQ ID NO: 31268 - DNA, 1599 bp, Archaeoglobus fulgidus
  CDS (1)..(1599): transl_table=11
atgaagtacattgtagtgactggaggagtgatgagcggactgggcaaaggtatcacagcggcctcaattggcaggctgttcgtggacatgggctacagagtcattccgataaaaatcgacccatacattaacatcgatgcaggaactatgaaccccttccagcacggggaggtttacgttttgaaggatgggactgaagtggacctcgacctcggccactacgagaggtttatcggagaggaggtcacgggagaccacaacatcacaacggggaagatttacaagagagtgattgagaaagagagaaagggggactacctcggccagacggtgcagataattccccacgttacggacgagataaagagctggatcaggagggttgcgaaggagagcaacgcagaaatctgccttgttgagattggaggaactgttggagacattgaggggatgcccttccttgaggcgataaggcagatgcacaatgaggagaaggaggaggattttgccctcgtccatgtcaccctcgttccgcttgatgcgggaggagagcagaagacgaagccaacgcagcacagtgtgaaggagctgagagagcttggactgcatcccgacgtaattgtggggagatgctctgaaagattgaagccggctacgaagaagaagatagcccttttctgtgatgttcctgaagaggcggtaatcagcaatgaggatgctgaggacatttacgaggtgcctctaattttcaaaagggagaagcttgatgagtatctgatgagaaagctgaatttaagggcaaaagaaagcagaaaagagtgggaggagatggtaaaaagaatgaaaacactctacgaggaggcttcaattgccatagttgggaagtatgttgacgtgagagatgcctatctcagcatcaaggaggctttaaagcacggaggaatagaggcgggctgcaaggtcaacattgtctgggttgacagcgaggacttagagaatgttgacgacttcactctcgacgttgatggaatcctcgtgccgggaggttttggagcgaggggggccgaggggaagattagggcaatagagtatgcgagggaaaatggcgtgcctttcctcggaatctgcttcggctttcagcttgccgttattgaatttgccagaaacgtagttggtttcagcgaagcaaacagcacggagcttgacgagaacacaccccaccctgtaatcgatcttctgccagagcagaaggggattgacgagatgggtgggacaatgaggctcggagacattgaggtcacgatcaagccgggcacgatcgcccacaagctctacggaagcgaaaaagttgttgaaaggcacaggcacaggtacgaggtaaatccggagtacattgagaaaatagagagcaaaggcctcgtattcagcgcttattcagacggtgggagaaggatggagattgccgagcttcccgaccacccgttcttcttcgcaacccagttccatccagaattcaagtcgagaccttacagaccctccccacccttcgttggatttgtgagggcagcgctgaaatacaggagagaggaggagatttga

SEQ ID NO: 31269 - protein, 532 aa, Archaeoglobus fulgidus
MKYIVVTGGVMSGLGKGITAASIGRLFVDMGYRVIPIKIDPYINIDAGTMNPFQHGEVYVLKDGTEVDLDLGHYERFIGEEVTGDHNITTGKIYKRVIEKERKGDYLGQTVQIIPHVTDEIKSWIRRVAKESNAEICLVEIGGTVGDIEGMPFLEAIRQMHNEEKEEDFALVHVTLVPLDAGGEQKTKPTQHSVKELRELGLHPDVIVGRCSERLKPATKKKIALFCDVPEEAVISNEDAEDIYEVPLIFKREKLDEYLMRKLNLRAKESRKEWEEMVKRMKTLYEEASIAIVGKYVDVRDAYLSIKEALKHGGIEAGCKVNIVWVDSEDLENVDDFTLDVDGILVPGGFGARGAEGKIRAIEYARENGVPFLGICFGFQLAVIEFARNVVGFSEANSTELDENTPHPVIDLLPEQKGIDEMGGTMRLGDIEVTIKPGTIAHKLYGSEKVVERHRHRYEVNPEYIEKIESKGLVFSAYSDGGRRMEIAELPDHPFFFATQFHPEFKSRPYRPSPPFVGFVRAALKYRREEEI

SEQ ID NO: 31270 - DNA, 1731 bp, Ashbya gossypii
  CDS (1)..(1731)
atgaagtacgttgttgtttcaggcggagtgatctcgggcatcgggaagggcgtgctggcgtcgtcgacgggcatgctgttgaagacgctcgggctgaaggttacgtcgatcaaaatcgacccttacatgaacctggatgcgggcacgatgtcgccgcttgagcacggtgagtgttttgtgctgaacgatggcggagagacggacctggacctgggaaactacgaacggtacctgggggtgacgctgacgaaggaccacaatatcacgaccggcaaggtctactcgcacgttatggccaaggagcgcaagggtgactacctgggcaagaccgtgcaggtggtgccccacctgacgaacgcgattcaggactggttagagcgtgttgcgcgcatccccgttgacgactctggaatggagcctgacgtgtgcatcatcgagctcggaggcaccgtgggtgacatcgagtccgcgccgtttgtggaggcgctgcgtcagttccagttccgtgtaggccgcgacaactttgctcttatccacgtctctctggtccctgtgatccacggcgagcagaagacgaagccaacgcaggctgccatcaaggacctgcgctcgctaggcctgaccccagacatgattgcctgccggtgttcggaggagctagacaagccgacgatcgagaagattgctatgttttgccatgtggggccagagcaggtggttaacgtgcacgatgtagcatccacctaccacgttcccctgctgctacttgaacagcgcatgatagactacctgggacagaggctcaagctctcggatattaagcttggtgcggaggacaaggagaggggcgctcgtctgttggaccgttggagacatttgacgacggccattgacgagtcatttgaagtggtacagatcgccttggttggaaagtacacacacctaaaggactcttacctttccgtcatcaaagcattggagcactcttccatgcgttgtaagcgcaagctagagatcgtctgggtcgaggcttctgatcttgagcctgagatgagcgcctccgacaaggagaagttccagcaagcgtggaagagcctatcgtcttctgacggtattcttgtacctggtgggtttggcaccagaggcaccgaggggatgattctcgctgcgaagtgggcgcgggagaacaagatcccatatctgggtgtctgtctcggactgcaggtcgcgactatcgagtttgcccggcatgtgcttggcatcgcggatgccacatcgtccgagttctacccagaggtggcagaggataagcaggtcgttgtgtacatgcctgagatagacaagcaaaatatgggcggtaccatgagactcggtctcagacctaccatctttcaggaggacaccgactggtccattatcagaaaactatacggcagcgcctcctctgtggaggaaagacatcgccatcgctacgagatcaacccaaagatggtgcagaaactcgaggagcatggcttgaagttcgtgggcagagacgagaccggcacccggtgcgagattctcgagctcgtcgaccacccctactacgtcgccacgcagtaccacccagagtacatgtccaaggtgctagacccctcgcagcccttcctcggccttgttgctgcggccgcaaacatcctaccaagcctactcgctgccgagcgtgccgtcggcgcgagagcagacttctaa

SEQ ID NO: 31271 - protein, 576 aa, Ashbya gossypii
MKYVVVSGGVISGIGKGVLASSTGMLLKTLGLKVTSIKIDPYMNLDAGTMSPLEHGECFVLNDGGETDLDLGNYERYLGVTLTKDHNITTGKVYSHVMAKERKGDYLGKTVQVVPHLTNAIQDWLERVARIPVDDSGMEPDVCIIELGGTVGDIESAPFVEALRQFQFRVGRDNFALIHVSLVPVIHGEQKTKPTQAAIKDLRSLGLTPDMIACRCSEELDKPTIEKIAMFCHVGPEQVVNVHDVASTYHVPLLLLEQRMIDYLGQRLKLSDIKLGAEDKERGARLLDRWRHLTTAIDESFEVVQIALVGKYTHLKDSYLSVIKALEHSSMRCKRKLEIVWVEASDLEPEMSASDKEKFQQAWKSLSSSDGILVPGGFGTRGTEGMILAAKWARENKIPYLGVCLGLQVATIEFARHVLGIADATSSEFYPEVAEDKQVVVYMPEIDKQNMGGTMRLGLRPTIFQEDTDWSIIRKLYGSASSVEERHRHRYEINPKMVQKLEEHGLKFVGRDETGTRCEILELVDHPYYVATQYHPEYMSKVLDPSQPFLGLVAAAANILPSLLAAERAVGARADF

SEQ ID NO: 31272 - DNA, 1635 bp, Azospirillum brasilense
  CDS (1)..(1635): transl_table=11
atgactcgctacatcttcatcaccggtggcgtcgtttcctcgctgggcaaaggtctggcgtcggcggcgcttggggcgcttctccaggcgcgcggctacaaggtgcggcttgcgaagctggacccgtacctgaacgtggaccccggcacgatgagcccgtaccagcacggcgaggtctatgtgaccgacgacggcgctgagaccgacctcgacctcggccattacgagcgcttcaccggcgtggccgcgcgccgtggcgacaacatcaccacgggccgcatctattcgaacgtgatcgccaaggagcgccgcggcgactatctgggcgccaccgtgcaggtgattccgcacgtcaccgaccagatcaaggacttcatcggcgctgagacgaccgacgaggacttcatcctctgcgagatcggcggcacggtgggcgacatcgagtcgacccccttcctggaagccatccgccagttcggcaacgaggtcggtccggagaacgccctgttcatccacctgaccctgctgccctacattccgacggcgggcgagctgaagaccaagccgacgcagcattccgtgaaggagctgctgggcatgggcatccaggccaacatcctgctctgccgcgccgaccgcccgattccggagaacgagcgcaagaagatcgcgctgttctgcaacatccggccggagcgcgtcatcgccgccctggacgtcgattcgatctatcaggtgccggtcagctaccacgaggaaggcttcgacacccaggtgctggcctatttcggcctgccgaccgagggcaagccggacctgtcgcgctggaccagcattgtcgagcgcgtgcgcaagccgcagggcgaggtgaccatcgccgtcgtcggcaagtacaccagcctgctcgacagctacaagtcgctggccgaggcgctgacccacggcggcatcgccaacaacgtgaaggtcaagctcgactggatcgactcggagatcttcgaggacgagagcgcggttcagcggctggagaacgtccacggcatcctggtgcccggcggcttcggctcgcgcggcacggaaggcaagatccgcgccgcccagttcgcccgtgagcgcaaggtgccgtatttcggcatctgcttcggcatgcagatggcggtgatcgaatcggcccgcaacatggccggaatcgtcgacgccggctcgaccgagcttggcaagcccggcaacccggtggtcggcctcctcggcctgatgaccgagtggatgcgcggcaacagcctggagaagcgcacggagggcaccgatgtcggcggcaccatgcgtctcggcacctatccggcgaagctggtccccggcagcaaggtcgcggaggtctacgggaccaccgacatcaccgagcggcaccgccaccgctacgaggtgaacgtctattacaaggaccgtctggagaaggtcggcctgctgttctccggcctgtcgccgacgcaactgcccgagatcgtcgagatcccggaccatccctggtttatcggcgtgcagttccacccggagctgaagtccaagcctttcgacccgcacccgctcttcacctccttcatcaaggcggcgatcgagcagagccggctggtctga

SEQ ID NO: 31273 - protein, 544 aa, Azospirillum brasilense
MTRYIFITGGVVSSLGKGLASAALGALLQARGYKVRLAKLDPYLNVDPGTMSPYQHGEVYVTDDGAETDLDLGHYERFTGVAARRGDNITTGRIYSNVIAKERRGDYLGATVQVIPHVTDQIKDFIGAETTDEDFILCEIGGTVGDIESTPFLEAIRQFGNEVGPENALFIHLTLLPYIPTAGELKTKPTQHSVKELLGMGIQANILLCRADRPIPENERKKIALFCNIRPERVIAALDVDSIYQVPVSYHEEGFDTQVLAYFGLPTEGKPDLSRWTSIVERVRKPQGEVTIAVVGKYTSLLDSYKSLAEALTHGGIANNVKVKLDWIDSEIFEDESAVQRLENVHGILVPGGFGSRGTEGKIRAAQFARERKVPYFGICFGMQMAVIESARNMAGIVDAGSTELGKPGNPVVGLLGLMTEWMRGNSLEKRTEGTDVGGTMRLGTYPAKLVPGSKVAEVYGTTDITERHRHRYEVNVYYKDRLEKVGLLFSGLSPTQLPEIVEIPDHPWFIGVQFHPELKSKPFDPHPLFTSFIKAAIEQSRLV

SEQ ID NO: 31274 - DNA, 1638 bp, Azoarcus sp
  CDS (1)..(1638): transl_table=11
atgaccaaatacgtcttcgtaaccggcggtgtcgtgtcctccctgggcaaaggcatcgcagcggcctcgctcggggccattctcgaatcccgcggcatcaaggtcacccacctcaagctcgatccgtatatcaacgtcgatccgggcacgatgagcccgtttcagcacggcgaagttttcgtcactgaagacggcgctgaaaccgacctcgatctgggtcactacgagcgcttcacgagcgccaggatgggcaagcgcaacaacttcaccaccggccagatctacgagtcggtgatcaagaaggaacggcgcggcgagtacctcggcaagacggtgcaggtgatcccgcacatcaccgacgagatcaagcagtacatcaagcgcggcgcggaaggtgccgaagtcgcgatcgtcgagatcggcggcacggtcggagacatcgagtcgctgccgttcctcgaagcgatccgccagatgggcatcgaggaaggacgcaacagcacctgtttcatccatctgacgctgatcccgtacatcccgaccgccggtgagctgaagaccaagccgacgcagcactcggtgaaggaactgcgcgagatcggcatccagcccgacatcctgctgtgccgcgcggatcgcccggtgccggccgacgagcggcgcaagatcgcactgttctgcaacgtcatgcccgaagcagtcatcgagtgcctcgacgcgaactcgatctacaagatcccgggccagctgcacgaccagatgctcgacgagatcgtctgccacaagctgaatatcctcgcgcgcgcggccgacctttcggtgtgggaaaaccttcttcgcgcgctcgaaaacccgaagcacaccgtcgacatcgcgttcgtcggcaaatacgtcgatctcaccgaatcgtacaagtcgctgatcgaagccgtgtcccacgccggcatgcacaccgagagcaaggtcaagatccattacatcgactccgaggacatcgagcgcgacggctgcgcggtgctggagaagatggacgcggtcctcgtgccgggtggtttcggcaagcgcggcaccgaaggcaagatcgccgcgatccgctttgcgcgcgagaacaaggtgccgtatctgggcatctgcctcggcatgcagctcgcggtgatcgaattcgcccgcaacgtcgtcggcctggccggcgcgcattcgaccgaattcgagcgcgacacgccgtatccggtgatcggcctgatcaccgaatggcaggatcgcagcggcaagctcgaaaagcgcaccgaagcgtcggacctcggcggcacgatgcgcctgggcgcgcaggtctgccatctcgtcgaaaactcgctcgcgcgcgaagtgtatggcgtcgccgatatcgtcgaacgtcatcgccaccgctatgaagtcaacaacacgctgctcgcccggctcgaagagaagggcctgcgcgtgtcgggccgcgcgccgggcaccgacctgtgtgaaatgatcgaactgccggatcatccgtggttcgtcggttgccagttccatccggaattcacgtcgaacccgcgcaaggggcacccgctgttcacggcctacgtgaaggcggcgctcgcgcgcaaggcggccgcgacgtcggcctga

SEQ ID NO: 31275 - protein, 545 aa, Azoarcus sp
MTKYVFVTGGVVSSLGKGIAAASLGAILESRGIKVTHLKLDPYINVDPGTMSPFQHGEVFVTEDGAETDLDLGHYERFTSARMGKRNNFTTGQIYESVIKKERRGEYLGKTVQVIPHITDEIKQYIKRGAEGAEVAIVEIGGTVGDIESLPFLEAIRQMGIEEGRNSTCFIHLTLIPYIPTAGELKTKPTQHSVKELREIGIQPDILLCRADRPVPADERRKIALFCNVMPEAVIECLDANSIYKIPGQLHDQMLDEIVCHKLNILARAADLSVWENLLRALENPKHTVDIAFVGKYVDLTESYKSLIEAVSHAGMHTESKVKIHYIDSEDIERDGCAVLEKMDAVLVPGGFGKRGTEGKIAAIRFARENKVPYLGICLGMQLAVIEFARNVVGLAGAHSTEFERDTPYPVIGLITEWQDRSGKLEKRTEASDLGGTMRLGAQVCHLVENSLAREVYGVADIVERHRHRYEVNNTLLARLEEKGLRVSGRAPGTDLCEMIELPDHPWFVGCQFHPEFTSNPRKGHPLFTAYVKAALARKAAATSA

SEQ ID NO: 31276 - DNA, 1608 bp, Bacillus anthracis
  CDS (1)..(1608): transl_table=11
atgactaagtatatttttgtaacaggcggtgtagtatcgtctttaggaaaaggtattacagcagcatctcttggaagacttttaaaaaatcgtggtttaaacgtaacgattcaaaagtttgatccatacattaacgtagacccagggactatgagcccataccaacacggtgaggtgttcgtaacagatgatggcgcagaaactgacttagaccttggtcactatgagcgtttcatcgacattaacttaaacaaatacagcaacgtaacaacaggtaaaatttactcttcagttcttcaaaaagagcgtcgcggtgaatacctaggaggaacagttcaagttattcctcacattactaacgaaattaaagagcgcgtataccgttctggtcgcgaaacaaacgcggatgttgttattacagaaattggtggaactgttggtgacatcgagtctctaccattcttagaagcaatccgtcaaattaagagcgacatcggtcgtgacaatgtaatgtacattcactgtacgttaatcccgtacttaaaagcagcgggtgaaatgaaaacaaaaccaacgcaacatagcgttaaagagcttcgcagcttaggtattcaaccaaatattatcgttgttcgtacagaaatgcctgtttctcaagatatgaaagacaagcttgcattattctgtgacattgatacaaaagcagttattgaagcacgcgatgcagatactttatatgcggttccattatctcttcaagagcaaaatatggaccaaatcgtttgcgatcacttaaaattagacaatccagctgcagatatgacagagtggactgcgctagttgaaaaagtgcgtaacctttctaagaaaacaaaaatcgctcttgttggtaaatacgtagagcttcaagatgcatacatttctgttgtagaagcacttcgtcatgcaggttactctttcgacacagatgtagaagtgaaatgggtaaacgctgagcacgtaacagcagagaacgtacaagaattagttggtgacacagacggtatccttgtaccaggtggcttcggcgatcgtggtgtagaaggtaaaatcgttgcaattcaatatgctcgtgaaaacaaagttccattcttaggaatttgcttaggtatgcaacttgcatcaatcgaattcgcacgtaacgtattaggattagaaggagctaactcttctgaaattaatcctgacacaccttatgcaatcattgacttattaccagaacaaaaagatgtagaagacttaggtggtacacttcgtcttggtttatacccatgtaagctttctgaagaaacaaatgcttacaatgcttacaatgagccggttgtatatgagcgtcatcgtcatcgttatgagttcaacaatcaattccgtccggatatggaaaaagcaggatttgtattctctggtacaagcccagacggccgtctagttgaaatcattgaattaaaagatcacccttggttcgtggcagcacagttccacccagaactagtttctcgtccaaaccgtccacaaccattgttccatgactttgtaaaagcttctcttacgaataaagagagcaagtaa

SEQ ID NO: 31277 - protein, 535 aa, Bacillus anthracis
MTKYIFVTGGVVSSLGKGITAASLGRLLKNRGLNVTIQKFDPYINVDPGTMSPYQHGEVFVTDDGAETDLDLGHYERFIDINLNKYSNVTTGKIYSSVLQKERRGEYLGGTVQVIPHITNEIKERVYRSGRETNADVVITEIGGTVGDIESLPFLEAIRQIKSDIGRDNVMYIHCTLIPYLKAAGEMKTKPTQHSVKELRSLGIQPNIIVVRTEMPVSQDMKDKLALFCDIDTKAVIEARDADTLYAVPLSLQEQNMDQIVCDHLKLDNPAADMTEWTALVEKVRNLSKKTKIALVGKYVELQDAYISVVEALRHAGYSFDTDVEVKWVNAEHVTAENVQELVGDTDGILVPGGFGDRGVEGKIVAIQYARENKVPFLGICLGMQLASIEFARNVLGLEGANSSEINPDTPYAIIDLLPEQKDVEDLGGTLRLGLYPCKLSEETNAYNAYNEPVVYERHRHRYEFNNQFRPDMEKAGFVFSGTSPDGRLVEIIELKDHPWFVAAQFHPELVSRPNRPQPLFHDFVKASLTNKESK

SEQ ID NO: 31278 - DNA, 1608 bp, Bacillus cereus
  CDS (1)..(1608): transl_table=11
atgactaagtatatttttgtaacaggcggtgtagtgtcgtctctaggaaaaggtattacagcagcatctcttggaagacttttaaaaaatcgtggtttaaacgtaacgattcaaaagtttgatccatacattaacgtagacccagggactatgagcccataccaacacggtgaggtattcgtaacagatgatggtgcagaaactgacttagaccttggtcactatgagcgtttcatcgacatcaatttaaataaatacagcaacgtaacaacaggtaaaatttactcttcagttcttcaaaaagagcgtcgtggtgaatacctaggaggaacagttcaagttattcctcacattactaacgaaattaaagagcgcgtataccgttctggtcgcgaaacaaacgcggacgttgttattacagaaatcggtggaactgttggtgacattgagtctctaccattcttagaagcaatccgtcaaattaagagcgacatcggtcgtgacaatgtaatgtacattcactgtacgttaatcccgtacttaaaagcagcgggtgaaatgaaaacaaaaccaacgcaacatagcgttaaagagcttcgcagtttaggtattcaaccaaatattatcgttgttcgtacagaaatgcctgtttctcaagatatgaaagacaagcttgcattattctgtgacattgatacaaaagcagttattgaagcacgcgatgcagatactttatatgcagttccattatctcttcaagagcaaaatatggaccaaatcgtttgcgatcacttaaaattagacaatccagctgcagatatgacagagtggactgcgctagttgaaaaagtgcgtaacctttctaagaaaacaaaaatcgctcttgttggtaaatacgtagagcttcaagatgcatacatttctgttgtagaagcacttcgtcatgcaggttactctttcgacacagatgtagaagtgaaatgggtaaatgctgagcacgtaacagcagagaacgtacaagaattagtaggagatacagatggtatccttgtaccaggtggcttcggtgatcgtggtgtagaaggtaaaatcgttgcaattcaatatgctcgtgaaaacaaagttccattcctaggaatttgcttaggtatgcaacttgcatcaatcgaattcgcacgtaacgtattaggattagaaggagctaactcttctgaaatcaatcctgacacaccttatgcaatcatcgacttattaccagaacaaaaagatgtagaagacttaggtggtacacttcgtcttggtctatacccatgtaagcttgctgaagaaacaaatgcttacaacgcttacaatgagccggttgtatatgagcgtcatcgtcatcgttatgagttcaacaatcaattccgtccggatatggaaaaagcaggatttgtattctctggtacaagcccagacggccgtttagttgaaatcgttgaattgaaagatcacccttggttcgtagcagcacagttccacccagaacttgtttctcgtccaaaccgtccacaaccattgttccatgacttcgtaagagcgtctattacgaataaagagagcaagtaa

SEQ ID NO: 31279 - protein, 535 aa, Bacillus cereus
MTKYIFVTGGVVSSLGKGITAASLGRLLKNRGLNVTIQKFDPYINVDPGTMSPYQHGEVFVTDDGAETDLDLGHYERFIDINLNKYSNVTTGKIYSSVLQKERRGEYLGGTVQVIPHITNEIKERVYRSGRETNADVVITEIGGTVGDIESLPFLEAIRQIKSDIGRDNVMYIHCTLIPYLKAAGEMKTKPTQHSVKELRSLGIQPNIIVVRTEMPVSQDMKDKLALFCDIDTKAVIEARDADTLYAVPLSLQEQNMDQIVCDHLKLDNPAADMTEWTALVEKVRNLSKKTKIALVGKYVELQDAYISVVEALRHAGYSFDTDVEVKWVNAEHVTAENVQELVGDTDGILVPGGFGDRGVEGKIVAIQYARENKVPFLGICLGMQLASIEFARNVLGLEGANSSEINPDTPYAIIDLLPEQKDVEDLGGTLRLGLYPCKLAEETNAYNAYNEPVVYERHRHRYEFNNQFRPDMEKAGFVFSGTSPDGRLVEIVELKDHPWFVAAQFHPELVSRPNRPQPLFHDFVRASITNKESK

SEQ ID NO: 31280 - DNA, 1608 bp, Bacillus cereus
  CDS (1)..(1608): transl_table=11
atgactaagtatatttttgtaacaggcggtgtagtatcgtctttaggaaaaggtattacagcagcatctcttggaagacttttaaaaaatcgtggtttaaacgtaacgattcaaaagtttgatccatacattaacgtagacccagggactatgagcccatatcaacacggtgaggtattcgtaacagatgatggcgcagaaactgacttagaccttggtcactatgagcgttttatcgacattaacttaaacaaatacagcaacgtaacaacaggtaaaatttactcttcagttcttcaaaaagagcgtcgcggtgaatatttaggaggaacagttcaagttattcctcacattactaacgaaattaaagaacgcgtatatcgttctggtcgtgaaacaaatgcggatgttgttattacagaaatcggtggaactgttggtgacatcgagtctctaccattcttagaagcaatccgtcaaattaagagcgacatcggtcgtgacaatgtaatgtacattcactgtacgttaatcccgtacttaaaagcagcgggtgaaatgaagacaaaaccaacacaacatagtgttaaagaacttcgtagcttaggaattcaaccaaacattatcgttgttcgtacagaaatgcctgtttctcaagatatgaaagacaagcttgcattattctgtgacattgatacaaaagcagttatcgaagctcgcgatgcagatactttatatgcggttccattatctcttcaagaacaaaatatggaccaaatcgtttgtgaccacttaaaattagacaatccagctgcagatatgacagagtggactgctctagttaacaaagtgcgtaatctttctaagaaaacaaaaatcgctcttgttggtaaatatgtagaacttcaagatgcttatatttctgttgtagaagcacttcgtcatgctggttactcattcgacacagatgtagaagtaaaatgggtaaatgctgagcacgtaacagcagaaaacgtaaaagaattagttggcgatacagatggtatccttgtaccaggtggcttcggtgatcgtggtgtagaaggtaaaatcgttgcgattcaatatgctcgtgaaaacaaagttccattcttaggaatttgcttaggtatgcaacttgcatcaatcgaattcgcacgtaatgtattaggtttagaaggtgctaactcttctgaaatcaaccctgacacaccatatgcaatcatcgacttattaccagaacaaaaagatgtagaggacctaggtggtacacttcgtcttggtctatacccatgtaagcttgctgaagaaacaaatgcttacaatgcttataatgagccggttgtatatgaacgtcatcgtcatcgttatgagttcaacaaccagttccgtccggatatggaaaaagaaggatttgtattctctggtacaagcccagacggtcgtctagttgaaatcattgaattaaaagatcatccttggttcgtggcagcacagttccacccagaacttgtttctcgtccaaaccgtccacaaccattgttccatgacttcgtaagagcttctattacgaataaagagagcaagtaa

SEQ ID NO: 31281 - protein, 535 aa, Bacillus cereus
MTKYIFVTGGVVSSLGKGITAASLGRLLKNRGLNVTIQKFDPYINVDPGTMSPYQHGEVFVTDDGAETDLDLGHYERFIDINLNKYSNVTTGKIYSSVLQKERRGEYLGGTVQVIPHITNEIKERVYRSGRETNADVVITEIGGTVGDIESLPFLEAIRQIKSDIGRDNVMYIHCTLIPYLKAAGEMKTKPTQHSVKELRSLGIQPNIIVVRTEMPVSQDMKDKLALFCDIDTKAVIEARDADTLYAVPLSLQEQNMDQIVCDHLKLDNPAADMTEWTALVNKVRNLSKKTKIALVGKYVELQDAYISVVEALRHAGYSFDTDVEVKWVNAEHVTAENVKELVGDTDGILVPGGFGDRGVEGKIVAIQYARENKVPFLGICLGMQLASIEFARNVLGLEGANSSEINPDTPYAIIDLLPEQKDVEDLGGTLRLGLYPCKLAEETNAYNAYNEPVVYERHRHRYEFNNQFRPDMEKEGFVFSGTSPDGRLVEIIELKDHPWFVAAQFHPELVSRPNRPQPLFHDFVRASITNKESK

SEQ ID NO: 31282 - DNA, 1608 bp, Bacillus cereus
  CDS (1)..(1608): transl_table=11
atgactaagtatatttttgtaacaggcggtgtagtatcgtctttaggtaaaggtattacagcagcatctcttggacgacttttaaaaaatcgtggtttaaatgtaacgattcaaaaatttgatccatacattaacgtagacccagggactatgagcccataccaacacggtgaggtattcgtaacagatgatggtgcagaaactgacttagaccttggtcactatgagcgtttcatcgacatcaacttaaacaaatacagcaacgtaacaacgggtaaaatttactcttcagttcttcaaaaagagcgtcgtggtgaatacctaggaggaacagttcaagttattcctcacattactaacgaaattaaagagcgcgtataccgttctggtcgcgaaacaaacgcggatgttgttattacagaaattggtggaactgttggtgacatcgagtctctaccattcttagaagcaatccgtcaaattaagagcgacatcggtcgtgataatgtaatgtacattcactgtacgttaatcccgtacttaaaagcagcgggtgaaatgaaaacaaaaccaacgcaacatagcgttaaagagcttcgcagcttaggtattcaaccaaatattatcgttgttcgtacagaaatgcctgtttctcaagatatgaaagacaagcttgcattattctgtgacattgatacaaaagcagttattgaagcacgcgatgcagatactttatatgcggttccattatctcttcaagagcaaaatatggaccaaatcgtttgcgatcacttaaaattagacaatccagctgcagatatgacagagtggactgcgttagttgaaaaagtgcgtaacctttctaagaaaacaaaaatcgctcttgttggtaaatacgtagagcttcaagatgcatacatttctgttgtagaagcacttcgtcatgcaggttactctttcgacacagatgtagaagtgaaatgggtaaacgctgagcatgtaacagcagagaacgtacaagaattagttggtgacacagacggtatccttgtaccaggtggcttcggcgatcgtggtgtagaaggtaaaatcgttgcaattcaatatgctcgtgaaaacaaagttccattcttaggaatttgcttaggtatgcaacttgcatcaatcgaatttgcacgtaacgtattaggattagaaggagctaactcttctgaaattaatcctgacacaccgtatgcaatcattgacttattaccagaacaaaaagatgtagaagacttaggtggtacacttcgtcttggtctatacccatgtaagctttctgaagaaacaaatgcttacaatgcttacaatgagccggttgtatatgagcgtcatcgtcatcgttatgagttcaacaatcaattccgtccggatatggaaaaagcaggatttgtattctctggtacaagcccagacggtcgtctagttgaaatcattgaattaaaagatcacccttggttcgtggcagcacagttccacccagaactagtttctcgtccaaaccgtccacaaccattgttccatgacttcgtaagagcttctattacgaataaagagagcaagtaa

SEQ ID NO: 31283 - protein, 535 aa, Bacillus cereus
MTKYIFVTGGVVSSLGKGITAASLGRLLKNRGLNVTIQKFDPYINVDPGTMSPYQHGEVFVTDDGAETDLDLGHYERFIDINLNKYSNVTTGKIYSSVLQKERRGEYLGGTVQVIPHITNEIKERVYRSGRETNADVVITEIGGTVGDIESLPFLEAIRQIKSDIGRDNVMYIHCTLIPYLKAAGEMKTKPTQHSVKELRSLGIQPNIIVVRTEMPVSQDMKDKLALFCDIDTKAVIEARDADTLYAVPLSLQEQNMDQIVCDHLKLDNPAADMTEWTALVEKVRNLSKKTKIALVGKYVELQDAYISVVEALRHAGYSFDTDVEVKWVNAEHVTAENVQELVGDTDGILVPGGFGDRGVEGKIVAIQYARENKVPFLGICLGMQLASIEFARNVLGLEGANSSEINPDTPYAIIDLLPEQKDVEDLGGTLRLGLYPCKLSEETNAYNAYNEPVVYERHRHRYEFNNQFRPDMEKAGFVFSGTSPDGRLVEIIELKDHPWFVAAQFHPELVSRPNRPQPLFHDFVRASITNKESK

SEQ ID NO: 31284 - DNA, 1602 bp, Bacteroides fragilis
  CDS (1)..(1602): transl_table=11
gtgggagaaacaaagtatattttcgtcaccggtggtgttgcctcttctttaggaaaaggtatcatttcatcttccatcggtaaattgctgcaagcaagaggttataaagtaactatccagaagtttgacccgtacatcaacattgacccgggaacattgaacccttatgaacacggagaatgctacgtgactgtagacggccatgaagccgatcttgacttaggacactacgaacgtttcctgggcatccagacaacgaaggccaacaacatcacgacaggccgtatctataagagcgtcatcgataaagaacgccgtggagattatttggggaaaaccattcaggtgattcctcatatcaccgatgaaatcaaacgtaacgtcaagttactgggtaacaagtataagttcgactttgtaatcacagaaattggcggaacagtaggtgatatcgaatctttgccttatctggaaagtattcgtcagttgaaatgggaactgggtcagaatgccttgtgtgtacacctgacttatgtacctttcctgtccgctgcccaagagttaaaaaccaaaccgactcaacattccgtaaaagagttgcaatcactcggtgtacagccggatatcctggtgctacgtaccgaacatgacctgaataccaacttgcgcaagaaggtcgctctgttctgtaatgtagccgaaaacgcagttgttcagtcaatcgacgcttcaactatttatgaagtacctctgttgatgcaagagcaaggcctggacgaaaccatactccaaaagatgggtctgcctgtaggcgaacgtccgccgttgggtccttggaaagacttcctgaaccgtcgtgccaatgcaactgaaacagtaaccattgcaatggtaggtaaatatgttgaattgcaggatgcctacaaatctattctggaatccttgtcacaagctgctacctacaatgaccgtaaagtaaaaatagaatatgtatcatccgaacatctgactccggacaatgtagacgaacaattgggacatgtaaacggagtagttatctgtccgggattcggttcacgcggtatcgaaggtaagttcgtagctgccaaatacacccgcgaacacaacattccgacattcggtatctgtctgggtatgcaatgtatggctatcgagtttgcccgtaatgtgttgggttatgccgatgccaactccattgaaatggatgaaaagaccaagcacaacgtgatcgacatcatggaagagcagaaagccatcaccaatatgggaggtactatgcgtctgggagcttacgaatgtgtattgaagaaagactctaaggtatacgaagcctacaaagaagaacacattcaggagcgtcatcgccaccgctacgaattcaacaacgactatcgcaaacaattcgaagaggccggcatgaagtgtgtaggtatcaaccccgagtccgacttggtagaaattgtagagattcctacattgaaatggtacatcggaacacagttccatccggaatacagcagtaccgtactacacccgcatccgttgttcgtgtcgttcatcaaggctgcaatcgataagtaa

SEQ ID NO: 31285 - protein, 533 aa, Bacteroides fragilis
MGETKYIFVTGGVASSLGKGIISSSIGKLLQARGYKVTIQKFDPYINIDPGTLNPYEHGECYVTVDGHEADLDLGHYERFLGIQTTKANNITTGRIYKSVIDKERRGDYLGKTIQVIPHITDEIKRNVKLLGNKYKFDFVITEIGGTVGDIESLPYLESIRQLKWELGQNALCVHLTYVPFLSAAQELKTKPTQHSVKELQSLGVQPDILVLRTEHDLNTNLRKKVALFCNVAENAVVQSIDASTIYEVPLLMQEQGLDETILQKMGLPVGERPPLGPWKDFLNRRANATETVTIAMVGKYVELQDAYKSILESLSQAATYNDRKVKIEYVSSEHLTPDNVDEQLGHVNGVVICPGFGSRGIEGKFVAAKYTREHNIPTFGICLGMQCMAIEFARNVLGYADANSIEMDEKTKHNVIDIMEEQKAITNMGGTMRLGAYECVLKKDSKVYEAYKEEHIQERHRHRYEFNNDYRKQFEEAGMKCVGINPESDLVEIVEIPTLKWYIGTQFHPEYSSTVLHPHPLFVSFIKAAIDK

SEQ ID NO: 31286 - DNA, 1599 bp, Bacillus halodurans
  CDS (1)..(1599): transl_table=11
atgacgacaaagtacatttttgtgacaggtggggttgtatcctcattaggaaaaggaattaccgcggcatccctcggtcgattgttaaagaatcgcgggatgaaggtgacgatccaaaagttcgatccgtacatcaatgttgatcctgggacgatgagtccttatcagcacggggaagtatttgtcacagatgatggcgctgaaaccgatttggatctcgggcactatgaacgttttattgatattaatttgaataaaaacagcaatgtgacgacagggaaaatttactcctctgtacttaagaaggagcgtcgtggcgattaccttggcggaacagtccaagtcatcccccacgttacgaacgagattaaagagagggtgtttcgtgcagggcgtgagaccaatgcggatgtggtcattaccgagattggtggaacagttggcgatattgaaagcttgccatttttagaagcgattcgccaaattaagagtgacatcggtgttgacaatgtcatgtacatccactgtacgcttattccttatttagctgcagcaggtgagatgaaatcaaagccgacccagcatagtgttaaagaactccgtagcctaggaatccagccgaacgtcattgtcgtacgaacagaaaagccagttcctgaagaaatgaaggaaaaaattgcgctattttgtgatattcgtaaagactctgttattgaggcgcgcgatgcagatacgctttatgaagtgccattagacttacaagcgcaaaatctcgatgaaatcgtttgtgatcatttaaacctttcttgccaagaagcggatatgacagagtggaaatcacttgtcgagaaggtgaaaaatctatcaggccttgtgaaaatcgcccttgtcggcaaatatgtggcattaccagatgcttacttatctgtagccgaggctttgcgtcatgccggctatgcttttgatgcagatattaacattaaatgggttgattcggaagatgtaacggcagaaaacgttgccgaacaattgcagggagtggatggtatcctcgttcccggaggctttggtgatcgaggaatcgaaggtaagatcgaagcaatccgctatgcgcgtgagcaaaaaataccgtttttagggatttgcttggggatgcaattagcttcaattgagtttgctcgcaatgtccttgggctggaaggcgctcattctgcggaaattaatccagatacgccgcatccaattatcgatttgttgccagaacaaaaagatgtagaagatatgggaggaacgctccgcttaggcctttatccttgcaagctgaagaacggaacacttgcccaatcagcttacaatgaccaagtgatttatgagcgtcaccgtcatcgatatgaatttaataatcaataccgtgagcaaatggaagccaaaggctttatgttctctgggacgagtcctgatggacggctcgtggaaattgttgagctaggggatcatccgttttttatcgcctctcagttccatccagagttcgtttcacgaccaacacggcctcagccgttattccgagaatttatccaagcttccttacgaaaatga

SEQ ID NO: 31287 - protein, 532 aa, Bacillus halodurans
MTTKYIFVTGGVVSSLGKGITAASLGRLLKNRGMKVTIQKFDPYINVDPGTMSPYQHGEVFVTDDGAETDLDLGHYERFIDINLNKNSNVTTGKIYSSVLKKERRGDYLGGTVQVIPHVTNEIKERVFRAGRETNADVVITEIGGTVGDIESLPFLEAIRQIKSDIGVDNVMYIHCTLIPYLAAAGEMKSKPTQHSVKELRSLGIQPNVIVVRTEKPVPEEMKEKIALFCDIRKDSVIEARDADTLYEVPLDLQAQNLDEIVCDHLNLSCQEADMTEWKSLVEKVKNLSGLVKIALVGKYVALPDAYLSVAEALRHAGYAFDADINIKWVDSEDVTAENVAEQLQGVDGILVPGGFGDRGIEGKIEAIRYAREQKIPFLGICLGMQLASIEFARNVLGLEGAHSAEINPDTPHPIIDLLPEQKDVEDMGGTLRLGLYPCKLKNGTLAQSAYNDQVIYERHRHRYEFNNQYREQMEAKGFMFSGTSPDGRLVEIVELGDHPFFIASQFHPEFVSRPTRPQPLFREFIQASLRK

SEQ ID NO: 31288 - DNA, 1608 bp, Bacillus thuringiensis subsp
  CDS (1)..(1608): transl_table=11
atgactaagtatatttttgtaacaggcggtgtagtatcgtctttaggtaaaggtattacagcagcatctcttggacgacttttaaaaaatcgtggtctaaacgtaacgattcaaaaatttgatccatacattaacgtagacccagggactatgagcccataccaacacggtgaggtattcgtaacagatgatggtgcagaaactgacttagaccttggtcactatgagcgtttcatcgacatcaacttaaacaaatacagcaacgtaacaacgggtaaaatttactcttcagttcttcaaaaagagcgtcgtggtgaatacctaggaggaacagttcaagttattcctcacattactaacgaaattaaagagcgcgtatatcgttctggtcgcgaaacaaacgcggacgttgttattacagaaattggtggaactgttggtgacatcgagtctctaccattcttagaagcaatccgtcaaattaagagcgacatcggtcgtgacaatgtaatgtacattcactgtacgttaatcccgtacttaaaagcagcgggtgaaatgaaaacaaaaccaacgcaacatagcgttaaagaacttcgcagcttaggtattcaaccaaatattatcgttgttcgtacagaaatgcctgtttctcaagatatgaaagacaagcttgcattattctgtgatattgatacaaaagcagttattgaagcacgcgatgcagatactttatatgcggttccattatctcttcaagagcaaaatatggaccaaatcgtttgcgatcacttaaaattagacaatccagctgcagatatgacagagtggactgcgctagttgaaaaagtgcgtaacctttctaagaaaacaaaaatcgctcttgttggtaaatacgtagagcttcaagatgcatacatttctgttgtagaagcacttcgtcatgcaggttactctttcgacacagatgtagaagtgaaatgggtaaatgctgagcacgtaacagcagagaacgtacaagaattagtaggagacacagatggtatccttgtaccaggtggcttcggcgatcgtggtgtagaaggtaaaatcgttgcaattcaatatgctcgtgaaaacaaagttccattcttaggaatttgcttaggtatgcaacttgcatcaatcgaattcgcacgtaacgtattaggattagaaggagctaactcttctgaaattaatcctgacacaccttatgcaatcattgacttattaccagaacaaaaagatgtagaagacttaggtggtacacttcgtcttggtttatacccatgtaagctttctgaagaaacaaatgcttacaatgcttacaatgagccggttgtatatgagcgtcatcgtcatcgttatgagttcaacaatcaattccgtccggatatggaaaaagaaggatttgtattctctggtacaagcccagacggccgtttagttgaaatcattgaattgaaagatcatccttggttcgtggcagcacagttccacccagaacttgtttctcgtccaaaccgtccacaaccattgttccatgacttcgtaaaagcttctattacgaataaagagagcaagtaa

SEQ ID NO: 31289 - protein, 535 aa, Bacillus thuringiensis subsp
MTKYIFVTGGVVSSLGKGITAASLGRLLKNRGLNVTIQKFDPYINVDPGTMSPYQHGEVFVTDDGAETDLDLGHYERFIDINLNKYSNVTTGKIYSSVLQKERRGEYLGGTVQVIPHITNEIKERVYRSGRETNADVVITEIGGTVGDIESLPFLEAIRQIKSDIGRDNVMYIHCTLIPYLKAAGEMKTKPTQHSVKELRSLGIQPNIIVVRTEMPVSQDMKDKLALFCDIDTKAVIEARDADTLYAVPLSLQEQNMDQIVCDHLKLDNPAADMTEWTALVEKVRNLSKKTKIALVGKYVELQDAYISVVEALRHAGYSFDTDVEVKWVNAEHVTAENVQELVGDTDGILVPGGFGDRGVEGKIVAIQYARENKVPFLGICLGMQLASIEFARNVLGLEGANSSEINPDTPYAIIDLLPEQKDVEDLGGTLRLGLYPCKLSEETNAYNAYNEPVVYERHRHRYEFNNQFRPDMEKEGFVFSGTSPDGRLVEIIELKDHPWFVAAQFHPELVSRPNRPQPLFHDFVKASITNKESK

SEQ ID NO: 31290 - DNA, 1605 bp, Bacillus clausii
  CDS (1)..(1605): transl_table=11
atggcagcgaagtatatatttgtgacaggcggagtcgtatcatcacttggaaaagggattacggcagcatcacttggccggcttttgaaaaaccgcggcttaaaagtgaccatccagaaatttgacccatacattaacgtcgaccctgggacgatgagcccttaccagcacggggaagtgtttgttactgacgacggtgccgagacggacctcgatctaggccattatgagcgctttattgatattaatttaagccagaattcaaatattacaacaggacgcgtgtattcgactgttttgaaaaaagaacgccgtggcgattatcttggcggaacagttcaagttattccccatgttaccaatgaaattaaagagcgtgttttccgggcaggacgggaaacaggggcggacgttgtaattacggaaataggcgggaccgttggcgatattgaaagtctgcctttcttagaagcgattcgccaaattaaaagtgatgtcggtatggaaaatgtcttgtatttgcattgtacgttgattccttacttaaaagcagcgggggaaatgaagtcaaaaccgacgcagcactcggttaaagaattacgttcccttgggattcaaccgaatgtcattgtcgttcgtacagaacggaaagtgccgcaagatatgaaggacaaaattgccttattttgcgacatcaaaaaggaagctgtcatcgaagcatgggatgctgacaccctttatcaagtgccccttgatttgcaagcgcaaaaccttgaccaaattgtttgcgaccatttgcagctaaactgccctgaagcaaacatgacggagtggaaagaacttgttaaccgggtgagtcatctttctgaaaaagtacggattgcgattgtcggaaaatacgtcgagcttcaagatgcctacttgtcggttgccgaggcattgcgccatgcaggctatcatgtcgatgccgatattgacattgattgggtgtatgcagagcaagtaaatgatgaaaatgtcgacgagctattaaacaaagcagacggtattcttgtgccagggggattcggtgatcgcggcattgaagggaaaattactgctattcgttatgccagggaaaataaagttccgtttctcggcatttgccttggcatgcagcttgcttctgtggagtttgcgcgtacggtccttggtttgaaaggggccaactctgctgaattaaatccgcaaacgccttacccaatcatcgatttgctgccagagcaaaaagacgttgaagacttgggcggcacacttcgtttagggctgtacccttgcaaactacaagaagggactgcagcccgtgcagcgtatggcgaagaagtcgtttacgaacgccaccgccaccgctatgagtttaacaatgaatatcgggaacaaatggagaaagcaggtttcgtcttttcagggacaagccctgacggacgtttagtggaagtgatcgaggtgacggaccatccgttctttgtggcgagccaattccatccggaatttgtttcccgcccaactcgtccgcaaccgctcttccgtgaatttgttcgtaacgcacttgcagcacaagcttag

SEQ ID NO: 31291 - protein, 534 aa, Bacillus clausii
MAAKYIFVTGGVVSSLGKGITAASLGRLLKNRGLKVTIQKFDPYINVDPGTMSPYQHGEVFVTDDGAETDLDLGHYERFIDINLSQNSNITTGRVYSTVLKKERRGDYLGGTVQVIPHVTNEIKERVFRAGRETGADVVITEIGGTVGDIESLPFLEAIRQIKSDVGMENVLYLHCTLIPYLKAAGEMKSKPTQHSVKELRSLGIQPNVIVVRTERKVPQDMKDKIALFCDIKKEAVIEAWDADTLYQVPLDLQAQNLDQIVCDHLQLNCPEANMTEWKELVNRVSHLSEKVRIAIVGKYVELQDAYLSVAEALRHAGYHVDADIDIDWVYAEQVNDENVDELLNKADGILVPGGFGDRGIEGKITAIRYARENKVPFLGICLGMQLASVEFARTVLGLKGANSAELNPQTPYPIIDLLPEQKDVEDLGGTLRLGLYPCKLQEGTAARAAYGEEVVYERHRHRYEFNNEYREQMEKAGFVFSGTSPDGRLVEVIEVTDHPFFVASQFHPEFVSRPTRPQPLFREFVRNALAAQA

SEQ ID NO: 31292 - DNA, 1608 bp, Bacillus subtilis
  CDS (1)..(1608): transl_table=11
atgacgaaatatatttttgtaaccgggggagttgtatcctcacttggaaagggtattgtagcagcttcattagggcgtttgctgaaaaaccgcggactgaacgtgacgattcaaaaattcgatccatacatcaacgttgacccgggaacaatgagcccgtaccagcacggtgaagtattcgtaacggatgacggcgctgaaacagacttggaccttggtcactatgagcgttttatcgacattaacctgaataaattcagcaacgtgacaacaggtaaaatctattcaacagttcttaaaaaagaacgccgcggagattaccttggaggaaccgtacaggtcattccgcacatcacaaacgaattgaaagaccgtgtttaccgcgcagggaaagagacaaacgcagatgttgtcattacagaaatcggcggtactgtcggagacatcgaatcactgccattccttgaagcgatccgccaaatgaagagcgacatcggccgtgaaaacgtaatgtacatccactgtacgctcgtgccttacattaaagctgctggcgaattaaaaacaaaaccgacacagcacagcgtaaaagaattgcgcagcttgggcattcagccaaacatcatcgtcgttcgtacagaaatgccgatttctcaagatatgaaagataaaatcgcgcttttctgcgacatcgatacaaaagcggttattgaatgtgaagatgcggacaacctttactccattccgctggagcttcaaaaacaagggcttgataagcttgtttgcgagcacatgaaattggcatgcaaagaagcggaaatgtccgagtggaaagagcttgttaacaaagtcagcaacctgtctcaaacgattacaatcggccttgtcggcaaatacgttgagcttcctgacgcatacatttctgttgtcgagtctctccgccatgcgggctatgcgtttgacacagatgtaaaagtgaagtggatcaacgcggaagaagtgacagaaaacaatatcgcagaactcacaagcggaacagacggcatcattgtgccgggcggattcggagaccgcggtgttgaagggaaaatcgtcgcgacaaaatacgcgcgcgaaaacaacattccgttcttgggcatttgcttgggcatgcaggtggcgtctattgaatacgcacgaaacgtattgggcttaaaaggcgctcactcagcggaaattgatccgtcaactcaatacccgatcattgatcttcttcctgaacaaaaggatgttgaggatcttgggggaacgcttcgtctcggcctttacccttgtaagcttgaagaaggcacgaaagcctttgaagtgtatcaggatgaagtggtgtacgagcgccaccgccaccgctatgagtttaacaatgaattcagacagcaaatggaagagcaaggcttcgtattctcaggcacaagccctgatggacgccttgttgaaatcatcgagctgaaagaccacccttggttcgtggcttctcagttccacccagagttcaagtcaagaccgacaagacctcagcctctattcaaaggctttatcggagcgtctgtcgaagctgcaaatcagaagtaa

SEQ ID NO: 31293 - protein, 535 aa, Bacillus subtilis
MTKYIFVTGGVVSSLGKGIVAASLGRLLKNRGLNVTIQKFDPYINVDPGTMSPYQHGEVFVTDDGAETDLDLGHYERFIDINLNKFSNVTTGKIYSTVLKKERRGDYLGGTVQVIPHITNELKDRVYRAGKETNADVVITEIGGTVGDIESLPFLEAIRQMKSDIGRENVMYIHCTLVPYIKAAGELKTKPTQHSVKELRSLGIQPNIIVVRTEMPISQDMKDKIALFCDIDTKAVIECEDADNLYSIPLELQKQGLDKLVCEHMKLACKEAEMSEWKELVNKVSNLSQTITIGLVGKYVELPDAYISVVESLRHAGYAFDTDVKVKWINAEEVTENNIAELTSGTDGIIVPGGFGDRGVEGKIVATKYARENNIPFLGICLGMQVASIEYARNVLGLKGAHSAEIDPSTQYPIIDLLPEQKDVEDLGGTLRLGLYPCKLEEGTKAFEVYQDEVVYERHRHRYEFNNEFRQQMEEQGFVFSGTSPDGRLVEIIELKDHPWFVASQFHPEFKSRPTRPQPLFKGFIGASVEAANQK

SEQ ID NO: 31294 - DNA, 1614 bp, Bacteroides thetaiotaomicron
  CDS (1)..(1614): transl_table=11
gtgggagaaacaaagtatattttcgtcaccggtggtgttgcctcttctttaggaaaagggatcatctcatcctccatcggtaaattgctgcaagcaagaggttacaatgtaaccatccagaagtttgacccgtatatcaacatcgacccgggaacattgaatccttatgagcatggagaatgctatgtgaccgtagacggccatgaagccgatcttgacctgggacactacgaacgtttcctgggtattcagactacaaaggctaacaacatcactacgggacgtatctacaaaagtgttattgacaaagaacgtcgcggagactatctgggtaagacgattcaggtgattcctcatatcacggatgaaatcaaacggaacgtaaaattgctcggtaacaaatacaagttcgattttgtaattaccgaaatcggtggtacggtaggtgatatcgaatcactcccctacctcgaaagtatccgccagttgaaatgggagttgggtaagaacgctctttgcgtacacctgacatatgtgccttatcttgccgctgccggagagctgaaaaccaaaccgacacagcattctgtcaaggaactccagagcgtaggtattcagccggacgtattggtgcttcgtgccgaacacccgctgagcgacggactccgcaaaaaagtagctcaattctgtaatgtggatgacaaggctgtcgtgcagtctatcgacgcagaaacaatttatgaagtacctctcctgatgcaggcacagggactggacagcacaatccttgaaaagatggggctgcccgtaggagaaactccgggactaggtccgtggcgtaaattcctggaacgccgtcatgctgctgaaacgaaagaacccatcaacatcgcattggtaggtaaatatgacttgcaggatgcttacaagtcaatccgtgaagcattgtcacaggcaggtacttacaacgaccgcaaagtggaggttcactttgtgaacagcgaaaaactgacagatgagaacgtagccgaagccttgaaaggcatggcaggcgtgatgatcggtccgggattcggtcagcgtggtatcgacggtaagttcgttgccatcaaatatacacgtacacatgatataccgaccttcggtatctgtctgggtatgcaatgtatcgctatcgaatttgcccgcaacgtattgggatatgccgatgccgactcacgcgaaatggatgaaaagactccgcacaacgtgatcgacatcatggaggaacagaaagcgatcaccaatatgggaggtacgatgcgtctgggcgcttacgaatgtgtgcttcagaaaggatcgaaagcataccttgcttatggtgaagaacatattcaagaacgtcaccgccatcgctatgagttcaacaatgactataaggctcaatacgaagctgccggtatgaaatgcgtgggtatcaaccccgaatcggatctggtggaaatcgttgagatcccggcattgaagtggtttatcggcactcagttccatccggaatacagcagtacggtattgaacccgcatccgttgtttgtggctttcgtgaaggcagccatcgagaacgagaagaattga

SEQ ID NO: 31295 - protein, 537 aa, Bacteroides thetaiotaomicron
MGETKYIFVTGGVASSLGKGIISSSIGKLLQARGYNVTIQKFDPYINIDPGTLNPYEHGECYVTVDGHEADLDLGHYERFLGIQTTKANNITTGRIYKSVIDKERRGDYLGKTIQVIPHITDEIKRNVKLLGNKYKFDFVITEIGGTVGDIESLPYLESIRQLKWELGKNALCVHLTYVPYLAAAGELKTKPTQHSVKELQSVGIQPDVLVLRAEHPLSDGLRKKVAQFCNVDDKAVVQSIDAETIYEVPLLMQAQGLDSTILEKMGLPVGETPGLGPWRKFLERRHAAETKEPINIALVGKYDLQDAYKSIREALSQAGTYNDRKVEVHFVNSEKLTDENVAEALKGMAGVMIGPGFGQRGIDGKFVAIKYTRTHDIPTFGICLGMQCIAIEFARNVLGYADADSREMDEKTPHNVIDIMEEQKAITNMGGTMRLGAYECVLQKGSKAYLAYGEEHIQERHRHRYEFNNDYKAQYEAAGMKCVGINPESDLVEIVEIPALKWFIGTQFHPEYSSTVLNPHPLFVAFVKAAIENEKN

SEQ ID NO: 31296 - DNA, 1629 bp, Bartonella henselae
  CDS (1)..(1629): transl_table=11
atggcacgttatgtttttattactggtggtgtggtttcttcccttggaaaaggcatcgcagcagcagcattagctgcattattgcaagctcgtgggtatagcgtacggcttcgcaaacttgatccttatttgaatgttgatccaggtacgatgtcaccttatcaacatggtgaggtgtttgtaaccgacgatggtgcagaaacggatcttgatcttggtcattatgagcgttttaccgggcgttctgcaaatagccaagacaacattacaacagggcgtatttatcgcaatatcattgaacgagagagacgtggtgattatttgggtgcaacagtccaggtgattcctcatgttactgatgaaattaagagattcattactacgggaaacgaagaatttgactttgttttatgtgaaataggtggcacagttggtgacattgaagcaatgccttttcttgaagcgattcgtcagcttcataatgagttaccgaggcaaaatgttatttatgtgcatcttacattaatgccttatatttcttcggctggtgaattaaaaaccaagccaacacaacattctgtcaaagaattacaatcagttggtattgctcccgatattttgttggtacgtgcagataggcctattccagaaacagagcggagtaaattatcacttttttgtaatgttcgcccaactgctgttattcaggcattagatatgccaacgatttatgatgttcccatagcatatcataaagaggggttagattcagaagttctttctgcttttggaatgcatccagcacataaacccaacatggatcgttgggaagatattacacatcgaattcaccatcccgaaggggaagtgacaattgctgttgttggaaaatatacgggattgaaagatgcttacaagtctctcactgaggcgattgcgcatggtggtttagccaataaagtaaaagttaatattgaatggattgatgcagagctttttgaaagagaagatcctacgtccactttacgaaaagttcatggaattttggtgcctggtgcttttggggtgcgtggtgcagaaggcaaaatgcgagcaattcaatttgcgcgggaacgtagagttccatttttcggtatttgttttgggatgcaattggcttgtatagaagctgcgcgcaatattgcacagattgagaatgcttcatcaagtgagttttgcgaaacgaaaaatccaattgtaggtttaatgacagaatggctcaaaggggatgtgcttgagaaacgcacaaaatgtggcaattttggtggtaccatgcgtcttggtgcttttgccgcagagttgaaagaaaatagccatattgcccaaatttatggcatgacaaggatttacgagcgacatcgtcatcgttatgaggtcaatattgattataaagacaagctagaacaatgtggtttggttttttctggtatgtctcctgatggtgttttgccagaaacgatagaatatgcagatcatccatggttcattggtgttcaatatcatccagaactaaaatcacgtccctttgatccacatccacttttttcttcttttattgaagccactgtagaacaaagtcgattggtttag

SEQ ID NO: 31297 - protein, 542 aa, Bartonella henselae
MARYVFITGGVVSSLGKGIAAAALAALLQARGYSVRLRKLDPYLNVDPGTMSPYQHGEVFVTDDGAETDLDLGHYERFTGRSANSQDNITTGRIYRNIIERERRGDYLGATVQVIPHVTDEIKRFITTGNEEFDFVLCEIGGTVGDIEAMPFLEAIRQLHNELPRQNVIYVHLTLMPYISSAGELKTKPTQHSVKELQSVGIAPDILLVRADRPIPETERSKLSLFCNVRPTAVIQALDMPTIYDVPIAYHKEGLDSEVLSAFGMHPAHKPNMDRWEDITHRIHHPEGEVTIAVVGKYTGLKDAYKSLTEAIAHGGLANKVKVNIEWIDAELFEREDPTSTLRKVHGILVPGAFGVRGAEGKMRAIQFARERRVPFFGICFGMQLACIEAARNIAQIENASSSEFCETKNPIVGLMTEWLKGDVLEKRTKCGNFGGTMRLGAFAAELKENSHIAQIYGMTRIYERHRHRYEVNIDYKDKLEQCGLVFSGMSPDGVLPETIEYADHPWFIGVQYHPELKSRPFDPHPLFSSFIEATVEQSRLV

SEQ ID NO: 31298 - DNA, 1629 bp, Bartonella quintana
  CDS (1)..(1629): transl_table=11
atggcacgttatatttttattactggtggtgtggtttcttctcttggaaaaggcattgcagcagcgacgttggctgcgctattgcaggcgcgtggatatcgcgtacggcttcgcaaacttgatccttatttaaatgttgatccaggtacgatgtcaccttatcaacatggggaggtttttgtgaccgatgatggcgcagaaacggatcttgatcttggtcattatgaacgttttactgggcattctgcaaatagccaagacaacattacaacagggcgtatttatcgcaatatcattgaacgggaacgacgcggtgattatttaggggcaacagttcaggttattcctcatgttacggatgaaattaagagatttattactaccggaaatgaagaatttgactttattttgtgtgaaataggtggaacggttggtgatattgaggcaatgccttttttggaagcgattcgtcaacttcacaatgaattaccaagacagagtgttatctatgtgcatcttacattgatgccttatatttcttcggtgggtgaattaaaaaccaagccgacacagcattctgttaaggagttacaatcaattggtatttctcccgatattctgttggtgcgtgcagatcgacctattccagaaacagagcggtgcaaattatcacttttttgtaatgtgcgcccaagtgcagttattcaggcattgaatatgccaacgatttatgatgtgcctatggcatatcataaagaagggttagactcagaagttctttgtgcttttggaattgatccgacgcctaagccaaaaatggatcgttgggaagatattacatatcggattcaccatcttgaaggggaagtgacaatcgctgttgttggaaaatatacgggattgaaggatgcttataaatctcttattgaagcgattgcacatggtggtttagcgaataaagtaaaggttaatattgagtggattgaagcagagctttttgaaaaagaagatcctgcgtcttatttacaaaaagttcatggaattttggttcctggtgcttttggggcgcgtggtgcagaaggtaaaattcaagcaattcaatttgcacgggaacgtaaagttccgtttttaggtatttgttttgggatgcaattggcttgtatagaagttgcgcgcaatattgcaaagattgagaatgcttcatcaagtgaattttgtgagacaaaaaatccgattgtaggtttaatgacagaatggctcaaagaggatgtgcttgagaaacgtgcaaaatgtggaaatctcggtggtacaatgcgtcttggtgcttttgcagctgaattaaaggaaggtagtcatattgctaaaatttatgggatgaccaggattctcgagcggcatcgtcatcgttatgaggtgaatgttgattataaagacaagcttgaacagtgtggtttgatcttttctggtatgtctccggatggtgttttgccagaagcgattgaatatgcagatcacccatggttcattggtgttcaatatcatccagaattgaaatcacgtccatttgatccacatccacttttttcttcttttattgaagccactgtagaacaaagtcgattagtttaa

SEQ ID NO: 31299 - protein, 542 aa, Bartonella quintana
MARYIFITGGVVSSLGKGIAAATLAALLQARGYRVRLRKLDPYLNVDPGTMSPYQHGEVFVTDDGAETDLDLGHYERFTGHSANSQDNITTGRIYRNIIERERRGDYLGATVQVIPHVTDEIKRFITTGNEEFDFILCEIGGTVGDIEAMPFLEAIRQLHNELPRQSVIYVHLTLMPYISSVGELKTKPTQHSVKELQSIGISPDILLVRADRPIPETERCKLSLFCNVRPSAVIQALNMPTIYDVPMAYHKEGLDSEVLCAFGIDPTPKPKMDRWEDITYRIHHLEGEVTIAVVGKYTGLKDAYKSLIEAIAHGGLANKVKVNIEWIEAELFEKEDPASYLQKVHGILVPGAFGARGAEGKIQAIQFARERKVPFLGICFGMQLACIEVARNIAKIENASSSEFCETKNPIVGLMTEWLKEDVLEKRAKCGNLGGTMRLGAFAAELKEGSHIAKIYGMTRILERHRHRYEVNVDYKDKLEQCGLIFSGMSPDGVLPEAIEYADHPWFIGVQYHPELKSRPFDPHPLFSSFIEATVEQSRLV

SEQ ID NO: 31300 - DNA, 1662 bp, Bifidobacterium longum
  CDS (1)..(1662): transl_table=11
atggttagaagaacacatggtaattctcaagaacacgtcaccaagcatattttcgtcactggcggcgttgtctcctctctcggcaagggcctgaccgcatcttcgctcggtcgtttgctgcgcagccgcggtatccatgttctgcagcaaaagctcgatccgtacatcaacgtcgacccgggcaccatgaacccgttccagcatggtgaggtctacgtgaccgaagacggtgccgaaaccgatctcgacatcggccactacgagcgtttcctcgacgtcttcctgagccagaaggccaacgtcaccaccggtcagatctatcaggaagtgctgcgcaaggagcgcgccggcgaatacctcggccagtgcgtgcaggttatcccgcacatcaccaacgaaatcaagtctcgtatgcgcgcccaggcttccgatgacgtggatgtgatcatcaccgaaatcggtggtaccgtcggcgacatcgagtcccagcccttccttgaggccgcccgcgaagtgcgccgcgatctcggcccggacaactgcatgttcgtgcacgtttccctggtgccgtacatttccgccgcccacgagctcaagaccaagcccacccagcactccgtgatgatgctgcgccagctcggcatttccccggacgcccttgtgctgcgctccgaccgcccgctcaatcagtccatcaaggacaagatctccctgatgtgcgatgtcgatgccgaaggcgtggtcaactgcgtggatgcgccgagcatctacgatgtgccgaagatcctgttcgaggagggcctcgacgcctatgtggtgcgtgagctcggcctgccgttccatgacgtcgattgggacgaatgggccgacctgctggagcgtgtgcaccaccccaagcacgaggtcaacatcgccatcgtcggcaagtacatcgatctgccggacgcctacctgtctgtcaccgaggccatcaaggccggcggctttgccaactgggccaaggtcaacgtcaagtgggttgcggccgatcgttgcgaaaccaccgaaggtgcggccgccgctctcgacaacgtcgacggcatcgtgatccccggcggcttcggcatccgcggcatcgacggcaagatcggcgctctgaagttcgcccgtgaaaccaagctgcctgccctcggcctgtgcctgggcctgcagtccatggtcatcgaatactcccgccacgtgctgggcattgaagacgcgaactcttccgagttcgagcccgattgcgccaacccggtgatcgccaccatggaagagcagaaggacatcgtggccggcaagggcgacatgggccacaccatgcgtcttggctcctacccggctgagctggaggaaggctcgctggtcgccgaactgtacggcaccacgcatgtcaccgagcgtcaccgccaccgttacgaagtcaacgtggcctacaaggatcgtctgcgcgaaggcggcctgcgcatctccggccagagcccggacggcgagctcaccgagttcgtggaactgccgcaggacgtgcacccgttctatgtggccacccaggctcacccggagttcaagtctcgcccgaccaagccgcacccgctgttcgccggcctggtcaaggccgcgctcgaccatcaggcggcgcgctga

SEQ ID NO: 31301 - protein, 553 aa, Bifidobacterium longum
MVRRTHGNSQEHVTKHIFVTGGVVSSLGKGLTASSLGRLLRSRGIHVLQQKLDPYINVDPGTMNPFQHGEVYVTEDGAETDLDIGHYERFLDVFLSQKANVTTGQIYQEVLRKERAGEYLGQCVQVIPHITNEIKSRMRAQASDDVDVIITEIGGTVGDIESQPFLEAAREVRRDLGPDNCMFVHVSLVPYISAAHELKTKPTQHSVMMLRQLGISPDALVLRSDRPLNQSIKDKISLMCDVDAEGVVNCVDAPSIYDVPKILFEEGLDAYVVRELGLPFHDVDWDEWADLLERVHHPKHEVNIAIVGKYIDLPDAYLSVTEAIKAGGFANWAKVNVKWVAADRCETTEGAAAALDNVDGIVIPGGFGIRGIDGKIGALKFARETKLPALGLCLGLQSMVIEYSRHVLGIEDANSSEFEPDCANPVIATMEEQKDIVAGKGDMGHTMRLGSYPAELEEGSLVAELYGTTHVTERHRHRYEVNVAYKDRLREGGLRISGQSPDGELTEFVELPQDVHPFYVATQAHPEFKSRPTKPHPLFAGLVKAALDHQAAR

SEQ ID NO: 31302 - DNA, 1653 bp, Blochmannia floridanus
  CDS (1)..(1653): transl_table=11
gtgaacgtaaattatatttttgtgacaggaggcgtagtttcatctttaggtaagggtattgtaacagcttctttagcttctgtattagaagcaaggggtttggatgttactataataaaattagatccatatataaatgttgatcctggaacaatgagcccaattcaacatggggaggtttttattactgaagatggagcagaaacggatttagatttgggacattatgaacgttttattaaaacaaaaatgacacgttataataattgtacaacaggtcgtatttattctaatgtattaaaacgagagagacgaggagattatttaggatctactgtacagataattccccatgttacgagttttataaaacaatggttaataactcattctaaaagttatgatgtattattggtagaagttggcggtacagttggagatattgaatcgctgccttttttagaggctattagacaaatggcaatagatgtaaatagatatcatacattatatatacatttaacgttagtaccatttatttctatgactggggaattgaaaactaagcctactcaacattcagttaaagaattattatctattggaattcaacctgatattttgatttgtagatctgatcatttgataggagatagtgagagaaaaaaaatttctttgttttgtaatgtatctaagaaagctgtaatttctttacaaaatgtaaattcaatttataagataccattgatgttacaagatcagggattagatgaatatatttgtaaatattttaatttgaattgtcctaaggcagatttatctgattggaaacaggtggtttattatcaaaataatccgaagggtacagttaccattggaatagtaggtaaatatatccggttaacagatgcttataagtcagtgatagaagctttacagcatgctggtttgaaaaatcgtttttttgtaaagatttgttttattgatgctcaagatcttgaaactttgagtgtaaagaaaatgttaaagggattagatggaattttagttccaggaggttttggttatcgaggagtagaaggaaaaattctatcagcacaatatgctagagaaaataatataccgtattttggtatttgtttagggatgcaagttgcattgattgaatttgctagacatgtggtaggtatggaagatgctaattcaacggagtttgtgaataattgtaagtatccagtaatttcggagattactggatatcaatgtacaaataataataatgatattattcaatatcatgataatgttgattttagtaggtctactatgcgtttaggaagtcaagtatgtcatttaattgaaggtagtttgactcaacaaatgtatggtaaaaagattatttatgagagatttcggcatcgctatgaaataaatatttctttgtttaaggaaatagagtatgctggattgagtggcgttggatattctaaaaataataatttcatagaaataattgagtgtaagaatcatccttggtttataggaagtcagtttcatccagaatttaattctactcctcgagatggtcatcctttatttgtaggttttataaatgctgcgatacaatatcagtgtaaaattataggaagttaa

SEQ ID NO: 31303 - protein, 550 aa, Blochmannia floridanus
MNVNYIFVTGGVVSSLGKGIVTASLASVLEARGLDVTIIKLDPYINVDPGTMSPIQHGEVFITEDGAETDLDLGHYERFIKTKMTRYNNCTTGRIYSNVLKRERRGDYLGSTVQIIPHVTSFIKQWLITHSKSYDVLLVEVGGTVGDIESLPFLEAIRQMAIDVNRYHTLYIHLTLVPFISMTGELKTKPTQHSVKELLSIGIQPDILICRSDHLIGDSERKKISLFCNVSKKAVISLQNVNSIYKIPLMLQDQGLDEYICKYFNLNCPKADLSDWKQVVYYQNNPKGTVTIGIVGKYIRLTDAYKSVIEALQHAGLKNRFFVKICFIDAQDLETLSVKKMLKGLDGILVPGGFGYRGVEGKILSAQYARENNIPYFGICLGMQVALIEFARHVVGMEDANSTEFVNNCKYPVISEITGYQCTNNNNDIIQYHDNVDFSRSTMRLGSQVCHLIEGSLTQQMYGKKIIYERFRHRYEINISLFKEIEYAGLSGVGYSKNNNFIEIIECKNHPWFIGSQFHPEFNSTPRDGHPLFVGFINAAIQYQCKIIGS

SEQ ID NO: 31304 - DNA, 1653 bp, Bordetella bronchiseptica
  CDS (1)..(1653): transl_table=11
atgaccaaatacgtatttgtcaccggcggtgtggtgtcttccctgggcaaagggatcgccgccgcgtccctcgccgcgattctcgagtcgcgcggcctgcaagtcaccctgctcaagctggacccctatatcaacgttgatcccggcaccatgagcccgttccagcacggcgaggtgttcgtgaccgaggatggggccgaaaccgacctggacctgggccactacgagcgcttcatttcggcccggatgcgcaaggtgaacaacttcaccaccggccagatctacgaatccgtcctgcgcaaggaacgccgcggcgactacctcggcaagaccgtccaggtcattccgcacatcaccaacgaaatccaggacttcgtcgcgcgtggcgccgaggccgcctggaatggcgccaccgacgtggccatcgtcgagatcggcggcaccgtgggcgacatcgagtcgctgcccttcctggaggccgctcgccagatgagcctgcgcatggggcgcaacaacgccgccttcgtgcacctgacgctggtgccctacatcgcgtcggccggcgagctcaagaccaagcccacccagcattcggtacagaagctgcgcgagatcggcatctacccgaacgtgctgctgtgccgcgccgaccgccgcattcccgacgacgagcgcgccaagatctcgatgttctcgaacgtaccgctcgatgccgtgatttcggtctgggacgtcgattccatctacaagattcccgccatgctgcacaagcagggcgtggacaacatcgtgtgcgaggccctgggcctgactccgccgccggccgacctgtccatgtgggacaacctggtcgacgcgctcgagcacccgcaggattccgtcaccatcggcatggtcggcaagtacgtcgacctgaccgagtcgtacaagtcgctcagcgaagcgctggtgcacgccggcatccacacgcgctccaaggtcaatatcgagtacatcgactccgaggatatcgagacccgcggcaccgaccagctcaagcacctggacgccatcctggtgcccggcggcttcggcaagcgcggcaccgagggcaagatcgccgccatccgctatgcgcgcgagaacggcgtgccgtacctgggcatctgcctgggcatgcagctggccgtgatcgagttcgcgcgccacgtggccggcctgggcggcgccaacagtaccgagttcgatccggccgcgccgcatccggtggtggccctgatcaccgagtggatggaccgcgaaggccgcgtcgagcgccgcgacaacagctcggatctcggcggcaccatgcgcaagggcgcgcagcgctgtccgatccgcccgggcacgcgggcgcagtccatctacggcgacgacgtcaacgagcgccatcgccatcgctacgaagtcaacaacgtgtatgtcccccggctcgaagatgccggcatggtgatcagcgcgcgcacgcccaccgagaacctgcccgagatgatggagctgcccagccatccgtggttcgtgggcgtgcagttccaccccgagttcacctcgacgccgcgcgacgggcaccccctgttctccagctatatccgggcggcgctcgagcacaaagcgcagcgcgccaaggaggcgtga

SEQ ID NO: 31305 - protein, 550 aa, Bordetella bronchiseptica
MTKYVFVTGGVVSSLGKGIAAASLAAILESRGLQVTLLKLDPYINVDPGTMSPFQHGEVFVTEDGAETDLDLGHYERFISARMRKVNNFTTGQIYESVLRKERRGDYLGKTVQVIPHITNEIQDFVARGAEAAWNGATDVAIVEIGGTVGDIESLPFLEAARQMSLRMGRNNAAFVHLTLVPYIASAGELKTKPTQHSVQKLREIGIYPNVLLCRADRRIPDDERAKISMFSNVPLDAVISVWDVDSIYKIPAMLHKQGVDNIVCEALGLTPPPADLSMWDNLVDALEHPQDSVTIGMVGKYVDLTESYKSLSEALVHAGIHTRSKVNIEYIDSEDIETRGTDQLKHLDAILVPGGFGKRGTEGKIAAIRYARENGVPYLGICLGMQLAVIEFARHVAGLGGANSTEFDPAAPHPVVALITEWMDREGRVERRDNSSDLGGTMRKGAQRCPIRPGTRAQSIYGDDVNERHRHRYEVNNVYVPRLEDAGMVISARTPTENLPEMMELPSHPWFVGVQFHPEFTSTPRDGHPLFSSYIRAALEHKAQRAKEA

SEQ ID NO: 31306 - DNA, 1602 bp, Borrelia burgdorferi
  CDS (1)..(1602): transl_table=11
atgaaaaaaaacttaaagattttagtaataacaggaggcgtgatctctggaattggtaaaggagttacatcggcaagtattgcaaggttgtttagatatgattttagagttactccaattaaatgtgatgggtatttaaatactgatcctggtactattaatcctgttgagcacggagaagtttttgtgcttgatgatggaggagaggttgatatggactttggtcattacgagaggtttttaaatcttaatgccaagtctagttggaacattacaatgggcaaaatatacaaaaagatacttgaaaatgagcgaaagggtaaatatttgggaagaacagttcagcttattccccatgttactgatgagatcaaatctacaatttttcagattgcaagttctgagaatagtgatatgttgataattgaaattggtggaaccgtaggagatatggaaaatattttatttattgagacagtaagacaaataagacaggagattgggagtggtaatatttcttttattcatttaacatatgtgccaagtccagctggaattaatgagcaaaaatctaaacctactcaacaaagtgttaaaaccttaaataaagcaggtattttccccgatttaattattgctagaagttcacaagtattgacagaccaaatcagaaaaaaagtggcaatgttttgcaatgttgagagcacttctattattgacaatgttgatgtttctactatttatgaaattcctatatctttttataagcagggtgtacatgagattttaagctctaagttaaatattaaggttgatccaaaaatagaagagctttcaaagcttgtaggagttataaaatctaatttttttgtgcctaaaaaaattattaatattgctatttgtggtaaatatgctgaacttgatgattcttatgcatcaattagagagtctttggttcatgttgcagcccatttggatttgcttattaaaagcactttaattgattctaatgatttaaatgagagctgtttaaaagagtttgacggcattattgttcctggcggctttggaggcaaaggatatgaaggtaaaattatggctattaaatatgctcgtgagaataatattccctttcttggaatttgtcttggtttgcagcttgctgtaatagaatttgctcgtaatgtttgtggaatacttgatgctgatacggaggaaaatttagcaagagacaagcccttaaaaagtcctgttatccatttacttcctgagcaaaagggaattaaagataagggcgctacaatgaggcttggtggatatcctgtgattcttaaaaagaatacaatagcttttaaactttatggccaagatcggataattgaaagatttagacataggtatgaagtcaataatgattatatagatttatttgcaaaaaatgggcttatagtatctggattttcaagtgattttaaaatggcaaaattaatagaaattcctgaaaataaatttttcgtagcttgccagtttcatccagaacttattacaagaatagaaaatccagccaagctttttctaggattaattaaagcttgtatttga

SEQ ID NO: 31307 - protein, 533 aa, Borrelia burgdorferi
MKKNLKILVITGGVISGIGKGVTSASIARLFRYDFRVTPIKCDGYLNTDPGTINPVEHGEVFVLDDGGEVDMDFGHYERFLNLNAKSSWNITMGKIYKKILENERKGKYLGRTVQLIPHVTDEIKSTIFQIASSENSDMLIIEIGGTVGDMENILFIETVRQIRQEIGSGNISFIHLTYVPSPAGINEQKSKPTQQSVKTLNKAGIFPDLIIARSSQVLTDQIRKKVAMFCNVESTSIIDNVDVSTIYEIPISFYKQGVHEILSSKLNIKVDPKIEELSKLVGVIKSNFFVPKKIINIAICGKYAELDDSYASIRESLVHVAAHLDLLIKSTLIDSNDLNESCLKEFDGIIVPGGFGGKGYEGKIMAIKYARENNIPFLGICLGLQLAVIEFARNVCGILDADTEENLARDKPLKSPVIHLLPEQKGIKDKGATMRLGGYPVILKKNTIAFKLYGQDRIIERFRHRYEVNNDYIDLFAKNGLIVSGFSSDFKMAKLIEIPENKFFVACQFHPELITRIENPAKLFLGLIKACI

SEQ ID NO: 31308 - DNA, 1602 bp, Borrelia garinii
  CDS (1)..(1602): transl_table=11
atgaaaaaaaacttaaagattttggtaataacaggaggcgtgatctctggaattgggaaaggagttacatcggcaagtattgcaaggttgtttagatatgattttagggtcactccaatcaaatgtgatggatatttaaatactgaccccgggactattaatcctgttgagcatggagaagtttttgtgcttgatgatggaggagaggttgatatggactttggtcattatgagagatttttaaatcttaatgcgaagtctagttggaacattacaatgggcaagatatacaaaaaaatacttgaaaatgagcgaaagggtaaatatttaggaagaacagttcagcttattcctcatgttactgatgagattaagtctacaatttttcagattgcaagttctgagaatagcgagatgttgataattgaaattggtggaactgtaggagatatggaaaatattttatttattgagacagtaaggcaaataaggcatgagattggaagcggtaatattgcttttattcatttaacctatgtaccaagtccagctggaattaatgagcaaaaatctaaacccactcaacagagtgttaaaactttaaataaagcaggcattttccccgatctgattattgctagaagctctcaagtattaacagaccaaatcagaaaaaaagtggcaatgttttgtaatgttgagagcaattctattattgataatattgatgtttctactatttatgaaattcctatatctttttacaaacaaggcgtacatgagattttaagttctaagttgaatattaaggttgatccaaaaatagaagagctttcaaagcttgtaggagttataaaatctaatttttttgtgcctaaaaaaattattaatattgccatttgtggtaaatatgctgaacttgatgattcttatgcgtcaattcgagagtctttggttcatgttggagctaatttggatttacttattaaaagcactctaattgattctaatgatttaaatgagagttatttaaaagagtttgacggcattattgttcccggaggctttggaggcaaaggatatgagggtaaaattattgctattaaatacgctcgtgaaaataacattccctttcttggaatttgtcttggtttacagcttgctgtaatagaatttgctcgtaatgtttgcgggatacttgatgctgatacagaggaaaacttattaaaagacaaacctttaaaaagccctgttattcatttgcttcccgagcaaaagggaattaaagataaaggtgctacaatgaggcttggaggatatcctgtgattcttaaaaagaatacaatagtttttaatctttatggtcaagacaggataatcgaaagatttaggcacagatatgaagttaataatgattatatagatttatttgagaaaaatggacttgtagtatctggattttcaagtgattttaaaatagcaaaattaatagaaattcctaaaaataaattttttgtagcctgtcaatttcatccagaacttattacaagaatagaaaatccagctaagctttttttagggctaattaaagcttgtatttga

SEQ ID NO: 31309 - protein, 533 aa, Borrelia garinii
MKKNLKILVITGGVISGIGKGVTSASIARLFRYDFRVTPIKCDGYLNTDPGTINPVEHGEVFVLDDGGEVDMDFGHYERFLNLNAKSSWNITMGKIYKKILENERKGKYLGRTVQLIPHVTDEIKSTIFQIASSENSEMLIIEIGGTVGDMENILFIETVRQIRHEIGSGNIAFIHLTYVPSPAGINEQKSKPTQQSVKTLNKAGIFPDLIIARSSQVLTDQIRKKVAMFCNVESNSIIDNIDVSTIYEIPISFYKQGVHEILSSKLNIKVDPKIEELSKLVGVIKSNFFVPKKIINIAICGKYAELDDSYASIRESLVHVGANLDLLIKSTLIDSNDLNESYLKEFDGIIVPGGFGGKGYEGKIIAIKYARENNIPFLGICLGLQLAVIEFARNVCGILDADTEENLLKDKPLKSPVIHLLPEQKGIKDKGATMRLGGYPVILKKNTIVFNLYGQDRIIERFRHRYEVNNDYIDLFEKNGLVVSGFSSDFKIAKLIEIPKNKFFVACQFHPELITRIENPAKLFLGLIKACI

SEQ ID NO: 31310 - DNA, 1632 bp, Bradyrhizobium japonicum
  CDS (1)..(1632): transl_table=11
atggcgcggtacatattcatcaccggcggcgtggtttcttcgctcggcaagggtttggcttcagcggcactcggtgcgctgttgcaggcccggggctacaaggtccgcctccgtaagctcgacccctatctcaacctcgatcccggaacgatgtcgccgtatcagcacggcgaagtgttcgtgaccgatgacggcgcggagaccgatctcgatctcggtcactacgagcgcttcaccgggcggccggcgaccaaggccgacaacatcacgacggggcgcatctaccaggacatcatcaccaaggagcgccgcggcgattatctcggcgcgaccatccaggtggttccgcacgtcaccaacgccatcaaggaattcgtcctcgacggcaatgacgactacgacttcgtgctggtcgagatcggcggcaccgtcggcgacatcgagggcctgccgttcttcgaggcgatccgccagctcaagaacgatctgccgcgcgatcatgccgtctacatccatctcacgctactgccctacattccgagcgcaggcgaattgaagacgaagccgacgcagcactcggtgaaggagctgcgttcgatcggcatccagccggacatcctgctctgccgaaccgaccgcgagatcccgaaggaagagcgccgcaagctcgggctgttctgcaacgtccgtgaaagcgcggtgatcgaagcgcgcgacgtcgacaacatctatgctgtccctgaggcctaccacaatgcgggcctcgacgacgaggtgctcgccgccttcggcatcgcctcgcggattccgccagagctgcggagctggcagcagatcaacgagcgcgtccgcaatcccgaaggcaacgtcaccatcgccatcgtcggcaaatacaccggcatgaaggatgcgtataagtcgctgatcgaggcgctctcacacggcggcatcgccaacaaggtgaaggtcaatctcgactggatcgagagcgagatcttcgagaaggaagatcccgcgccgttcctcgagcacgtcaacggcatcctggtgcccggcggcttcggccagcgcggcgcggaaggcaagatccgcgcggcgcagttcgcgcgcgagcgcgacgtgccgtatttcggcatctgctttggcatgcagatggcggtgatcgaggccgcgcgcaatctcgtcggcatcgaagacgccaactccaccgaattcggcccgaccaaggagcccttggtcggcctgatgacggaatggctccgcggcaacgaactcgagaagcgctcgcaggccggcgatctcggcggcacgatgcggctcggcgcctatcccgcggcactcaaccgcggcagccgagtctcgcaggtctatggcggcgcgaccgagatttccgagcgccaccgccaccgctacgaggtgaacaccgcctacaaggatcgcctcgagcagcacggcctgaaattctccgggctgtcgcccgacggcgtcctgccggagatcgtcgaatacgaggatcatccctggttcatcggcgtccagttccatcccgaactgaagtcgcggccttttgagccgcatcctctcttcgcctccttcattcaggcggcgatggtgcagagccggctggtctga

SEQ ID NO: 31311 - protein, 543 aa, Bradyrhizobium japonicum
MARYIFITGGVVSSLGKGLASAALGALLQARGYKVRLRKLDPYLNLDPGTMSPYQHGEVFVTDDGAETDLDLGHYERFTGRPATKADNITTGRIYQDIITKERRGDYLGATIQVVPHVTNAIKEFVLDGNDDYDFVLVEIGGTVGDIEGLPFFEAIRQLKNDLPRDHAVYIHLTLLPYIPSAGELKTKPTQHSVKELRSIGIQPDILLCRTDREIPKEERRKLGLFCNVRESAVIEARDVDNIYAVPEAYHNAGLDDEVLAAFGIASRIPPELRSWQQINERVRNPEGNVTIAIVGKYTGMKDAYKSLIEALSHGGIANKVKVNLDWIESEIFEKEDPAPFLEHVNGILVPGGFGQRGAEGKIRAAQFARERDVPYFGICFGMQMAVIEAARNLVGIEDANSTEFGPTKEPLVGLMTEWLRGNELEKRSQAGDLGGTMRLGAYPAALNRGSRVSQVYGGATEISERHRHRYEVNTAYKDRLEQHGLKFSGLSPDGVLPEIVEYEDHPWFIGVQFHPELKSRPFEPHPLFASFIQAAMVQSRLV

SEQ ID NO: 31312 - DNA, 1629 bp, Brucella melitensis
  CDS (1)..(1629): transl_table=11
atggcgcgatatgtattcatcactggcggcgtggtttcttccctcggaaaaggcatagctgccgcagcattggctgcactccttcaggcacgcggttatcgtgtgcgtatccgtaaacttgacccctatctgaatgtcgatccaggtacaatgtcgccttaccagcatggtgaggtgttcgtcactgacgacggagccgagacagacctcgatctgggccattacgagcggtttaccggtcgtcccgccaaccagcaggataatatcacgaccggtcgtatctaccgcaatatcatcgaaaaggaacgccgcggcgattatctcggtgcgacggttcaggtcattcctcatgtgaccgacgagatcaagaatttcgttcttgagggcaatgaggattatgatttcgtgctgtgcgaaatcggcggtacggttggcgatatcgaagccatgccgtttctggaagccattcgccagcttggcaacgagttgccgcgcggcacggcggtttatatccacctgaccctgatgccctatattccggctgcgggcgaattgaagaccaagccgacccagcattcggtcaaggaactgcgttccatcggcattgcaccggatattcttctggtgcgtgccgaccgcgaaatcccggaatcggagcggcgcaagctgtcgctgttctgcaatgtccgtgaaagcgcggtcattcaggcgcttgatgttgcgacaatctacgatgttccgatcgcctatcacaaagaagggctggattcggaagtcctgtccgcattcggcatcgatccggcgccaaagccgcgcatggatcgctgggaagaggtttcccatcggctccacaacccggaaggcgaagtgacgattgccgttgtcggtaaatataccggcctcaaggatgcctataaatctctcatcgaggcgctgcatcatggcggtctggccaataaggtgaaggtcaatctcgactggatcgaggcggaagtttttgaaagcgaagacccggctccatatctggaaaaggtgcatggcattctggtgccgggcggctttggtgagcgtggtgctgaaggcaagattctcgcggcgaaattcgcacgcgagcgcaaggtgccttatttcggtatctgctttggtatgcagatggcctgcattgaagcagcgcgcaatctggtcggtatcgaagatgcttcctcaagcgagtttgacccaaccagggagccggtcgtgggtctcatgaccgaatggctgaagggcaatatgcttgaaaagcgtgcggcggcgggcgatcttggcggtacgatgcgccttggcgcttatgaagcggtgctgaagcccgactcgaagattgcgcaaatctacggctcgaccgatatccacgagcgtcaccgccatcgttatgaagtcaatatcgactataaggaccgtctcgaagcagccggcctgaatttcgctggcatgtcgccggacggcgttttgccggaaacggtcgaatatgcggatcatccttggtttatcggcgtgcagtaccatccggaactgaaatcccgtccgtttgagccgcatccgctttttgcatcctttatcgaagcggccatcgaacagagccgtctggtctga

SEQ ID NO: 31313 - protein, 542 aa, Brucella melitensis
MARYVFITGGVVSSLGKGIAAAALAALLQARGYRVRIRKLDPYLNVDPGTMSPYQHGEVFVTDDGAETDLDLGHYERFTGRPANQQDNITTGRIYRNIIEKERRGDYLGATVQVIPHVTDEIKNFVLEGNEDYDFVLCEIGGTVGDIEAMPFLEAIRQLGNELPRGTAVYIHLTLMPYIPAAGELKTKPTQHSVKELRSIGIAPDILLVRADREIPESERRKLSLFCNVRESAVIQALDVATIYDVPIAYHKEGLDSEVLSAFGIDPAPKPRMDRWEEVSHRLHNPEGEVTIAVVGKYTGLKDAYKSLIEALHHGGLANKVKVNLDWIEAEVFESEDPAPYLEKVHGILVPGGFGERGAEGKILAAKFARERKVPYFGICFGMQMACIEAARNLVGIEDASSSEFDPTREPVVGLMTEWLKGNMLEKRAAAGDLGGTMRLGAYEAVLKPDSKIAQIYGSTDIHERHRHRYEVNIDYKDRLEAAGLNFAGMSPDGVLPETVEYADHPWFIGVQYHPELKSRPFEPHPLFASFIEAAIEQSRLV

SEQ ID NO: 31314 - DNA, 1629 bp, Brucella suis
  CDS (1)..(1629): transl_table=11
atggcgcgatatgtattcatcactggcggcgtggtttcttccctcggaaaaggcatagctgccgcagcattggctgcactccttcaggcacgcggttatcgtgtgcgtatccgtaaacttgacccctatctgaatgtcgatccaggcacaatatcgccttaccagcatggtgaggtgttcgtcactgacgacggagccgagacagacctcgatctgggccattacgagcggtttaccggtcgtcccgccaaccagcaggataatatcacgaccggtcgtatctaccgcaatatcatcgaaaaggaacgccgcggcgattatctcggtgcgacggttcaggtcattcctcatgtgaccgacgagatcaagaatttcgttcttgagggcaatgaggattatgatttcgtgctgtgcgaaatcggcggcacggttggcgatatcgaagccatgccgtttctggaagccattcgccagcttggcaacgagttaccgcgcggcacggcggtttatatccacctgaccctgatgccctatattccggctgcgggcgaattgaagaccaagccgacccagcattcggtcaaggaactgcgttccatcggcattgcaccggatattcttctggtgcgtgccgaccgcgaaatcccggaatcggagcggcgcaagctgtcgctgttctgcaatgtccgtgaaagcgcggtcattcaggcgcttgatgttgcgacaatctacgatgttccgatcgcctatcacaaagaagggctggattcggaagtcctgtccgcattcggcatcgatccggcgccaaagccgcgcatggatcgctgggaagaggtttcccatcggctccacaacccggaaggcgaagtgacgattgccgttgtcggtaaatataccggcctcaaggatgcctataaatctctcatcgaggcgctgcatcatggcggtctggccaataaggtgaaggtcaatctcgactggatcgaggcgcaagtttttgaaagcgaagacccggctccatatctggaaaaggtgcatggcattctggtgccgggcggctttggtgagcgtggtgctgaaggcaagattctcgcggcgaaattcgcacgcgagcgcaaggtgccttatttcggtatctgctttggtatgcagatggcctgcattgaagcagcgcgcaatctggtcggtatcgaagatgcttcctcaagcgagtttggcccaaccagggagccggtcgtgggtctcatgaccgaatggctgaagggcaatatgcttgaaaagcgtgcggcggcgggcgatcttggcggtacgatgcgccttggcgcttatgaagcggtgctgaagcccgactcgaaaattgcgcaaatctacggctcgaccgatatccacgagcgtcaccgccatcgttatgaagtcaatatcgactataaggaccgtctcgaagcagccggcctgaatttcgctggcatgtcgccggacggcgttttgccggaaacggtcgaatatgcggatcatccttggtttatcggcgtgcagtaccatccggaactgaaatcccgtccgtttgagccgcatccgctttttgcatcctttatcgaagcggccatcgaacagagccgtctggtctga

SEQ ID NO: 31315 - protein, 542 aa, Brucella suis
MARYVFITGGVVSSLGKGIAAAALAALLQARGYRVRIRKLDPYLNVDPGTISPYQHGEVFVTDDGAETDLDLGHYERFTGRPANQQDNITTGRIYRNIIEKERRGDYLGATVQVIPHVTDEIKNFVLEGNEDYDFVLCEIGGTVGDIEAMPFLEAIRQLGNELPRGTAVYIHLTLMPYIPAAGELKTKPTQHSVKELRSIGIAPDILLVRADREIPESERRKLSLFCNVRESAVIQALDVATIYDVPIAYHKEGLDSEVLSAFGIDPAPKPRMDRWEEVSHRLHNPEGEVTIAVVGKYTGLKDAYKSLIEALHHGGLANKVKVNLDWIEAQVFESEDPAPYLEKVHGILVPGGFGERGAEGKILAAKFARERKVPYFGICFGMQMACIEAARNLVGIEDASSSEFGPTREPVVGLMTEWLKGNMLEKRAAAGDLGGTMRLGAYEAVLKPDSKIAQIYGSTDIHERHRHRYEVNIDYKDRLEAAGLNFAGMSPDGVLPETVEYADHPWFIGVQYHPELKSRPFEPHPLFASFIEAAIEQSRLV

SEQ ID NO: 31316 - DNA, 1638 bp, Buchnera aphidicola subsp
  CDS (1)..(1638): transl_table=11
atgacaaaaaattatatttttattactggcggagtagtctcatctttaggaaaaggtattgctgcagcttcattgggtgcaatcctaaaagcacgaaatttaaacataacaattataaaactagatccgtatataaatgtagaccctggaacgataagtcctattcaacatggagaagtatttgttactgaagatggtgcggaaacagatttagatttgggtcattatgaacgttttattcatacaaaaatgacatttttgaataattttactacaggtggagtttattctcaagtcttaaaaaaagaaagaagaggtgattatttaggagcgactattcaagttatacctcatattactaatgctattaaggaaagaatcattctatgctccgaaaatagtaatatcatccttgtagaaataggcggaactgttggtgatattgaatcacttccatttttagaggcaattcgtcaaatggcagttgatattggacgtaaaaacgttatttatatacatttaacactagtaccgtatattgctacagcaggtgaaataaaaactaaacccactcaacactcagtcaaacagttactttcaataggaatacaaccagatattttaatttgtcgttctgaaaaaactgtacctcttcacgagcgaaaaaaaatagcattattttgtaatgtaccagttgatgctgttatatctctaaaagatgtgaattcaatatataaaataccaaaattgttaaaaaaccaaaaactagatgattatatttgtaactattttaaattaaatgtccctgaagctgatttacaagaatgggaagaagtaatttatgcagaaaaaaactttaacaatactattgttattggaattattggaaaatatattaaactacctgatgcatataaatcggttatggaagctcttaaacatgcaggttttaaaaataaaataaaagttgacatacaattaattgattctcaagaggtagaaaataaaaattttcaaatcttaaaaaatcttaatggcatcttgatacctggaggttttggcgatcgaggaattgtaggaaaactattatcaatacaatatgcacgagaaaatcacattccatattttggtatttgtttaggcatgcaaatagcaattatagaatttgcacaaaatgtagttggaattaaagaagcaaattcaacagaatttgatcctcaatgtaaatatccaattattgatttaataaaaaatagacctaataattcaagtaaaaattacaataaaatcgagaatcgtataaatttaggtggcactatgagattaggtagtcaaccgtgtaaattaagtgcaaatagtttatctcgaaaattatataaccaagaaattattatagaaagacacagacatcgatatgaagtaaataatcttctatttaaaaaaatagaagccgcaggattgcaggtaacaggacgttctcaaaagaataatgtagtagaaataatagaattgtctaatcatccatggtttttagcttgtcagtttcatccagaatttacttctacaccacgtgatggacatccattatttatagattttataaaatcagcaggaaaacataaaaaaaattttatataa

SEQ ID NO: 31317 - protein, 545 aa, Buchnera aphidicola subsp
MTKNYIFITGGVVSSLGKGIAAASLGAILKARNLNITIIKLDPYINVDPGTISPIQHGEVFVTEDGAETDLDLGHYERFIHTKMTFLNNFTTGGVYSQVLKKERRGDYLGATIQVIPHITNAIKERIILCSENSNIILVEIGGTVGDIESLPFLEAIRQMAVDIGRKNVIYIHLTLVPYIATAGEIKTKPTQHSVKQLLSIGIQPDILICRSEKTVPLHERKKIALFCNVPVDAVISLKDVNSIYKIPKLLKNQKLDDYICNYFKLNVPEADLQEWEEVIYAEKNFNNTIVIGIIGKYIKLPDAYKSVMEALKHAGFKNKIKVDIQLIDSQEVENKNFQILKNLNGILIPGGFGDRGIVGKLLSIQYARENHIPYFGICLGMQIAIIEFAQNVVGIKEANSTEFDPQCKYPIIDLIKNRPNNSSKNYNKIENRINLGGTMRLGSQPCKLSANSLSRKLYNQEIIIERHRHRYEVNNLLFKKIEAAGLQVTGRSQKNNVVEIIELSNHPWFLACQFHPEFTSTPRDGHPLFIDFIKSAGKHKKNFI

SEQ ID NO: 31318 - DNA, 1662 bp, Buchnera aphidicola subsp
  CDS (1)..(1662): transl_table=11
atgactaaaaattatatttttataactggcggcgtagtatcatctttaggaaagggtattgcagctgcttcattgggagctgtattagaagctcgaaatttaaaaataactattatgaaattagatccatatattaatgttgatccaggaacaatgagtcctattcaacatggagaagtctttgttactgaagatggtgcggaaacagatctagatttaggtcattatgaacgttttattcgaacaaaaatgacatgtttaaataattttactactggaagtatttattctgaagttttaaaaaaagaaagaagaggtgattatttaggttcaactattcaagtaataccgcatattactaatgctattaaagatagaataattttatgctctaaaaatagcgatattatccttgtcgaaataggtgggacagttggagatattgaatctttaccatttcttgaagcaattcgtcaactagccgtggacattgggcgtaaaaatgtaatatacatacatttaacacttgtaccgtatataaaaacagctggagaaattaaaactaaacctactcaacattcagtaaaagaattgctatcaattggaatacaaccagatattttgatttgtcgttctcaaaaaacagttccaataaacgaaagaaaaaaaattgcattattttgcaatgttccagtgaatgctgtaatctctttaaaagacgtagattcgatatacacaataccaaaactgttaaaagatcaaaaattagataattatatttgcgaatattttaaattaaatgtccctcaagctgatttaaaagaatgggaaaaagttatttatgaagaaaaaaatgctagtaaagaaattattattggtataataggaaaatatataaaattgcctgatgcatataaatcagtaatagaagcacttaaacatgcaggattaaaaaataaaattaaagtaaaaatagagttaattaactctcaagaaatagaaaataaaaattttaaattattacaaaatcttaatggtattctaataccaggtggttttggagatcggggtataataggaaaattattatctgttcaatacgcacgtgaaaataatattccttatttcggaatatgcttaggaatgcaaatagcaatcatagaattcgcacaaaatgttataggaattaaagaagcgaattctacagaatttgatccacaatgtaaatttcccgtgatcgatttaattaaaactaaaaaaaatgatataaaagatacaagacaaggaaaaaaaaataataaatctaattttggaggtactatgagactaggaagtcaaccgtgcaaattaatttttaatagtttgtctagaaaattatataaaaaagataccattatagaacggcatagacatcgatatgaagtaaacaattttttattaaaaaaaatagaaaaaaatggattaaaaatagcaggacgttctaaaaaaaataatatagttgaaatcatagaaatttttgatcatccatggtttattggttgtcaatttcatcctgaatttacttctacaccgcgcgatggacatccattattcatagattttattaaatcagcaaaaaaaaataaaaaaaataattttaaaataaaggtaaaaaatgtctaa

SEQ ID NO: 31319 - protein, 553 aa, Buchnera aphidicola subsp
MTKNYIFITGGVVSSLGKGIAAASLGAVLEARNLKITIMKLDPYINVDPGTMSPIQHGEVFVTEDGAETDLDLGHYERFIRTKMTCLNNFTTGSIYSEVLKKERRGDYLGSTIQVIPHITNAIKDRIILCSKNSDIILVEIGGTVGDIESLPFLEAIRQLAVDIGRKNVIYIHLTLVPYIKTAGEIKTKPTQHSVKELLSIGIQPDILICRSQKTVPINERKKIALFCNVPVNAVISLKDVDSIYTIPKLLKDQKLDNYICEYFKLNVPQADLKEWEKVIYEEKNASKEIIIGIIGKYIKLPDAYKSVIEALKHAGLKNKIKVKIELINSQEIENKNFKLLQNLNGILIPGGFGDRGIIGKLLSVQYARENNIPYFGICLGMQIAIIEFAQNVIGIKEANSTEFDPQCKFPVIDLIKTKKNDIKDTRQGKKNNKSNFGGTMRLGSQPCKLIFNSLSRKLYKKDTIIERHRHRYEVNNFLLKKIEKNGLKIAGRSKKNNIVEIIEIFDHPWFIGCQFHPEFTSTPRDGHPLFIDFIKSAKKNKKNNFKIKVKNV

SEQ ID NO: 31320 - DNA, 1635 bp, Buchnera aphidicola subsp
  CDS (1)..(1635): transl_table=11
atgaaaaaacgctttatttttataacagggggagtagtttcatctctcggaaagggtattactacagctgctctagccgctgtactcgaagcacgaaatttaaatgtaactattataaaattagatccctatattaatatagatccagggactattagcccagaacaacacggagaagtatttgttacagaagacggtgcagaaacagatcttgatttaggtcattatgaaagattcattagaaccaaaatgacgcgaaaaaacaactttacaactggaagtatttattcagaagtcttaaacaaagaaagaaaaggtgaatatctaggtgccacaattcaaattattccgcatataaccaacactattaaaaaaagaattatttcttgtgctcataacgtagacatcgtgtttgtagaagttggaggtacggttggagatatagaatctcttccttttttagaagctattcgtcaaatagctatagatattggacgcgaaaatacgatatatatacatttaactttagtaccttatatatctattactaaagaaataaaaacaaaacctactcaacattcagtaaaagaattattatctataggtatacaaccagatatattaatttgtcgatcacaatacactattccaatacaagcacgttctaaaatagctttgttttgtaatgttttaaaagaatctgttatttcattaataaacgtagattctatctataaaattccaaaattattaaatcttcaaaaagttgatcaaattatatgtcatcactttaaacttaaagttccacctgctgatttgtccgaatgggatgaagtaatatataacgaattaaacacaaataatgtagtaacaatcggtatcataggaaaatatataaaatcaccagacgcatacaaatctgtaattgaagcactaaaacacggaggaattaaaaataaaactgttgtaaaaataaaattaataaattcagaaaaaatagaaaaaaatggaacaaatagattaaattgtctacatggaattttaattcctggtggttttggacatcgtggcataacaggaaaattaataactgtcgaatatgctagaataaacaacgttcccttttttggaatatgcctaggcatgcaaattgcactaatagaattctttagaaatgtaatcggtttaaaagatgccaattctacagaattctctcaaaattgccaacacccaataatttcattaattccaaaaggaaatagaaatttaccaaacattaataataacgtcaaaaaaaaattaggtgggacaatgcggttaggtaatcaaacatgctacctaaaacaagacagcatctcccataaactatatggaaaaaatataatctctgaacgacatagacatcgatatgaagtaaataataaattcattaataaaatagaaaaatatggattaaaaattactgggaagtctaaaaaaaataagttagtggaaattatcgaactatcaaatcatttatggtttattgcttgtcaattccatcctgaattcacttctacacctagagatgggcacccattatttatagattttattaaagcagcaattcaatataaaaaaattaagcaaaaataa

SEQ ID NO: 31321 - protein, 544 aa, Buchnera aphidicola subsp
MKKRFIFITGGVVSSLGKGITTAALAAVLEARNLNVTIIKLDPYINIDPGTISPEQHGEVFVTEDGAETDLDLGHYERFIRTKMTRKNNFTTGSIYSEVLNKERKGEYLGATIQIIPHITNTIKKRIISCAHNVDIVFVEVGGTVGDIESLPFLEAIRQIAIDIGRENTIYIHLTLVPYISITKEIKTKPTQHSVKELLSIGIQPDILICRSQYTIPIQARSKIALFCNVLKESVISLINVDSIYKIPKLLNLQKVDQIICHHFKLKVPPADLSEWDEVIYNELNTNNVVTIGIIGKYIKSPDAYKSVIEALKHGGIKNKTVVKIKLINSEKIEKNGTNRLNCLHGILIPGGFGHRGITGKLITVEYARINNVPFFGICLGMQIALIEFFRNVIGLKDANSTEFSQNCQHPIISLIPKGNRNLPNINNNVKKKLGGTMRLGNQTCYLKQDSISHKLYGKNIISERHRHRYEVNNKFINKIEKYGLKITGKSKKNKLVEIIELSNHLWFIACQFHPEFTSTPRDGHPLFIDFIKAAIQYKKIKQK

SEQ ID NO: 31322 - DNA, 1662 bp, Burkholderia mallei
  CDS (1)..(1662): transl_table=11
atgaccaaatatgttttcgtcaccggcggcgtagtttcctccctcggcaagggcattgccgccgcctctctcgccgcgatcctcgaatcgcgcggtctcaaagtcaccctcctcaaactcgatccttacatcaacgtcgaccccggcacgatgagcccgtttcagcacggcgaagtgttcgtgacggaagacggcgcggaaacggatctcgacctcggccattatgagcgcttcatcagcacgaagatgcgcaaggccaacaatttcacgaccggtcagatctacgaatcggtgatccgcaaggagcgccgcggcgactacctcggcaagacggtccaggtgattccgcacatcacgaacgagatccaggcgttcatcgagcgcggcgcggcgtcggccacttgcggcgagccggacgtggcgatcgtcgagatcggcggcacggtgggcgacatcgagtcgctgccgttcctcgaggcggcgcgccagatgagcctgcgcctcggccgcaacagcgcatgcttcgttcacctgacgctcgtgccgttcatcgcgacggcgggcgagctgaagacgaagccgacccagcacagcgtgcagaagctgcgcgagatcggcatttcgccgcacgtgctgctctgccgcgccgatcgcccgatccccgacgacgaatcgaagaagatctcgctcttctcgaacgtgccggaagacgcggtgatctcggtgtgggacgtcgacagcatctacaagattccgcagatgctgcacgatcaggggctcgaccgcctcatctgcgaggaactgcgcctcgatccgcagccggccgacctgcgcatgtgggcggcgctcgtcgagaagctgcagaatccgaagcacgaggtgacgatcgggatggtcggcaagtacgtggacctcacggaatcgtacaagtcgctgatcgaggcgctgcgccatgcgtcgatccacacgtcgacgaaggtcaacatcgagtacatcgattcggaagagctcgagacgaacggcaccgcgagcctcgcgcatctcgacgccgtgctcgtgccgggcggcttcggccggcgcggcaccgagggtaagatcgcggccgtgcgctacgcgcgcgaagcgaaggtgccgtatctcggcatctgcctcggcatgcagctcgccgtcatcgaattcgcgcgcgacgtcgtcggcctcaagcaggcgaacagcaccgaattcgatccgaacacgccggagcgcgtcgtcgcgctgatcaccgagtggtacgaccgcgaaggcaaggtcgagaagcgcaccgaggattccgatctcggcggcacgatgcggctcggctcgcagcgctgcccgatcaagccgggcacgctcgccgaggcgatctacggcaaggacgtgaacgagcgccaccgtcaccgctatgaagtcaacaaccgtttcgtgccgcaactcgaagcgggcggcctcgtgatcagcgcgcgcacgccgagcgaggatctgccggaaatgatggaactgccgagcacgatgcacccgtggttcgtcggcgttcagttccacccggaattcacgtcgacgccgcgcgacggccatccgctgttcaagtcgttcgtgcaggccgcgctcgcgtgccagcagacgcgcgccggagcgaaggcatga

SEQ ID NO: 31323 - protein, 553 aa, Burkholderia mallei
MTKYVFVTGGVVSSLGKGIAAASLAAILESRGLKVTLLKLDPYINVDPGTMSPFQHGEVFVTEDGAETDLDLGHYERFISTKMRKANNFTTGQIYESVIRKERRGDYLGKTVQVIPHITNEIQAFIERGAASATCGEPDVAIVEIGGTVGDIESLPFLEAARQMSLRLGRNSACFVHLTLVPFIATAGELKTKPTQHSVQKLREIGISPHVLLCRADRPIPDDESKKISLFSNVPEDAVISVWDVDSIYKIPQMLHDQGLDRLICEELRLDPQPADLRMWAALVEKLQNPKHEVTIGMVGKYVDLTESYKSLIEALRHASIHTSTKVNIEYIDSEELETNGTASLAHLDAVLVPGGFGRRGTEGKIAAVRYAREAKVPYLGICLGMQLAVIEFARDVVGLKQANSTEFDPNTPERVVALITEWYDREGKVEKRTEDSDLGGTMRLGSQRCPIKPGTLAEAIYGKDVNERHRHRYEVNNRFVPQLEAGGLVISARTPSEDLPEMMELPSTMHPWFVGVQFHPEFTSTPRDGHPLFKSFVQAALACQQTRAGAKA

SEQ ID NO: 31324 - DNA, 1653 bp, Burkholderia sp
  CDS (1)..(1653): transl_table=11
atgaccaaatatgttttcgtcaccggcggcgtagtttcttcccttggcaagggtattgccgccgcttccctcgccgcgatcctcgaatcgcgcggtctgaaagtcaccctcctcaaactcgatccctacatcaacgtcgaccccggcacgatgagcccgttccagcacggcgaagtgttcgtgacggaagatggagcggagacggacctcgacctcggccactatgagcgcttcatcagcacgaagatgcgcaaggccaacaacttcacgaccggccagatctacgaatcggtgatccgcaaggaacgccgcggcgattatctgggcaagaccgtgcaggtcattccgcacatcacgaacgaaatccaggcgttcatcgagcgcggggccgcgtcggccacctgcggtgagccggatgtcgcgatcgtcgagatcggcggcacggtcggcgacatcgagtcgctgccgttcctggaagccgcgcgccagatgagcctgcgcctcggccgcaacagcgcgtgcttcgtgcacctgacgctggtgccgtacgtcgcgacggccggcgaactgaagacgaagccgacccagcacagcgtgcagaagctgcgcgagatcggcatcctgccgcacgtgctgctgtgccgtgcggaccgccgcattccggacgacgaatcgaagaagatctcgatgttctcgaacgtgccggaagacgccgtgatctcggtgtgggacgccgacagcatctacaagattccgcagatgctgcacgaccagggcctcgaccgcatcatctgcgaagagctgaagctgtcgccgaaggatgccgatctgaccatgtggtcggagctcgtcgagaagctcgagaacccgaagcacgaagtgacgatcggcatggtcggcaagtatgtcgacctgaccgagtcgtacaagtcgctgatcgaggcgctgcgccacgcatcgctgcacacgtcgaccaaggtcaacatcgaatacatcgactcggaagagatcgagacgaacggcgtcgacagcctgaagcacctcgacgccgtgctggtgccgggcggtttcggccgtcgcggcacggaaggcaagatcgcggcgatccgctatgcgcgtgaagccaaggtgccgtatctcggcatctgcctcggcatgcagctcgcagtgatcgagttcgcgcgcaacgtcgtcggcctgaagcaggcgaacagcacggaattcgagccggacacgccggaacgcgtggtcgcgctgatcaccgaatggtacgaccgcgacggcaaggtcgagacgcgcaccgaggaatccgatctcggcggtacgatgcgcctggggtcgcagcgctgcccgatcaagccgggcacgatggcggaagagatctatggcaaggacgtgaacgaacgccatcgccaccgttatgaagtcaataaccgcttcgtgccccagctcgaagccggcggccttatcatcagcgcccgtaccccgagcgaggatctgccggaaatgatggagctgccgcgttcgatgcacccgtggttcgtcggcgtccagttccacccggaattcacgtccacgccgcgtgacggtcatcccctcttcaagtcattcgtcgaagctgcgcttgccaacaagcaagcgcgcggagtgtaa

SEQ ID NO: 31325 - protein, 550 aa, Burkholderia sp
MTKYVFVTGGVVSSLGKGIAAASLAAILESRGLKVTLLKLDPYINVDPGTMSPFQHGEVFVTEDGAETDLDLGHYERFISTKMRKANNFTTGQIYESVIRKERRGDYLGKTVQVIPHITNEIQAFIERGAASATCGEPDVAIVEIGGTVGDIESLPFLEAARQMSLRLGRNSACFVHLTLVPYVATAGELKTKPTQHSVQKLREIGILPHVLLCRADRRIPDDESKKISMFSNVPEDAVISVWDADSIYKIPQMLHDQGLDRIICEELKLSPKDADLTMWSELVEKLENPKHEVTIGMVGKYVDLTESYKSLIEALRHASLHTSTKVNIEYIDSEEIETNGVDSLKHLDAVLVPGGFGRRGTEGKIAAIRYAREAKVPYLGICLGMQLAVIEFARNVVGLKQANSTEFEPDTPERVVALITEWYDRDGKVETRTEESDLGGTMRLGSQRCPIKPGTMAEEIYGKDVNERHRHRYEVNNRFVPQLEAGGLIISARTPSEDLPEMMELPRSMHPWFVGVQFHPEFTSTPRDGHPLFKSFVEAALANKQARGV

SEQ ID NO: 31326 - DNA, 1662 bp, Burkholderia thailandensis
  CDS (1)..(1662): transl_table=11
atgaccaaatatgttttcgtcaccggcggcgtagtttcctccctcggcaagggcattgccgccgcctctctcgccgcgatcctcgaatcgcgcggtctcaaagtcaccctcctcaaactcgatccttacatcaacgtcgaccccggcacgatgagcccgtttcagcacggcgaagtgttcgtgacggaagacggcgcggagacggatctcgacctcggccactatgagcgcttcatcagcacgaagatgcgcaaggccaacaacttcacgaccggtcagatctacgaatcggtgatccgcaaggagcgtcgcggcgattacctcggcaagaccgtccaggtgattccgcacatcacgaacgagatccaggcgttcatcgagcgcggcgcggcgtcggccacctgcggcgagccggatgtggccatcgtcgagatcggcggcacggtgggcgacatcgagtcgctgccgttcctcgaggcggcgcgccagatgagcctgcgcctcggccgcaacagcgcatgcttcgttcacctgacgctcgtgccgttcatcgcgacggcgggcgagctgaagacgaagccgacccagcacagcgtgcagaagctgcgcgagatcggcatttcgccgcacgtgctgctctgccgtgccgatcgcccgattcccgacgacgaatcgaagaagatctcgctcttctcgaacgtgccggaagacgcggtgatctcggtgtgggacgtcgacagcatctataagattccgcagatgctgcacgaccaggggctcgaccgcctcatctgcgaggagttgcgcctcgatccgcagccggccgacctgcgcatgtggtcggagctcgtcgagaagcttcagaatccgaagcacgaggtgacgatcgggatggtcggcaagtacgtcgacctgacggagtcgtacaagtcgctgatcgaagcgctgcgtcatgcgtcgatccacacgtcgacgaaggtcaacatcgagtacatcgattcggaagagctcgaggcgaacggcaccgcgagcctcgctcatctcgacgccgtgctcgtgccgggcggcttcggccggcgcggcaccgaaggcaagatcgcggccgtgcgctatgcgcgcgaagcgaaggtgccgtatctcggcatctgcctcggcatgcaactcgccgtcatcgaattcgcgcgcgacgtcgtcggcctcaagcaggcgaacagcaccgagttcgatccgaacacgccggagcgcgtcgtcgcgctgatcaccgagtggtacgaccgcgagggcaaggtcgagaagcgcaccgaggattccgatctcggcggcacgatgcggctcggctcgcagcgctgcccgatcaagccgggcacgctcgccgaagcgatttacggcaaggacgtgaacgagcgccaccgtcatcgttacgaagtcaacaaccgcttcgtgccgcaactcgaagcgggcggcctcgtgatcagcgcgcgcacgccgagcgaagatctgccggaaatgatggagctgccgcgcgcgatgcacccgtggttcgtcggcgttcagttccacccggaattcacgtcgacgccgcgtgacggccatccgctcttcaagtcgttcgttcaagccgcgatcgcgtgtcagcaggcgcgcgccggagcgaaagcatga

SEQ ID NO: 31327 - protein, 553 aa, Burkholderia thailandensis
MTKYVFVTGGVVSSLGKGIAAASLAAILESRGLKVTLLKLDPYINVDPGTMSPFQHGEVFVTEDGAETDLDLGHYERFISTKMRKANNFTTGQIYESVIRKERRGDYLGKTVQVIPHITNEIQAFIERGAASATCGEPDVAIVEIGGTVGDIESLPFLEAARQMSLRLGRNSACFVHLTLVPFIATAGELKTKPTQHSVQKLREIGISPHVLLCRADRPIPDDESKKISLFSNVPEDAVISVWDVDSIYKIPQMLHDQGLDRLICEELRLDPQPADLRMWSELVEKLQNPKHEVTIGMVGKYVDLTESYKSLIEALRHASIHTSTKVNIEYIDSEELEANGTASLAHLDAVLVPGGFGRRGTEGKIAAVRYAREAKVPYLGICLGMQLAVIEFARDVVGLKQANSTEFDPNTPERVVALITEWYDREGKVEKRTEDSDLGGTMRLGSQRCPIKPGTLAEAIYGKDVNERHRHRYEVNNRFVPQLEAGGLVISARTPSEDLPEMMELPRAMHPWFVGVQFHPEFTSTPRDGHPLFKSFVQAAIACQQARAGAKA

SEQ ID NO: 31328 - DNA, 1674 bp, Burkholderia xenovorans
  CDS (1)..(1674): transl_table=11
atgaccaaatatgttttcgtcaccggcggcgtagtatcttccctcggcaagggtattgccgccgcttccctcgccgcgatcctcgaatcgcgcggtcttaaagtcaccctcctcaagctcgatccctacatcaatgtcgaccccggcacgatgagcccgtttcaacacggcgaagtgttcgtgacggaagacggagcggagaccgacctcgacctcggccactatgagcgcttcatcagcacgaagatgcgcaaggccaataacttcaccacgggccagatttacgaatcggtgatccgcaaggaacgccgcggcgattatctcggcaagacggtgcaggtcattccgcacatcacgaacgaaatccaggcgttcatcgaacgcggcgcggcttccgcaacgtgcggtgagccggacgtcgccatcgtcgaagtgggcggcaccgtgggcgacatcgaatcgctgccgttcctcgaagccgcgcgtcagatgagcctgcgcatgggccgcaacagcgcgtgcttcgtgcacctcacgctggtgccgtgggttgccacggccggcgaactgaagaccaagcccacgcagcacagcgtgcagaagctgcgcgaaatcggtatctcgccgcacgtgctgctgtgccgcgccgaccgccgcattccggacgacgagcgcgcgaagatctccatgttctcgaacgtgccggaagacgcggtgatctcggtgtgggacgcggacagcatctacaagattccgcagatgctgcacgatcagggtttggacgcgatcatctgcgaagaactcaagctcgagccgaaggccgccgatctgtccatgtggtccgatctggtcgagaagctggagcatccgaggcatgaagtcacgatcggcatggtcggcaaatacgtcgatctgaccgagtcgtacaagtcgctgatcgaagcgctgcgccatgcgtcgatgcatacgtcgaccaaggtcaacatcgaatacatcgactccgaagaaatcgagacgcacggcgtcgaaagcctcaagcatctggacgcggtgctcgtgccgggcggctttggccggcgcggcaccgaaggcaagatcgccgcgatccgttatgcccgtgaagcgaaggtgccgtatctcggcatctgcctcggcatgcaactggcggtgatcgaatttgcccgcgacgtggtgggtctgaaagacgcgaacagcacggagttcgatcaggaaacgccgaaccgcgtggtcgcgctgatcaccgaatggtacgaccgcgaaggccgcgtcgagaagcgcacggaagagtcggatctcggcggcacgatgcgcctcggttcgcaacgttgcccgatcaagcccggcacgatggccgaagagatctatggcaaggacgtgaacgaacgccatcgccaccgttatgaagtcaataaccgcttcgtgccccagctcgaagccggcggccttatcatcagcgcccgtaccccgagtgaagatctgccggaaatgatggaactgccgcgcagcatgcacccgtggttcgtcggcgtgcagttccatccggaattcacgtccacgccgcgtgacggtcatccgctgttcaagtcgttcgtcgaagcggcgctcgcgcaccagcagtcgcgcacggcggccgaagtcggggagaaagcatga

SEQ ID NO: 31329 - protein, 557 aa, Burkholderia xenovorans
MTKYVFVTGGVVSSLGKGIAAASLAAILESRGLKVTLLKLDPYINVDPGTMSPFQHGEVFVTEDGAETDLDLGHYERFISTKMRKANNFTTGQIYESVIRKERRGDYLGKTVQVIPHITNEIQAFIERGAASATCGEPDVAIVEVGGTVGDIESLPFLEAARQMSLRMGRNSACFVHLTLVPWVATAGELKTKPTQHSVQKLREIGISPHVLLCRADRRIPDDERAKISMFSNVPEDAVISVWDADSIYKIPQMLHDQGLDAIICEELKLEPKAADLSMWSDLVEKLEHPRHEVTIGMVGKYVDLTESYKSLIEALRHASMHTSTKVNIEYIDSEEIETHGVESLKHLDAVLVPGGFGRRGTEGKIAAIRYAREAKVPYLGICLGMQLAVIEFARDVVGLKDANSTEFDQETPNRVVALITEWYDREGRVEKRTEESDLGGTMRLGSQRCPIKPGTMAEEIYGKDVNERHRHRYEVNNRFVPQLEAGGLIISARTPSEDLPEMMELPRSMHPWFVGVQFHPEFTSTPRDGHPLFKSFVEAALAHQQSRTAAEVGEKA

SEQ ID NO: 31330 - DNA, 1632 bp, Campylobacter jejuni
  CDS (1)..(1632): transl_table=11
atgaaacaaacaaaatatatttttgtaacaggtggagttttaagttctttgggtaaagggatagccgctgcttctatcgcaacacttttaaaaaattcagggcttaaagtgagtattttaaaagctgatccttatatcaatgttgatccaggcactatgagtccttttgagcatggagaggtttttgtaactgatgatggagcagaaacggatcttgatttggggcattatgagcgttttttggatgagagtttatctcaagataataacttcactacaggacgggtttatcaaagtgtgattgaaaaagaaaggcgtggagaatatcttggcaaaaccattcaagttatccctcatatagtaggagaaatcaaagatcgcattaaaaaagcaggagaaggcaaagatatacttatcgttgaaataggcggaactgttggggatatagaaggcttgccttttttagaagctattcgtgctttgcgtttggaagtgggtaaaaataatgctatgaatattcatcttactctagtaccttttattaaggctgcaggggaattaaaaacaaagccaactcaacatagtgtaggcgagttaaggcgcataggcattagtcctgatatgattatttgtcgtagtgaaaaagctcttgatagagatttaaaagataaaattgctatttcttgcggggtggaaaaaaattgcgtgatagaaagtgttgatgcggctagtatttatcaaattccacttaattttttaaagcaagatattttaagccctattgctgaaattttggatttgaaaaatttaaaacctaatatggaaaattgggactctttggtaaaaagagttatagctccaagcaatgaagttaaaatcgcttttgtaggcaaatatgtggatttaaaagaaagttataaaagccttactgaagctattatacatgcaggtgcagccctagatactaaagtggagttaaaatgggtagatagtgaaaaacttgaaaatatggaaagttctgaagtatttaaagatgtgagtggaattttggttgctgggggatttggatatcgtggtgtagaaggtaagataaaagccattcaatacgcaagagaaaataaaattccttttttaggaatttgtttaggtatgcagcttgctttggtggaatttgctagaaatgtattaaaacttaaagatgtaaattcaagtgaatttaatgaaaaatgccaaaatcctgtggtttatttgattgatgaatttatggatacaaatggagaaaaacaaattcgtactgcaaaaactcctttaggtggaactatgcgtttaggggcttataaatgtgatatcaaggaaaaatcccttttggctaaggtttataatgaagtaaagagtgtaaaagaacgccatcgtcatcgctatgaagcaaatccaaaatatagagcagattttgaaaaatacggtttgattgtaagtggtgaaagcaaaggattgattgaagcagttgagcttaactgtcatccttttttcttggctgtgcagtttcatccagaatttacatcaagacttgagcatgttaatcctgtgatttgcagttttatcaaggcagctataaactatgaagataattaa

SEQ ID NO: 31331 - protein, 543 aa, Campylobacter jejuni
MKQTKYIFVTGGVLSSLGKGIAAASIATLLKNSGLKVSILKADPYINVDPGTMSPFEHGEVFVTDDGAETDLDLGHYERFLDESLSQDNNFTTGRVYQSVIEKERRGEYLGKTIQVIPHIVGEIKDRIKKAGEGKDILIVEIGGTVGDIEGLPFLEAIRALRLEVGKNNAMNIHLTLVPFIKAAGELKTKPTQHSVGELRRIGISPDMIICRSEKALDRDLKDKIAISCGVEKNCVIESVDAASIYQIPLNFLKQDILSPIAEILDLKNLKPNMENWDSLVKRVIAPSNEVKIAFVGKYVDLKESYKSLTEAIIHAGAALDTKVELKWVDSEKLENMESSEVFKDVSGILVAGGFGYRGVEGKIKAIQYARENKIPFLGICLGMQLALVEFARNVLKLKDVNSSEFNEKCQNPVVYLIDEFMDTNGEKQIRTAKTPLGGTMRLGAYKCDIKEKSLLAKVYNEVKSVKERHRHRYEANPKYRADFEKYGLIVSGESKGLIEAVELNCHPFFLAVQFHPEFTSRLEHVNPVICSFIKAAINYEDN

SEQ ID NO: 31332 - DNA, 1632 bp, Campylobacter jejuni
  CDS (1)..(1632): transl_table=11
atgaaacaaacaaaatatatttttgtaacaggtggagttttaagttctttgggtaaagggatagccgctgcttctatcgcaacacttttaaaaaattcagggcttaaagtgagtattttaaaagctgatccttatatcaatgttgatccaggcactatgagtccttttgagcatggagaggtttttgtaactgatgatggagcagaaacggatcttgatttggggcattatgagcgttttttggatgagagtttatctcaagataataacttcactacaggacgggtttatcaaagtgtgattgaaaaagaaaggcgtggagaatatcttggcaaaaccattcaagttatccctcatatagtaggagaaatcaaagatcgcattaaaaaagcaggagaaggcaaagatatacttatcgttgaaataggcggaactgttggggatatagaaggcttgccttttttagaagctattcgtgctttgcgtttggaagtgggtaaaaataatgctatgaatattcatcttactctagtaccttttattaaggctgcaggggaattaaaaacaaagccaactcaacatagtgtaggcgagttaaggcgcataggcattagtcctgatatgattatttgtcgtagtgaaaaagctcttgatagagatttaaaagataaaattgctatttcttgcggggtggaaaaaaattgcgtgatagaaagtgttgatgcggctagtatttatcaaattccacttaattttttaaagcaagatattttaagccctattgctgaaattttggatttgaaaaatttaaaacctaatatggaaaattgggactctttggtaaaaagagttatagctccaagcaatgaagttaaaatcgcttttgtaggcaaatatgtggatttaaaagaaagttataaaagccttactgaagctattatacacgcaggtgcagccctagatactaaagtggagttaaaatgggtagatagtgaaaaacttgaaaatatggaaagttctgaagtatttaaagatgtgagtggaattttggttgctgggggatttggatatcgtggtgtagaaggtaagataaaagccattcaatacgcaagagaaaataaaattccttttttaggaatttgtttaggtatgcagcttgctttggtggaatttgctagaaatgtattaaaacttaaagatgcaaattcaagtgaatttaatgaaaaatgccaaaatcctgtggtttatttgattgatgaatttatggatacaaatggagaaaaacaaattcgtactgcaaaaactcctttaggtggaactatgcgtttaggggcttataaatgtgatatcaaggaaaaatcccttttggctaaggtttataatgaagtaaagagtgtaaaagaacgccatcgtcatcgctatgaagcaaatccaaaatatagagcagattttgaaaaacacggtttgattgtaagtggtgaaagcaaaggattgattgaagcagttgagcttaactgtcatccttttttcttggctgtgcagtttcatccagaatttacatcaagacttgagcatgttaatcctgtgatttgcagttttatcaaggcagctataaactatgaagataattaa

SEQ ID NO: 31333 - protein, 543 aa, Campylobacter jejuni
MKQTKYIFVTGGVLSSLGKGIAAASIATLLKNSGLKVSILKADPYINVDPGTMSPFEHGEVFVTDDGAETDLDLGHYERFLDESLSQDNNFTTGRVYQSVIEKERRGEYLGKTIQVIPHIVGEIKDRIKKAGEGKDILIVEIGGTVGDIEGLPFLEAIRALRLEVGKNNAMNIHLTLVPFIKAAGELKTKPTQHSVGELRRIGISPDMIICRSEKALDRDLKDKIAISCGVEKNCVIESVDAASIYQIPLNFLKQDILSPIAEILDLKNLKPNMENWDSLVKRVIAPSNEVKIAFVGKYVDLKESYKSLTEAIIHAGAALDTKVELKWVDSEKLENMESSEVFKDVSGILVAGGFGYRGVEGKIKAIQYARENKIPFLGICLGMQLALVEFARNVLKLKDANSSEFNEKCQNPVVYLIDEFMDTNGEKQIRTAKTPLGGTMRLGAYKCDIKEKSLLAKVYNEVKSVKERHRHRYEANPKYRADFEKHGLIVSGESKGLIEAVELNCHPFFLAVQFHPEFTSRLEHVNPVICSFIKAAINYEDN

SEQ ID NO: 31334 - DNA, 1737 bp, Candida glabrata
  CDS (1)..(1737)
atgaagtacgttgttgtatctggtggtgttatctccggtattggtaaaggtgttttggcatcttctacaggtatgcttttgaagactttgggtttgaaagttacctctatcaagattgatccatacatgaacatcgatgctggtaccatgtctccattggagcacggtgaatgttttgttcttaacgatggtggtgaaactgatctggatctgggtaactacgagcgttacttgaacgttactttgaccaaggaccacaacatcaccactggtaagatttactcccatgttattgccaaagagcgtaagggtgactatttgggtaagactgtccagattgtgccacacttgaccaacgctattcaagagtggatcgagcgtgtctccagaattccagttgacaacaccggtatggaaccagatgtctgtattatcgaacttggtggtaccgttggtgacattgagagtgctccttttgttgaagccttgagacaattccaattcagagtcggtaaggaaaattttgcattgatccatgtctcattggttccagttatccacggtgagcaaaagactaagccaacccaggctgctatcaaggacttgagatctcttggtttagtcccagatatgattgcttgtagatgttctgaaactttggagaaaggtgtaattgaaaagattgccatgttctgtcatgttggtgcggatcaagttgttaatgtccatgatgtcaactccacataccacgttcctctactactgttggagcaaaagatgatcaactacctacatcaaagactacagttacaagaaattactctaagttctgaggatattcaaagaggtgaaaacttgttgagtaaatggaaatcaatgaccggtaactttgacagctccatggaaactgtcaagattgctctagttggtaaatacaccaacttgaaggactcatatctgtctgttattaaggctctagagcattcttcaatgaaatgtcgccgtaagttggaaatcatgtgggtcgaagccactgatctagaacctgaaacacaagacactgaaaaggccaaattccatgaagcatggaacaaagtcagcacagctgatggtatattagtccctggtggttttggttccagaggtactgaaggtatgatgctagcatcaagatgggctcgtgaaaaccatatcccattcttaggtgtctgtttaggtcttcaaattgccactatagagttcgctagaaacgttttgggagtcaaggaaggtaattctgctgaatttttccctgaattggatgaaagcaaccaagttgttgtctttatgcctgaaatagacaaggaaactatgggtggttccatgagattgggtttgagacctacatatttccaacaaggcactgaatggtgtgctattaagaaactatacggtagcgctgaatccgttgaagagagacatcgtcatcgttacgaaatcaaccctaacttcattgaacgtttggaagagcatggtttgatgtttgtcggtagagatgaaactaacaagcgttgtgaaattttcgaaatgaaggatcacccattctttgttgctacccaataccatcctgaatacacttccaaggtcttggatccttcaaagcctttcttgggtcttgttgctgcatcttccggtatcttagatgatgttattgctggaaaatatgaattcaatggtgatggtaagtctgatttctaa

SEQ ID NO: 31335 - protein, 578 aa, Candida glabrata
MKYVVVSGGVISGIGKGVLASSTGMLLKTLGLKVTSIKIDPYMNIDAGTMSPLEHGECFVLNDGGETDLDLGNYERYLNVTLTKDHNITTGKIYSHVIAKERKGDYLGKTVQIVPHLTNAIQEWIERVSRIPVDNTGMEPDVCIIELGGTVGDIESAPFVEALRQFQFRVGKENFALIHVSLVPVIHGEQKTKPTQAAIKDLRSLGLVPDMIACRCSETLEKGVIEKIAMFCHVGADQVVNVHDVNSTYHVPLLLLEQKMINYLHQRLQLQEITLSSEDIQRGENLLSKWKSMTGNFDSSMETVKIALVGKYTNLKDSYLSVIKALEHSSMKCRRKLEIMWVEATDLEPETQDTEKAKFHEAWNKVSTADGILVPGGFGSRGTEGMMLASRWARENHIPFLGVCLGLQIATIEFARNVLGVKEGNSAEFFPELDESNQVVVFMPEIDKETMGGSMRLGLRPTYFQQGTEWCAIKKLYGSAESVEERHRHRYEINPNFIERLEEHGLMFVGRDETNKRCEIFEMKDHPFFVATQYHPEYTSKVLDPSKPFLGLVAASSGILDDVIAGKYEFNGDGKSDF

SEQ ID NO: 31336 - DNA, 1608 bp, Carboxydothermus hydrogenoformans
  CDS (1)..(1608): transl_table=11
atgacgaagtttatttttgtgaccggaggagtagtttcgtcactgggcaaaggaatcaccgcagcatctttaggacggcttttaaaaagtcgcggacttaaagtagcaattcaaaaatttgacccgtacattaacgttgaccctggtaccatgagtccgtatcagcatggagaagtgtttgttaccgacgatggagcggaaaccgaccttgaccttggccattacgaacggtttatcgatattaatttaaccaagaactccaacgtcactaccggtaaagtttactgggcggtaattagcaaggaacggcgcggggattatctcggtggtaccgttcaggttatcccgcacattaccaatgaaattaaagaaaggatattgagggtagctaaagaaagcaatcccgatgtggtgataaccgaaattggcggtacggttggggatattgaatccctgccttttttagaggcaataagacagctaaaaaacgatgtgggaaaagacaatgtcctgtacattcacgttactctggttcctactttaagggtaaccggcgaacttaagaccaaaccaacccagcacagcgtcaaggaattgcggagcatcggtattcaaccggatataattgtagcccgctcggagcagcctttatccagggaaatcaccgaaaaaattgctctcttctgtgatattgataaaaatgccgtaattcaggcggtggatgcatctaacatttacgaggttcctttaaagctaaaagaagaaggtttggatgatattgttattaaaaagttagggcttacctgcggagagccggatttgtcggaatgggaacaaatcgtcgagcggtataaaaaccccaaatttgaagtaactattggtatagttgggaagtacgtatcccttcccgatgcttatttaagtgtggccgaagctttacgccacgccgggatttatcatgaaacccgggttaacatccgctggattgattcggaaatgctggaaaaagagccggtggaaaaatatttaagtaaccttgatggaatattggttcccggaggctttggcgaccggggagttgaagggaaaatcaaggccattcagtatgcccgggaaaacaaagtgccttatttgggcctgtgtcttggcatgcagactgccgtaattgagtttgcccgaaatgtggcaggccttaaggatgccaatagctctgaattcaaaccggatggtccccattcggtaattgaccttttgccggaacaaaaagaagtggaacagttaggaggcaccatgcgtttgggattatatccgtgtaagcttgttccggggacaaaagctcatgctgcttacggagaagaaattatttacgaacgccaccggcaccggtatgagtttaacaatgagtaccgggaattattaaccggtttaggtctggtaataagtggtacttctcccgacggccggctggtggaaataatagaactttcggaccatccgtggtttgtggcgacccagtttcaccccgaatttaaatcaagacccaatagaccccatccgcttttccgggagtttatcggggcgagtttaaaaaccaataaattgttttag

SEQ ID NO: 31337 - protein, 535 aa, Carboxydothermus hydrogenoformans
MTKFIFVTGGVVSSLGKGITAASLGRLLKSRGLKVAIQKFDPYINVDPGTMSPYQHGEVFVTDDGAETDLDLGHYERFIDINLTKNSNVTTGKVYWAVISKERRGDYLGGTVQVIPHITNEIKERILRVAKESNPDVVITEIGGTVGDIESLPFLEAIRQLKNDVGKDNVLYIHVTLVPTLRVTGELKTKPTQHSVKELRSIGIQPDIIVARSEQPLSREITEKIALFCDIDKNAVIQAVDASNIYEVPLKLKEEGLDDIVIKKLGLTCGEPDLSEWEQIVERYKNPKFEVTIGIVGKYVSLPDAYLSVAEALRHAGIYHETRVNIRWIDSEMLEKEPVEKYLSNLDGILVPGGFGDRGVEGKIKAIQYARENKVPYLGLCLGMQTAVIEFARNVAGLKDANSSEFKPDGPHSVIDLLPEQKEVEQLGGTMRLGLYPCKLVPGTKAHAAYGEEIIYERHRHRYEFNNEYRELLTGLGLVISGTSPDGRLVEIIELSDHPWFVATQFHPEFKSRPNRPHPLFREFIGASLKTNKLF

SEQ ID NO: 31338 - DNA, 1653 bp, Caulobacter crescentus
  CDS (1)..(1653): transl_table=11
atgacgcggtacatcttcatcaccggcggcgtggtttcctcgcttggcaaaggtctggcctcggcggcgctcggcgcgctgctgcaagcgcgcggctacaaggtccgccttcgtaagctcgacccctatctcaacgtcgatccgggcacgatgagcccgtatcagcacggcgaggtcttcgtgaccgacgacggggccgaaaccgacctggacctgggccactacgagcgcttcaccggcgtgtcggcgaccaaggccgacaacatcaccaccggccagatctacaagacgatcatcgagaaggagcgccgcggcgactatctgggcgcgaccgtccaggtgatcccgcacgtgaccaacgagatcaaggacttcgtcctgtcgccggccatggacgagacgggcgagaaggccgtcgacttcgtgctggtcgagatcggcggcacggtcggcgacatcgagggcctgccgttcttcgaggccatccgccagctgcgccaggacctgccgcgcggccagagctgctatgtgcacctgaccctgctgccgttcatcaagacggccggcgagatgaagaccaagccgacccagcactcggtcaaggagctgcgctcgatcggcatccagccggacatcctgctgtgccgctgcgagcaggagatcccgccggaggaaaagcgcaagatcgcccagttctgcaacgtgcggcccagcgcggtgatccaggcgatggactcatcgtccatctacgccgtgccgatcgactatcacgagcagggcctggacgccgaagtgctggacgtgttcggcatgcgcgatgcgccggctccggacctgacgcgctggaagaccatcgacgacaccgtccagcatccggacggcgaggtcaccatcgccgtcgtgggcaagtacacggtgctgaaggacgcctacaagtcgctgatcgaggctctgcaccacgggggcctggccaacaaggtcaaggtcaacctcgactgggtcgagagcgagaccttcgagggcgacgagggggcggctgcggcccgtcttgagaacgcccacgccatcatggtgcccggcggcttcggcgagcggggcgcggagggcaagatccgcgcggcccagttcgcccgggagcggaaggtgccgtatttcggcatctgctttggcatgcagatggcggtcatcgagaccctgcggaacgtcgcgggcatcaaggacgccagctccagcgaattcgggcccaccgagcgtccggtcgtcggcatcatgaccgagtggatcaagggcaatgagaccgtccagcgccgcgccaatgacgatctgggcggtacgatgcgtctgggggcctatgacgcggtcctgacggccggttcgaagatcgccgagatctatggggccaccgagatcagcgagcgccaccgccaccgctacgaggtcaatatcggctacgtccacctgatggaggacgccggcctgaaactgaccggtcgatcgcccaacggcgtgctgcccgaaatcgtcgagcgggacgaccatccgtggttcatcggcgtgcagtatcaccccgaactgaagagccgtccgttcgctccgcacccgcttttcgccagctttatcgcggcggcgaaggagcatggacgcctcgtctga

SEQ ID NO: 31339 - protein, 550 aa, Caulobacter crescentus
MTRYIFITGGVVSSLGKGLASAALGALLQARGYKVRLRKLDPYLNVDPGTMSPYQHGEVFVTDDGAETDLDLGHYERFTGVSATKADNITTGQIYKTIIEKERRGDYLGATVQVIPHVTNEIKDFVLSPAMDETGEKAVDFVLVEIGGTVGDIEGLPFFEAIRQLRQDLPRGQSCYVHLTLLPFIKTAGEMKTKPTQHSVKELRSIGIQPDILLCRCEQEIPPEEKRKIAQFCNVRPSAVIQAMDSSSIYAVPIDYHEQGLDAEVLDVFGMRDAPAPDLTRWKTIDDTVQHPDGEVTIAVVGKYTVLKDAYKSLIEALHHGGLANKVKVNLDWVESETFEGDEGAAAARLENAHAIMVPGGFGERGAEGKIRAAQFARERKVPYFGICFGMQMAVIETLRNVAGIKDASSSEFGPTERPVVGIMTEWIKGNETVQRRANDDLGGTMRLGAYDAVLTAGSKIAEIYGATEISERHRHRYEVNIGYVHLMEDAGLKLTGRSPNGVLPEIVERDDHPWFIGVQYHPELKSRPFAPHPLFASFIAAAKEHGRLV

SEQ ID NO: 31340 - DNA, 1614 bp, Chlamydophila abortus
  CDS (1)..(1614): transl_table=11
atgtcattcaagtgcatctttttaacaggaggagtcgtatcctccttaggcaagggattaactgctgcctcacttgctctactactagagcgacaaggacttaaagttgctatgttaaaactggatccttatcttaacgtcgatccaggaacaatgaatccttatgaacacggtgaggtttacgttaccaatgacggtatagagacagatctcgaccttggtcattatcatcgcttttcttcagtaaacctatctaggtattctacagcgacttcagggcaaatctatgcccgagtaattaaaaaagaacgcgatgggttgtatctaggaagtacagttcaagttatcccgcacatcactaacgaaatcatcgaagttatcttagagtgtgctagggaaaatcatcccgatgtattaatcgtagaaatcggtggtaccgttggagatatagaatccctacctttcttagaagctatccgacaattccgttatgagcatgctgaagactgcttcagcattcatatgacctacgtaccttatttacaagccgcaggagaggtaaaaaccaaacctacgcagcactccgtccaaagtttgcgaagcattggcattattcctgatgcgattctctgcagatctgaagctcctttaagctcagaagtaaaaaagaaaatcagcctattttgcaatgttcctagtaccgcggtttttaacgttgtcgatgtggaacattccatatacgaaatgcccttaatgttatctcaagaaaagatctctacgtttatcacagaaaaattaggactgtttactaaaaaagaagatctaagtgattgggaaatgttagtagaacgtttgcgccatcctcttcctaataagatacgcttaggtttagtcggtaaatacgtacaacataaagacgcgtataaatctgtttttgagtctatcacccacgccgctttaagcttgaattgctcagtagagttattccctttagactctgatgatccgcatttccttgaaaccttagaactctgtgacggctgcctggtccccggaggttttgggtctcgaggttgggaagggaaaattattgccgccaagctgtgcagagaaagagggatcccttattttggaatctgcttaggtatgcaggttctcgttgttgaatatgctcgtcacgtcctccatctagaacacgcaaactctacagaaatggacaaagatacacctgatcctgtgatttgtatgttggattggcaagcttcattaatcgctacaggcggtacgatgcgtcttggagcctatccctgtgcattatcaccaggaagtaaagtatacgcgatgtatgggcaacctgaaattatggaacgccatcgccatcgctatgaagtgaatttcaactatatacaacaattaaaagatcacggattggatattgtgggtacgtgcccagaacaaggactttgcgaaatcgtagaaatcaaagatcacccttggatgataggagtacaattccacccagaattcctttcaaaattgatcaagcctcacccactctttgtaggctttatcgaggcagcacttcttcactctaggaataaaacttatgtctaa

SEQ ID NO: 31341 - protein, 537 aa, Chlamydophila abortus
MSFKCIFLTGGVVSSLGKGLTAASLALLLERQGLKVAMLKLDPYLNVDPGTMNPYEHGEVYVTNDGIETDLDLGHYHRFSSVNLSRYSTATSGQIYARVIKKERDGLYLGSTVQVIPHITNEIIEVILECARENHPDVLIVEIGGTVGDIESLPFLEAIRQFRYEHAEDCFSIHMTYVPYLQAAGEVKTKPTQHSVQSLRSIGIIPDAILCRSEAPLSSEVKKKISLFCNVPSTAVFNVVDVEHSIYEMPLMLSQEKISTFITEKLGLFTKKEDLSDWEMLVERLRHPLPNKIRLGLVGKYVQHKDAYKSVFESITHAALSLNCSVELFPLDSDDPHFLETLELCDGCLVPGGFGSRGWEGKIIAAKLCRERGIPYFGICLGMQVLVVEYARHVLHLEHANSTEMDKDTPDPVICMLDWQASLIATGGTMRLGAYPCALSPGSKVYAMYGQPEIMERHRHRYEVNFNYIQQLKDHGLDIVGTCPEQGLCEIVEIKDHPWMIGVQFHPEFLSKLIKPHPLFVGFIEAALLHSRNKTYV

SEQ ID NO: 31342 - DNA, 1614 bp, Chlamydophila caviae
  CDS (1)..(1614): transl_table=11
atgccattcaagtgcatctttttaacaggaggagttgtttcttccctaggcaagggattaaccgcagcctcattagctctattattagagcgtcaaaatcttaaagttgccatgttaaaactggatccctatcttaacgttgatccgggaactatgaatccttacgaacacggtgaggtctacgttaccaacgacggaatagagacggatctagatcttggtcactatcatcgattctcttcagtaaacctatcgaaatattctacagcaacctcaggacaaatctacgctcgagtgattaaaagagaacgcgaaggagtttatctaggaagcactgttcaagttatccctcatattactaacgagatcatcgaagtgatcctagaatgtgctaaggaaaatcaacctgatgtattaatcgtagaaattggtggcactgttggtgatatagaatccctaccttttctcgaagctattcgccaattccgttgcgagcatgcggcaaactgcttcagcattcatatgacttatgtgccttatttaaaagctgctggagaggtaaaaacaaagcctacgcaacattctgttcaaagcttaagaggaattggaattattcctgatgccattctttgcagatctgaaacgcctctaagtaacgaggtgaaaaagaaaatcagtctattttgtaacgtccccgatagcgccgttttcaatgttgtagacgtcgagcattccatttatgaaatgcccttaatgctctctcgagaaaagatttctacatttattacggaaaagttagggctatttacaaagcaagaagacttaagcgattggaaaattctcatagaacgtctacgcaatcctcttccaaataaagtgcgtattggtttggtaggtaaatacgtacaacataaagatgcgtataaatctgtctttgagtcgattactcatgccgcattaagtttaaattgcgcggtagacattcttcctttagattctgaagatcctcatttccttgaagccctagaagagtgtgatggctgtttagttcccggaggttttggaattcgtggatgggaaggaaaaattactgcagcaaagctctgccgagaaagaggcatcccttactttggtatttgcctaggaatgcaagttcttgttgttgagtatgctcgcaatgtcatggacttagaaaaagccaattcaacagaaatggatcaagatacaccacatcctgttatctgtatgatggatggacaagccgctctagtcgctaccgggggaaccatgcgtcttggcgcctacccttgcacactatctccaggaaccaaggtgtatgaagcctacggacaatccgaaattatggaacgccatcgccaccgctatgaagtaaattttgactatatacagcaattaaaagatcacggtctgaatatcgtggggagatgtccgcaacaaggactttgtgaaatcgtagaaaccgaaaatcatccctggatggtcggtgtgcaattccatcctgagttcctgtcaaaattgataacacctcatcctctatttgtaggctttattcaggcagcacttctatactcgaagaataaaagccatgtctaa

SEQ ID NO: 31343 - protein, 537 aa, Chlamydophila caviae
MPFKCIFLTGGVVSSLGKGLTAASLALLLERQNLKVAMLKLDPYLNVDPGTMNPYEHGEVYVTNDGIETDLDLGHYHRFSSVNLSKYSTATSGQIYARVIKREREGVYLGSTVQVIPHITNEIIEVILECAKENQPDVLIVEIGGTVGDIESLPFLEAIRQFRCEHAANCFSIHMTYVPYLKAAGEVKTKPTQHSVQSLRGIGIIPDAILCRSETPLSNEVKKKISLFCNVPDSAVFNVVDVEHSIYEMPLMLSREKISTFITEKLGLFTKQEDLSDWKILIERLRNPLPNKVRIGLVGKYVQHKDAYKSVFESITHAALSLNCAVDILPLDSEDPHFLEALEECDGCLVPGGFGIRGWEGKITAAKLCRERGIPYFGICLGMQVLVVEYARNVMDLEKANSTEMDQDTPHPVICMMDGQAALVATGGTMRLGAYPCTLSPGTKVYEAYGQSEIMERHRHRYEVNFDYIQQLKDHGLNIVGRCPQQGLCEIVETENHPWMVGVQFHPEFLSKLITPHPLFVGFIQAALLYSKNKSHV

SEQ ID NO: 31344 - DNA, 1611 bp, Chlamydia muridarum
  CDS (1)..(1611): transl_table=11
atgtccttcaaaagtatctttttgaccggaggcgtggtttcttctttagggaaagggctaaccgcggcttctttagctctcctattagagagacaaggcctaaaagtcgccatgcttaagttagatccttacttgaatgtggatcctggaaccatgaacccttatgagcatggagaggtgtatgttactgatgatggcgtagaaacagatcttgaccttgggcattatcaccgtttttcttccgttcagctgtccaaacattctactgctacctctgggcaaatctatacccgagtgattactaaagaacgaaatggggaattcttaggaagtacagttcaagtcatccctcatgtcaccaatgaaattatcaatgtcattcaagcatgtgcagaacatcataaaccagatgttcttattatagaaatcggagggactattggtgatattgaatctcttccttttctagaggcagtaaggcaatttcgctgtgaacatcctcaggattgtctcagcattcatatgacttatgtcccttatctaaaatcagcaaaggaaattaaaaccaaaccaacacaacattctgttcaaaatttacggagtatcggcatctctcctgatgtaatcctctgccgttctgaggtgtcccttagttcagaagtgaaaagaaaaattagcctattttgcaacgttccagagaacgctgttttcaatgcgatagacttagagaactccatttatgaaatgcctctgctcttggctcgagaaaatattgtagacttcttattgtccaaatttggtttttcgcctaaatccttagatcttactgattggcaaaatcttgtaacgactttgtgtgatgggaatcggcatcttgttcgtataggactcgttggtaagtatttagaacacaaagatgcttacaaatcagtgtttgaatcgctctctcatgcttccatccctgcaaactgttccctcgagatagttcctatttctcctgaatctgaagctcttactaatcaactctctcaatgcgacggctgtttaattcccggagggtttggaaccagaagctgggaagggaaaattgctgctgcgcgctattgcagagataacaacatcccttgcttcgggatttgtttaggaatgcaggcattagtagttgagtatgcaagatatgctttaagccttcctcttgctaattccttagaaatggatcctaacacaccagatcctgttgtctgtatgatgcaggggcaagataccatgattaaaggagggaccatgagactaggcgcctatccttgccaaattacgcctaaatctttagccttcgaagcttataagacagatcttgtccaagaacgtcacagacatcgttatgaagtgaaccctgcttatgtagatcttctacaaaaaaatggattaagaatagtgggagtttgtcctcagggagatctttgtgagattattgaaatccctaatcacagatggatgcttggtgtacaattccatcctgaatttttatcaaaactagctgctccccatcctctttttgtaaaatttcttagcgctgctctagactattctttggagaaaggtcgtgaatag

SEQ ID NO: 31345 - protein, 536 aa, Chlamydia muridarum
MSFKSIFLTGGVVSSLGKGLTAASLALLLERQGLKVAMLKLDPYLNVDPGTMNPYEHGEVYVTDDGVETDLDLGHYHRFSSVQLSKHSTATSGQIYTRVITKERNGEFLGSTVQVIPHVTNEIINVIQACAEHHKPDVLIIEIGGTIGDIESLPFLEAVRQFRCEHPQDCLSIHMTYVPYLKSAKEIKTKPTQHSVQNLRSIGISPDVILCRSEVSLSSEVKRKISLFCNVPENAVFNAIDLENSIYEMPLLLARENIVDFLLSKFGFSPKSLDLTDWQNLVTTLCDGNRHLVRIGLVGKYLEHKDAYKSVFESLSHASIPANCSLEIVPISPESEALTNQLSQCDGCLIPGGFGTRSWEGKIAAARYCRDNNIPCFGICLGMQALVVEYARYALSLPLANSLEMDPNTPDPVVCMMQGQDTMIKGGTMRLGAYPCQITPKSLAFEAYKTDLVQERHRHRYEVNPAYVDLLQKNGLRIVGVCPQGDLCEIIEIPNHRWMLGVQFHPEFLSKLAAPHPLFVKFLSAALDYSLEKGRE

SEQ ID NO: 31346 - DNA, 1614 bp, Chlamydia pneumoniae
  CDS (1)..(1614): transl_table=11
atgcctttcaaatgcatatttttaacaggaggagttgtctcctctttaggaaaagggttaacagcagcatccctagccctaattttagaacgtcaacggcttaacgttgctatgttaaaattggatccatatctaaatgtagatccaggaactatgaatccctttgagcatggagaaatctatgttacagatgatggggttgagacagatcttgatctcggtcactatcatagattctcttctgctgcactttctagacattcaagtgccacttcaggtcaaatttatgctcgtgtcattaaaagagagcgtgagggtgattatctaggaagcacggtacaagtcatcccacacattaccaatgaaatcattcaagtcattttagacgcagctaaagagcactctccagatgttcttattgtcgagattggagggaccataggagatattgaatctcttcccttcctagaagcaattcgacaatttcggtatgaccattccgaagattgtctaaatattcatatgacttatgtcccctatttacaggctgctgacgaagttaaaagtaagccaacgcaacactccgtacaaactctacgtggtattggcatcattcccgacgcgattctatgtcgttctgaaaaacctttaactcaagaagttaaatctaaaatcagtctcttttgcaatgttcccaaccgggcagtgtttaacgttatagatgtaaaacataccatttatgaaatgcctttgatgcttgctcaagagaaaattgccaatttcataggggaaaagttaaagttagctacggttccagaaaatcttgatgactggagggtactggtaaatcagctatctcaagatcttccgaaggtaaaaattggagtcgttgggaagtatgttcaacaccgagatgcctataagtccatattcgaagcactcactcatgcagctttaagattaggtcatgctgctgaaattatccctattgatgctgaagatgaaaatcttactatggaactctctcaatgcgacgcatgtttagttcctggaggcttcggcgttcgtggttgggaaggaaaaatcgctgcagctaaattctgtcgagaacaaggcattccttattttggtatttgcctaggaatgcaagtgcttgttgtagagtatgctcgcaatgtcttaaatctggatcaggcaaattccctagaaatggaccccaacacccctcatcctattgtatatgtcatggaggggcaagatcccttagtagctacgggaggcaccatgcgcttaggagcgtatccttgtctattaaagccagggagcaaagcccataaagcatataacgaatcttctctgattcaggagcgccaccgccatcgctatgaagtaaatccggattacatacagagtttagaagaccacggcttacggatcgttgggacttgtcctccacaagggctttgtgaaattattgaagtttcggatcatccttggatgattggtgtgcaattccatccagaatttgtatctaaactcatctctccccatcctctatttatcgcatttatagaagcagctctagtctattctaaggatgcaagccatgtctaa

SEQ ID NO: 31347 - protein, 537 aa, Chlamydia pneumoniae
MPFKCIFLTGGVVSSLGKGLTAASLALILERQRLNVAMLKLDPYLNVDPGTMNPFEHGEIYVTDDGVETDLDLGHYHRFSSAALSRHSSATSGQIYARVIKREREGDYLGSTVQVIPHITNEIIQVILDAAKEHSPDVLIVEIGGTIGDIESLPFLEAIRQFRYDHSEDCLNIHMTYVPYLQAADEVKSKPTQHSVQTLRGIGIIPDAILCRSEKPLTQEVKSKISLFCNVPNRAVFNVIDVKHTIYEMPLMLAQEKIANFIGEKLKLATVPENLDDWRVLVNQLSQDLPKVKIGVVGKYVQHRDAYKSIFEALTHAALRLGHAAEIIPIDAEDENLTMELSQCDACLVPGGFGVRGWEGKIAAAKFCREQGIPYFGICLGMQVLVVEYARNVLNLDQANSLEMDPNTPHPIVYVMEGQDPLVATGGTMRLGAYPCLLKPGSKAHKAYNESSLIQERHRHRYEVNPDYIQSLEDHGLRIVGTCPPQGLCEIIEVSDHPWMIGVQFHPEFVSKLISPHPLFIAFIEAALVYSKDASHV

SEQ ID NO: 31348 - DNA, 1698 bp, Chlorobium tepidum
  CDS (1)..(1698): transl_table=11
atggcgcgcccgaagaatgtaaagcatatttttgtaaccggcggggtgatctcctctcttggaaagggcatcctttctgcttcgcttggccttttgctcaagtcccgcggattgcgcgtggcgatccagaaatacgatccctacatcaacgtcgatcccggtacgatgtcgccctaccagcatggcgaggtttacgtgaccgacgacggcgctgagactgatctcgatcttggccactacgagcgcttcctcgacgaaccgacctcgcaggcctgcaacctgacgatgggccgcgtctacaagtcggtcatcgacaaggagcggcgcggcgaatatctcggcggtacggtgcaggtcgtgccccacgtgatcgacgagatcaaggagaagatgggcgatctggccaaaaatggtagcatcgatgtgctgatcaccgaaattggcggtaccatcggcgatatcgagtcgcttcccttcctcgaagcgatgcgccagctcaagctcgaacttggcgagcacaatctgctcaacatccaccttaccttcgtgccgtacatcaaggcggctagcgagctgaagaccaagccgacgcagcacagtgtcaagatgctgctcgaaaccggtattcagcccgacattctggtctgccggagcgagaagccgctgtcgagggagatcaagaacaaggttggtcacttctgcaacgttcatgacctggacgttatcggcctcaacgactgtgatacgatctacgaagtgccgctcatgctgctcaaggagcagctcgatctgcgcgtcatgaaaaagctggggttgaagaagttccgcgaacccaatctggagtactggaagaacttctgcgaaaaggtgaagcatccgaaggatggcgagatcaccattggcatatgcggcaagtacactgagtatcccgacgcctacaaatcgattatcgaatcgttcattcatgccggcgctagcaatgacgtcagggtgttggtcaagatgctcagggctgaagatgccgaagatccgaagttcgatatttcgagcgccttcaaggggatcagtggcctgcttgtcgcgcctggttttggcgaccgtggcatcgagggcaaagtgcgtttcgttcagtatgcacgagagaacaacattccgttctttggtatctgcctcggcatgcagtgcgccaccatcgaattcgcccgcaacatctgtgacctgcccgacgccaactcgaccgagttcaacaagcgaacacgttttccggtcatcgacctcatggagcaccagaaaaaggtcaaggagaaagggggaacgatgcgtctcggcagctatccttgtattctgaaggagggttcgaaagctcatgagctctatggcaaattccttatcaatgagcgtcatcgccaccggtacgaattcaacaaccagttccgcaagcttttcgaagagaaaggaatgattttttcaggcacctcgccgaacggtgatctggtagagatcgttgaactgaagaatcatcgctggttcgtagctgtgcagttccatcccgagctgaaatcgcgagtgcagaaagtgcatccgctttttgacggcttcgttcatgctgccaaggagtttgcacaaggcaagcgccagctctctcttgaggtcgaaatgccgaggctcagttctacggagatggagaacgcaggctga

SEQ ID NO: 31349 - protein, 565 aa, Chlorobium tepidum
MARPKNVKHIFVTGGVISSLGKGILSASLGLLLKSRGLRVAIQKYDPYINVDPGTMSPYQHGEVYVTDDGAETDLDLGHYERFLDEPTSQACNLTMGRVYKSVIDKERRGEYLGGTVQVVPHVIDEIKEKMGDLAKNGSIDVLITEIGGTIGDIESLPFLEAMRQLKLELGEHNLLNIHLTFVPYIKAASELKTKPTQHSVKMLLETGIQPDILVCRSEKPLSREIKNKVGHFCNVHDLDVIGLNDCDTIYEVPLMLLKEQLDLRVMKKLGLKKFREPNLEYWKNFCEKVKHPKDGEITIGICGKYTEYPDAYKSIIESFIHAGASNDVRVLVKMLRAEDAEDPKFDISSAFKGISGLLVAPGFGDRGIEGKVRFVQYARENNIPFFGICLGMQCATIEFARNICDLPDANSTEFNKRTRFPVIDLMEHQKKVKEKGGTMRLGSYPCILKEGSKAHELYGKFLINERHRHRYEFNNQFRKLFEEKGMIFSGTSPNGDLVEIVELKNHRWFVAVQFHPELKSRVQKVHPLFDGFVHAAKEFAQGKRQLSLEVEMPRLSSTEMENAG

SEQ ID NO: 31350 - DNA, 1620 bp, Chlamydia trachomatis
  CDS (1)..(1620): transl_table=11
atgtctttcaaaagcatctttttgactggaggcgtagtttcttctttaggtaaaggacttaccgcagcctctctagctcttctactagagagacaagacttgaaagttgccatgctcaagttggacccctatttaaacgtagatccagggaccatgaatccttatgagcatggagaagtatacgtgaccgacgatggcgtagaaactgatctcgatcttggccattatcatcgcttttcttctgtacaactgtctaaatactccaccgccacttctggacaaatttatactaaggtgctcactaaggaacgtaatggagaatttcttggcagtacagttcaggttatccctcacgtaactaatgagattattaatgtcattcaatcgtgcgcagatcaccataagcctgatatccttattgtggaaatcggagggacaattggagatatagaatcgctaccttttctagaagctgtacgacaattccgctgcgaacatcctcaggattgccttagcattcacatgacatatgtcccttatctaagagctgcaaaagaaattaaaaccaaacctactcaacattccgtacagaacttgcgcagcattggaatttctcctgatgtaattttgtgccgttctgaagctccacttagcacggaagtaaaaagaaaaatcagcctgttttgtaatgtgccagaacatgcagtttttaacgcgatagacttagagcgctccatttacgaaatgcccttgttattggctaaagaaaatatctcagacttcttgttaaataaacttggtttttcacctaaacctttggatctttcagattggcaagatcttgtggaggctttatgtgataaggagcgccaacatgttcgcatagggcttgttggaaaatacctagaacataaagacgcatataaatctgtattcgaatctcttttccatgcgtctgtgccagcaaactgctctttggaacttgttcctattgctcctgaatcagaagatcttttagaacaactgtctcagtgcgatggatgtttaattcctggaggttttggcacaagaagttgggaagggaaaatctcagcagctcgttattgccgagaacggaatatcccctgtttcggaatctgtttaggaatgcaggctttagtagtcgaatatgcaagaaatgttttggacaaacctcttgccaattctatggaaataaatccagagactccagatccagtcgtctgcatgatggaaggacaagattctgtcgttaaagggggcactatgagattaggagcttatccttgccgaattgctcccggatctttagcctctgctgcttataagacggatcttgtacaagaacgtcaccgccatcgatatgaagtaaatccttcttatatagaacgtttagaagaacatggattaaaaatagctggggtctgtcctttaggagagctttgcgaaattgttgaaatccccaatcatagatggatgcttggcgtacagtttcatcccgaatttttatcaaaattagctaagcctcatccactatttatagaattcattcgcgctgctaaagcctattctttggagaaagcgaatcatgaacatcgctaa

SEQ ID NO: 31351 - protein, 539 aa, Chlamydia trachomatis
MSFKSIFLTGGVVSSLGKGLTAASLALLLERQDLKVAMLKLDPYLNVDPGTMNPYEHGEVYVTDDGVETDLDLGHYHRFSSVQLSKYSTATSGQIYTKVLTKERNGEFLGSTVQVIPHVTNEIINVIQSCADHHKPDILIVEIGGTIGDIESLPFLEAVRQFRCEHPQDCLSIHMTYVPYLRAAKEIKTKPTQHSVQNLRSIGISPDVILCRSEAPLSTEVKRKISLFCNVPEHAVFNAIDLERSIYEMPLLLAKENISDFLLNKLGFSPKPLDLSDWQDLVEALCDKERQHVRIGLVGKYLEHKDAYKSVFESLFHASVPANCSLELVPIAPESEDLLEQLSQCDGCLIPGGFGTRSWEGKISAARYCRERNIPCFGICLGMQALVVEYARNVLDKPLANSMEINPETPDPVVCMMEGQDSVVKGGTMRLGAYPCRIAPGSLASAAYKTDLVQERHRHRYEVNPSYIERLEEHGLKIAGVCPLGELCEIVEIPNHRWMLGVQFHPEFLSKLAKPHPLFIEFIRAAKAYSLEKANHEHR

SEQ ID NO: 31352 - DNA, 1641 bp, Chromobacterium violaceum
  CDS (1)..(1641): transl_table=11
atgaccaagtacatcttcgtaaccggtggcgtggtgtcctccctgggcaagggcattgccgctgcgtccatcgccgcgatcctcgaatcccgcgggctgaaagtcaccatgctgaagctcgatccctatatcaacgtcgacccgggcacgatgagccccttccagcacggcgaggtgttcgtcaccgaagacggcgcggaaaccgaccttgacctcggccactacgagcgcttcatccacgccaagatgaagaagagcaacaacttcaccaccggccaggtgtacgaatcggtcatcaccaaggagcgccgcggcgactacctgggcggcaccgtgcaggtcatcccgcacatcaccgacgaaatcaagctgaaaatgggcgaaggcgcggctgacgccgacgtcgccatcgtcgagatcggcggcaccgtcggcgacatcgaatcgctgcccttcctggaagccatccgccagatgcgctccaaccacggccgcaagaacacgctctacgtgcacctctcctacgtgccctacatcgccaccgccggcgaaatcaagaccaagccgacccagcactcggtgaaggagctgcgcgagatcggcatccagccggacatcctgctgtgccggatggaccgcgagctgccggaggacgaaaagcgcaagatcgcgctgttctgcaacgtggaagagaacgcggtgatcggctgttacgactccgactccatctacaaggtgccgggcatgctgcacgcccagggcatcgacgacatcatcgccgaacagctgcaactggacctgccccaggccgacctgtccgcctgggaccgcatcatcgacgcgatcgaaaagccggaccacgcgatcaagatcgcgatggtgggcaagtacgtcgatctgaccgaatcgtacaaatcgctgaccgaagcgctgaagcacgccggcatccacacccgcaccaaggtcgacatcatttacgtcgactccgaggaaatcgagcgcgacggcgccgagtctctgcgcgacatggacgccatcctggtgccgggcggcttcggcaagcgcggcgtggaaggcaagatcaaggcggtgaaattcgcccgcgagaacgacatcccctacctgggcatctgcctgggcatgcagatcgcgctgatcgaatacgcccgcgacgtggccggcatggccggcgccaactccaccgagttcgacctggacaccaacttcccggtggtggcgctgatcgacgagtgggtgaaccacgacggcaagatcgagaagcgcgacgagaactccaatatgggcggcaccatgcgcctgggcggccagcagtgcgacctggttcccggctcgctggccgcgcgcgtctacggcagcacagagatcaccgagcgccaccgccaccgctacgaggtcaacaactactacatccagcgcctggaacaggccggcctgaccatcagcggccgctccgccggccacgagaagctggtcgagaccatcgagctgacgggccaccgctggttcttcgcctgccagttccacccggaattcacctccaccccgcgtgacggccatccgctgttcatcgcctacgtgaaggccgcgctggcgcaccaggccgacaagcaggccagctga

SEQ ID NO: 31353 - protein, 546 aa, Chromobacterium violaceum
MTKYIFVTGGVVSSLGKGIAAASIAAILESRGLKVTMLKLDPYINVDPGTMSPFQHGEVFVTEDGAETDLDLGHYERFIHAKMKKSNNFTTGQVYESVITKERRGDYLGGTVQVIPHITDEIKLKMGEGAADADVAIVEIGGTVGDIESLPFLEAIRQMRSNHGRKNTLYVHLSYVPYIATAGEIKTKPTQHSVKELREIGIQPDILLCRMDRELPEDEKRKIALFCNVEENAVIGCYDSDSIYKVPGMLHAQGIDDIIAEQLQLDLPQADLSAWDRIIDAIEKPDHAIKIAMVGKYVDLTESYKSLTEALKHAGIHTRTKVDIIYVDSEEIERDGAESLRDMDAILVPGGFGKRGVEGKIKAVKFARENDIPYLGICLGMQIALIEYARDVAGMAGANSTEFDLDTNFPVVALIDEWVNHDGKIEKRDENSNMGGTMRLGGQQCDLVPGSLAARVYGSTEITERHRHRYEVNNYYIQRLEQAGLTISGRSAGHEKLVETIELTGHRWFFACQFHPEFTSTPRDGHPLFIAYVKAALAHQADKQAS

SEQ ID NO: 31354 - DNA, 1608 bp, Clostridium acetobutylicum
  CDS (1)..(1608): transl_table=11
atgaaaactaaatacatattcgtaacaggtggagttgtttcgtcattagggaaaggaataacagcagcttctctaggacgacttcttaaaaatagagggcttaaggtatcaatacaaaaatttgatccttacataaatgtagacccaggaacaatgagtccgtatcagcatggtgaagtattcgtaacagatgatggtgctgagacagatttggatttaggccattatgagagatttatagatgaaaatttaagtaaaaatagtaatgttactacaggaaaagtttattggtcagttataaataaagaaagaagaggagattatcttggaggtacagttcaagtaatacctcatataacaaatgagcttaaagagagagtatatagagttgcaaaagaaaaagatgtagatgttgtaataacagaaataggaggaacagttggtgatatagaatcacttccattccttgaagctattagacagataaaatatgaagttggatttggaaattcatgttttatacatgtaacacttttaccttatcttagaaaagcaggagaaataaaaacaaaaccaactcaacactcagttaaagagttaagaggaataggtattcaaccagatattatagtttgcagaacggaaaaagaaatatcaaaagatgttagaagcaagatagggttattctgtaatatagatggagattctgttatttcaaatctagatgcagaaaatttatacgaagttccattaatgcttcatgaccaaggattggattctttagtttgtaaaaaattagaacttgaatgccaagaagtggacaattctgagtgggaaagcatggttaagaatattaaaagtctttcaggagaagttacaataggacttgtaggaaaatatgttgaattacatgatgcgtatatatcagtagtagaatcgctaaatcatggaggttttgcaaacaatgtttctgtaaatgttaaatggattaactccgaagaggtaacaaaggataacgttgatagtgtattaagcgatgttgatggtatacttgttcctggaggttttggagatagaggtattgagggtaaaattgaagcgataagatgggctagagaaaataaaatacctttctttggaatatgtcttggaatgcaatgtgccgtaattgaatatgcaagaaatgttttaggacttgaaggagcacatagttcagagatagatccacaaacaaaataccctgttatagatcttatgccagatcaaaaggatatagatgacaagggtggaactatgagacttggattgtatgcatgtaaattatcaaaagatacaaacgcttatgatgcatatgaagaagaagttatatatgagagacacagacatagatatgaattcaacaatgagtttagaaaaagattaactgaagaaggattaattcttgcgggcacaagtccagatgataggttagtggaaatagttgaaattaaagatcatccttggtttgttggagtacaatttcatccagaatttaaatcaagaccaaatagaccacatgctcttttcagggattttataaaagttgcgtgtacagtaaaagaaaaataa

SEQ ID NO: 31355 - protein, 535 aa, Clostridium acetobutylicum
MKTKYIFVTGGVVSSLGKGITAASLGRLLKNRGLKVSIQKFDPYINVDPGTMSPYQHGEVFVTDDGAETDLDLGHYERFIDENLSKNSNVTTGKVYWSVINKERRGDYLGGTVQVIPHITNELKERVYRVAKEKDVDVVITEIGGTVGDIESLPFLEAIRQIKYEVGFGNSCFIHVTLLPYLRKAGEIKTKPTQHSVKELRGIGIQPDIIVCRTEKEISKDVRSKIGLFCNIDGDSVISNLDAENLYEVPLMLHDQGLDSLVCKKLELECQEVDNSEWESMVKNIKSLSGEVTIGLVGKYVELHDAYISVVESLNHGGFANNVSVNVKWINSEEVTKDNVDSVLSDVDGILVPGGFGDRGIEGKIEAIRWARENKIPFFGICLGMQCAVIEYARNVLGLEGAHSSEIDPQTKYPVIDLMPDQKDIDDKGGTMRLGLYACKLSKDTNAYDAYEEEVIYERHRHRYEFNNEFRKRLTEEGLILAGTSPDDRLVEIVEIKDHPWFVGVQFHPEFKSRPNRPHALFRDFIKVACTVKEK

SEQ ID NO: 31356 - DNA, 1608 bp, Clostridium perfringens
  CDS (1)..(1608): transl_table=11
atgagcaaaaatactaagtatgtatttgtaacaggtggagttgtttcttcattaggaaaaggaataacagctgcttcattaggaagattattaaaaaacagaggattaagtgtaagtattcaaaaatttgatccatacctaaacattgacccaggtacaatgagcccataccaacatggagaagttttcgtaactgatgatggtgctgaaacagacttagacttaggtcactatgaaagattcatagatgaaaacttaactcaaaactcaaacgttacttcaggtagagtttactggtcagtaatatcaaaagagagaaaaggtgaatacttaggaggtactgtacaagttatacctcacataactaatgctataaaagatagagtacatagagtaggaaaagaaagagatgtagatgtagtaatcactgagatcggtggaacaataggtgatatcgaatcattacctttcttagaagctataagacaaatcaagtatgatgtaggtaaagaaaatgtttgtttcatacatgttacattagtaccttacttaggaaaagctggtgagttaaaaacaaaaccaactcaacactcagttaaagagttaagaagtataggaattcaaccagacataatagtttgtagatcagaaaaagaattatcagaagatatcaaaaagaaaatcggattattctgtaatatagatgcaagcgaagttatccaaaacttagatgcagagcatttatacgctgttcctctaatgttacacaaagaaggattagatagattagtttgtgaaaaattaggtcttggatgcagagacatagataatgctgaatggatagacatggttcatagaataactcacttaactcatacaactaagattgctttagttggtaaatatgttgagttacatgatgcatacatatcagtagttgaagctttaaatcatggtggattaagcaatgacactaatgttgaaatagagtggataaatgctgaagatgtaactaaagaaaatgttgatgaattattaagtggagtagatggagttctagttccaggtggattcggagacagaggagtagaaggaaagatcgaagctataagatgggctagagaaaacaagaaaccattcttaggaatatgcttaggaatgcaatgtgctgttatagaatacgctagaaacgtattaggattagaaggagctcattcatcagagttaaatccagaaactccattcccagtaatcgacttaatgcctgagcaaaaagatgttgaggatttaggtggaacaatgagattaggattatatccatgtaaattagaagataatacattctgtaaggatgtttatgcttcagatttaatctacgaaagacatagacatagatatgagttcaacaatgagtacagaactcaattaatagaaagcggattaactatagctggtacttcaccagatggaagattggttgagtgtgtagaagttaaggatcatccttggttcgtagcagttcaatatcatccagagttaaaatcaagaccaaacagacctcacccattattcgtaggatttgttggtgctgcattaaacaataaataa

SEQ ID NO: 31357 - protein, 535 aa, Clostridium perfringens
MSKNTKYVFVTGGVVSSLGKGITAASLGRLLKNRGLSVSIQKFDPYLNIDPGTMSPYQHGEVFVTDDGAETDLDLGHYERFIDENLTQNSNVTSGRVYWSVISKERKGEYLGGTVQVIPHITNAIKDRVHRVGKERDVDVVITEIGGTIGDIESLPFLEAIRQIKYDVGKENVCFIHVTLVPYLGKAGELKTKPTQHSVKELRSIGIQPDIIVCRSEKELSEDIKKKIGLFCNIDASEVIQNLDAEHLYAVPLMLHKEGLDRLVCEKLGLGCRDIDNAEWIDMVHRITHLTHTTKIALVGKYVELHDAYISVVEALNHGGLSNDTNVEIEWINAEDVTKENVDELLSGVDGVLVPGGFGDRGVEGKIEAIRWARENKKPFLGICLGMQCAVIEYARNVLGLEGAHSSELNPETPFPVIDLMPEQKDVEDLGGTMRLGLYPCKLEDNTFCKDVYASDLIYERHRHRYEFNNEYRTQLIESGLTIAGTSPDGRLVECVEVKDHPWFVAVQYHPELKSRPNRPHPLFVGFVGAALNNK
